United States Patent Application Publication US 2007/0054278 A1 - sequence listing, part 24

SEQ ID NO: 93863 - DNA, 46651 bp, Homo sapiens
agacttaaatgtaagacctaaaaccgtaaaaaccctagaaggaaaccttggcaataccattcaggacataggtatggacaaagacttcatgactaaaacaccaaaagcaatggcaacagaagttaaaattgacaaatgggatctaattaaaataaagagcttctgcacagcagcagaaactgtcatcagagtgaacaggcaacctacagaatgggagaaaatttttgcaatctatccagctgacaaagggctaatatccagaatctacaaagaacttaaacaaatttacaagaaaaaaaaaaccatcaaaaagtgagtgaaggatatgaacagacacttctcaaaagaagacatttatacagccaaaaaacatatgaaaaaaaccttatcatcactggccattagagaaatgcaaatcaaaaccacattgagataccatctcaagccagttagaatggtgatcattaaaaagtcaggaaacaatagatgctggagaggatgtggagaaataggaatgcttatacactgttggtgggagtgtaaattagttcaaccattgtggaagacagtgtggtgattcctcaaggatctagaactagaaatatcatttgacccggcaatcccattactgggtatatacccaaaggattataaattattctactatgaagactcatgcacacgtatgtttattgtggcactgttcacaatagcaaagacttggaaccaacccaaatgtccaacaatgatagactggataaagaaaatgtggcacatatacaccatggaatactatgcagccataaaatatgagttcatgtcctttgcagggacatggatgaagccggaaaccatcattctcagcaaactaatgcaagaacagaaaaccaaactccacatgttctcattcataactgggagctgaacaaggagaacacatggacacagggaggggaacatcgcacaccagggcctgtcagggggtggggggctaggggagggatagcattaggagaaatacctaatgtagatgacaggttgatgggtgcagcaaaccaccatggcacgtgtatacctatgtaacaaaactgcactttctgcacatgtaccctaggacttaaagtacaataaaaagtaaaggattgtgaaaccccagtttgacacaaaagaggaaaagtttgcgttggttgtaactatgtagagaatttcaccaaggaagacaatcttttaggtggggtctcaagaaagtcacacatggctagagttgggtaacagcacatggagagggctgtggaaacgtgtttcatggatgtaattggaggaactgctaatatgaggcatagaagcagccctgggagctgtaaaatgatgagagaggatgaggaacatggctgagatggctatagcagcgactcttttaaaattgtaggaggtaggtctttggccatttgactcacactaagttcatgcacagagcaaaccacaatagagatgatcagtcctggcacagcaccattgggtactggcagtgattccaccaatttctctcatgactgtgaccaccgatgctcttggtacctgtattggtcatgtgtgtaacaaaatttagagatctatctaccttgataggttgttttaagaaataaatgttaatatacctgtaaaaatcagagcataatgactagaatataaaaggcacccactggaggtgaattactttgccaccacctgacactctattctcttaggtttttataaacctataaaatctaaggcaaaagacatttgacggtttggttgtttttgtctttcaggattgatatgtacacagaaggtatagcagatttgggtgaaatgatccttcctctgcccatatgacaacctgaggataaagacaccaagcttgccttgaaccaacagagaacaaaaaatcgctatttccctgcctttgaaaaataagtgaagctgttcagcgttttgcatcactcagtttagagaccagtagaaaaacagtggctgggcattcctggggcactgaccttcactttcagtgagacttcatgaacaccaaggcagcactctgactctcaaggcattttatgcaaatagacttggaggaacaattgtaacacttatacacaagttataattttccaataaaattttaacttactagaccccaacattaaattctctgttgaacaaaatttcatgttcataagtagaacgtgggctgtggaaggctctggaccacactagaggttgctgttgagtctacggaaccccatggacttttattgaagacgaacatgatgaaagtgacccatcagaaaatattctggcaccctgtgtaggaagacacaagaccaattgcccaaccagagaatattgtagtgtttcagggatgggcatttattaaaaggagagtgactgtgggatgcagaggaagattttgtattttataataagttgcagacatcagtgcagttcacccttaaacgcttcagcttgcaaattataacatagtgctggttaggagtcagagtcaatgttgtaagaaagatgatgaattcaggttcacccaggtttacttcagatccgagggagatagagcagggaatgaggagagcagagaaggagaaatgaggactctgaaatagtctcctcctgggggaagagtgttgtcatgaaggtggagtcgctgcccaagggagattggagacggagagagaagaatgtagagccacgtcctaaatgtgaaggctccatgctgtagggcctggggcagacagaacatgtggcagcaggtgctaagcccctggcccatgtggaagaagcaagctgggcgggtggtgtagatgccacagtgatgtggatgagaagagaaaatgagagcttgagctccaaccaaggagtgagcagggctacacttcttactccctcagtgaaacagggaatgtggagaaaggtctggatctctgcatctatgcagtgaggcagcagaaatgggagagtcagactggagagactcagggagaagcaggggtcccagccttactgcacatgtgatggagaaccaggggtcccagccttactgcccatgtgatcctgatttgattcctccaattctcgacgtcttaaagagcaatggacaagactaccttgttggcaacaagctgagctgggctgacattcacttggtggaacttctctactacatggaagagcttgactctagccttatcttcagcttccctctgctgaaggtgacccatttcacagttctcagagaggcagacccatatctcccatcttgggatcttgtatctgggacctgggactgagtatgttttgaccccaatgttcaccaggccttcagtgccccaaagtctccaaaatgagcttccaggctccaattttgaggaatgaaaacacttttgttatggaaaggaaatttgtggtgcatgctaccccatgaagagtattttgccttttatcatggaaaggacccagggcccagcatgtctccccatcactctatttcaatgtggtttctgttcctgagttctctgggatgtcctttatcccatatgtgcccttgtcttcccgcattgagtcagtctgagcagagccctctccatctggtttcctccctaggctctgactcctgctgtctgacactgtgttcctctctgcacagctctccagcacactggccccctacactgtatctctcactgacaaaagtggtcccattatttgtgtttaatattttctataacattttcctttccaactcatttccccatattttcacttctgcttagagactgatctgtgttgaaatctcacggcacattgttttttcttgtcttatacaagagtcactaatctacaggattaatatgtaagaagaaagggatggctgaactgattaaaatctgaaagacatctttggggaaaatataagtgagctacatgttattcctctcatcttcatttctcgctcagtgtctgtttctgcctccatgctggtgctgatggcacagacttgcttggtctttgtgtagaagggtctcagattttctgggtggtataaacggtggtggcaggccttggcttcactctgaggctgtgcattgtgaattacaggccctgaaaaccagaatcagcaacctgcccatggtgaagaaatttctacagcctggcagcccaaggaagtctctcatggatgagaaatctttagaagaagcaaggaagattttcagattttaataaagcagccatggaggccaagaacatgcaagaccaatattctaaagttttgcaacaataaactactttacctaagtgttgattgtgcctgttgtgaagctaatgaactctttccaattacatactaattaaataataaatctcctatttgtcgacttggttaaaattaatttcttttccttaggatctgatatgaattcagatttccaatctcctcctaacctaccactttcttggaattaaaagtttagtaaaaaaataatgtagattatgtggtttgtttgacttttccaagaattgccctgcaacattcaatttgtcatacaatctattaaaatgtcagtgtagaaatatacttctgacattttcaggtatgcacaggagaagagttaccattctgggtaatgacataaagacattttcttcttttcttggaccatcattttatttctgataaaagcattcttccttatccatttacaagacaaccattctttctgctgtggattcctcagttttctaggaggtgaggaaatattgaagagcaaacagacccatcctctgctctcaggccaccctgttttcccttacagtgtgtgtgctcctggctcatcctcactctgcctccttaaggctctgtgaggccccaggcatgagccttccctcagttccttcagtgccactcaggcctgggctgccaagatacaaatggtatatgcgaattacatataagtaagtatatgcaaaattatttttccctggtgtgtcattgtgccattgtgcttggattaggagtgatttccaggaatccttccctgcatcttctagcttctgggggctcttggcctttctggactttcatggatcgtgaccacaccactctaatttctgcctctgtcttcctgcacctcaccctctgtgtgttgtgacttctcttctctctgcagtgaggacaattgtcattggattcagggcctttccagatataccaagatgatctcatctcaaattcttttacttcattacatctgcaaagagcctttttccaaataagatcacgttcacaggatctagggatttctatatggacctgtctttctagggggccaacataaccccctatatggtatagatgaagaaagattatttgcaattgatgaatccaggtgatggatgctttcagatttgttatattatgggcaatttgagtgacgcaaagaggaaagcatatgcagatagggttcccggatttgtcagataaaatacaggacacccacctaaatgtgaatttcagataaacagtaaataatatttcagtataatctggtttcataccgtgtttggaacataggtataactaaaaaattattgattgtttgcctgaaattcacatttacatggatgtcttatattttatttggcaacccagtaagaaaagggtgccatcaacttgcccttcacagacatcccttcccagctatgctcacaatagagatttttcagttgccctagtccttgcatccaactcacaaaaaaaagcatctttaaaaagccagtttctgctgacttgaaaagagagcaaaatctaggtgaaatgtattgtttaaactaattgccaaccttgaaaaggaacatattaaccagtgtcttctgataagcagatcacttgcctcatgtcttagaatccagtaggtggccccttggccatgaaatgtgtgggagtgggttttccctaacttgacctttctcctttcagtgggagggaactattgaaaggaacaaagagcttataaatacattaagacctggaattcagttgcccagccacgacagtgacagagtttaacaaactaagtactgatcttataaatccctctacattgcctcacatgctcctctctagcctcccagaaaaatatgctaatatgtgtccttagcacaaggaaaagtctgtttttactcatatcgtgccatcttggtgtgtttgggtgacagttcaagaattgtttatttcttttctgttggatacatctttacagaaatgtaaaaatgaagaatttagaaaaccagggcctcagcatttaatggtatgggaaacaatgacatgaggagaaaaaagaaatggtagcattttaaacaatctgagaataatcagtgctggaagaagtggcaatgtatgcaaaaatttctttctctatataagtagtcaaaacataattgttgtaagttgtgatcctgtaatactatattggctgtgaaaattcaaaactaaggtttattataattagaataaattagtttgaatgtcaggaggactagattctagttgagcctctgccactaattagcttgacgacaagtcatattctgtctctggagtactaccaactcacggccaatctacaggatagctaagaaagaggctctgactgttgatgccctttgaactgtgtaattctttgaatggagatctgtccggcccactctaggaggtttctaagcgtccctgccctttacctatctgatttgtagcgccctctccctccccgcagatgtgacaacccaaaatgtctctagaccttgctcaatgtcctctggagcagaggagcaaaatctccccagttgagaaccatgggactacatgaattcatggggctaagcaaggctatgttaccratgtgccccactgcttggacattcactggaaacttcctgttaatccaggtggactgattagtgaatatcattaacctctgtacagaagctaaaaaggaaagagagagagaaacagagagccaccatatgacagatttgatatgtctggattcatataaaaatttattcctactagagttccatggacaaaatatagagatctagagatatggatagatagataatagatgatgaagagacagacagattacagacaaatgcatagaacgattgatagataaaataatacatacttggatgggtagacagataaggattataaatagatacatatatatagattgttggtaggtaaaataattaatggatagatagatcaaagaaagaagatccatgggctactcaatgtgtccagagactcacccatcttccaagcactgggacaagagcaaacaccsattgctgagttcctactatgaattttttgtacgttatctcatttaactttctcaacaaccctcaaaagtagaaataactacctctactctaagaagagaaaattgaggctcagagactaaacaacctacagcttttatgaaccttgtaatgggaggagtcatggtttatctcattctcccttctctccgataagaaacagtgtcattgggaccacctcagagatgtaattcttttaatttactcctggaattaccatagcttatattcctttcaaattaagcccatttttaattgatgtaaatacagttatactagtcttcgactcactctggattttaggttgtcaaagtagagaaagacacactttcattactttttccttccaagcaagcccctgaaaagttgctaagagtaagaactcatgaattagatgttcccctctcaccctctccttccaacatttagttggctaatatactatgaatagaaaaatataaaacaacataatcagacaggagcagagagccagattatgaggtggagtggaaaagctctggtcctgcaatcagaaggagttcaggctgacccaacactcaccaagtgtgcagcatgagataggtgctttagctttctgaaactcaatgtacccattgaatggctattaggagccatttcccagggttgttgcagaaggtagacacactccctagatattgaccatgaatgaggagcatgtgtgtgtgacccatggcaaatccttgagctctcaggttctyattttgtgttgactgaacaaagctcaacggtaacctctgccccagtcttagcctgacccttggaaacctcatattgagaggcgatatgttagttatcagcaggagtgttgtgataaaatattatataagataaaaattcatttccttttgaaacatgattctcaatcaatggctaagggagcttagtgtggggattggaatcatgacactgtgaactctagtccataacaattaaacaaccrcgccccacacttttgtgtgaacttcactctccctttctttctgctgaataatgctatttgcatttcccaagttaggaaagtacaacatcaaaatatctaatcacagaacaggtaagttgattcagtatgatttcaaagaattctttactttccaaaggctaaactattgactcccacattttaaaatgtagacatttaaaagattttgatgtctatttatgcagccaacaaacatataaaaaaagctcatcatcactggtcattagagaaatgcaaatcaaaatcacaatgagataccatctcatgccagttagaawggckatcattaaaaagtcagaaacaacagatgctggagaggatgtggagaaatagcaacacttttacactgttggtgggagtgtaaattagtwcaaccattgtggaagacagtgtggcaattcctcaaggatctagaactagaaatactatttgacccagcaatcccattactgggtatatacccaaaggattataaatcattctaccacaaagacacatgcacatgtatgtttactgcggccctgttcacaatagcaaagacttggaaccaacccaaatgcccatcaatgatagactggataaagaaaatgtgccacatatacaccatggaatactatgcwgccataaaaaaggatgagttcatgtcctttgcagggacatggatgatgctggaaaccatcattctcagtaagctatcacaagaacagaaaacaaaacaccacatgttctcactcataagtgggagttgaccaaggagaacacatggtcacagggagggtaacatcacacaccgggacctatagtggggtgggggcctagggaagggatagcattaggagaaatacctaatatagatgacgggttgaaaggtgcagcaaaccagcatggcatgtgcatacctatgtaacaaacctgcatgttttgcacatgtaccccagaatttaaagtataaaaaaaagattttgatgtctaaatttaagtcatacatacttttgtagaagtacattagttgacggcgggtgcagtggctcacgcctgtaattccagcactttggaaggctgaggcaagtggatctcctgaggtcaggtgtttgagaccagcctggccaacatgctgaagccctgtctctacaaaaaatacaaaattagccaggtgtggtggcatgtgctggtaatccaagctacttgggaggctgaggcaggagaatcacttgaaactgggaggctaaagttgcatgagctgagattgtaccatagcactctagcctgggaaaaaaacagtaaaactccatctcaaaaaaaaaaaaaaaaaagaaatacattagttgttaaaggcaagtatatttttcttctaaactcaacaaccacaaaactttgcaagaagaatcttaatgtttaatmacagagctgggggtttggagagaawatgcaactgttcctaagtcctggcactggaactcctgctttcaatgagtcctgtgcccttccattcacattcatgatacaattagttgcatctgtccttgcagccattggttttcattctctgatactctgctatgttccacctcccaaacagcctgggatagagcaagggctatcaaacttcactgatgagcccagtcaatttctctctaaccatttacaacaagcaggtgagcgtgcacacatgcaaacatccatacacacaatatacaaataactgaaactaacaactcatgaaacattacttacccttcaacatgtcatgctcactgatatttttattcttttctattttattttaaaaagtactggggtttcacaatctactgaaagattaccatgcatatttgagaaacattaacatagaaaataagactcagtctttagtttttaatagcagtgagtctgcatcccagatccaccacttaatctgggtaagttactttaaaaacctcagtatcctcaactgtaaaatgagaatagcaacagcctttcaccttaggtgatttttgtaggacaaaatgagagaagtttagaagaatggccagtgtatgactgacgttgaacaaatgctagctccttccatatcctgcaaagttaatgcagcaacatctcttttgccaggttataaaacaaaatgccccccacagagttaaaatatagaacaccaaaagaagcaaggtattagcattctctgttgaaagactttggatcttctagctacagtaaaacaagtctgaagcctaatttctggttttgatcaaatgcagtctcacagccagagagctgaagagtgacttagctccctgccggtcctccctgtcagtgacatcctctggtttcacaaccagttcatgggttcccagggccttcacccagatgtcttccaggcgtgacttcattttagtccttggtgtagatattcatgtccatcaccaaccagagtgtgactgtgaacattgtatttctctgatgttcgatttcattaactaaaaattggagaaaacaaccatttaatgagactataaggagggttaaagatataaaatattgaaagggactagcattgaggaaggatcatgaggaagttttcaataaatattagttcttgaattcttccccttccattaactcctgtacatgtattattaccacatactctcacctcttaggctgccaagaaaagtcacaggtaaacaatgaagacttgagactggtttgagggtggccactgctgggtaacaatttgagccaagaaaacattccaggaactccttcaacccagtcatgaagaaggcaggttcttcttcagcattgtttgtggttttcaaccacacatcctaaagtacatttttgattctatcgtttcaattattcattcattcattcaggcttagagaaacctccaggagactgctatcatggcagagaagcccaagctccactactccaatgcacggggcagtatggagtccattcggtggctcctggctgcagctggagtagaggtaggttctgagtaaggtcatcttaagttggatttaaaattgygttatcacatacttttcccacagaaactatgcaatgattacttactgaagcattgtgccttaaataaaaatggactgtaattaagaaaaagatgaatagatttgacctaaaaattgttaaaatttcttcttatctaagagcatacatattaaaatacaattaagaaactaatcaaaaagtgtagaacttaagtggattagaatttaaacaaactgtaaaaaataatttatggcattagaaacatggatattgactgaatatttgatgacatgaaataattattgttaatatttcatgtgtgataatgtactatggttatctttagaacagtttatgtgttttaggaaaacacattgaagtatttaaggattaatcatatggatctgggatttctttggaattattacaaaaggagaagtaggtgggcataaatataacttcacattggttttggttgataattattgattctaggtgagaaatataaggagaatttttatgcttttctgtttatttttattcatgttcataatttccacaacaaaaaaatgaaaatacgtaatatttaaaaatggctgtagttagaggtaaaatgcaaactataaatgagaggtgtaagggagtggattgtaacaaactacctattaaagattgactacattcacagcaattatttgttgagcacttgttaatyccaggttctgtactaggtcatggagatagacagtgaacaagacagacacagtccctgccctggggcggcctacatgtctatgaggatgcagacaagtaaacacgtggttaaaatgaggcgtggaggcttctagaacacccaagcattccccagtgttaccaggtcatcctcccagtgtttgagtaggaaatgcctggaggtgtctgtgggactccgctgagtgctgccctctagaggtgtcactgagaaaaacacttcccagtccagaccagagtccttcagcgactgcctgagggttttcctgggaagtgagtcatggacaaactcaggagatcttgtccctcgggtggcagcagaaaaggggggtttcaggtgaggtggcgtcctgtgaagggaacttctagcgcgccccttcagcctcacagcgccgtgtggacytgagcctcggaacggtactttgtgcgttgcttcacgaaggcttgggactttagcctcaccctttctcagttctatgaagaaataagcacataagaaatccaaacactatcattctaggttgtttcctttgtacaaatgaataccctgtttcactgtcacgcagacatcagctctgcagctcagggatgtgttcagagcccgggtaggaagagttcagcaggagggagggaggggcaaggctgggaggaacccaggttcccaggtctccatccagcctgactgaaggcgggggcagggctgactgcagaccttgctcaggcttctggggtctcagcgccctaaggctgatgatcacaacccagtcctcacatcccacttgccaaccccaccccaccttgtctaccctccttcctggaccacccaccgttccttaggtttgtcctgaactggatgccttattaattgctggcacacacccccatgacctctagatcctggtcctgtgtgatcatagatccacaacaaattctgttccatggagcaagccagaaacccccaaattcctgatctttcaccataaagarctccattaaagtataattagccactggaaacaccgctactatttattacttgatgtatgtgggtcaggccctgtatcatgcattttgaaacattacaaaattccatttaagaaaatattatattcccattttgcagattaagaatctaaggcttgaagattttaagcaataattcctagatcacacagctattttgaggcagagtcaagattggaaccagatcataacaacattgaaatccagaaaaccttgataacttttgcttagacttttggtttgatagattctgcctatttaagtcaactgcatcattatgtaataactgaatttcatatctgtattaaatacctgcaaccactcatagcttctrgtcagattgagacagccttgttgctggctgctatttccaccaaagtgacttgtctcaggatgaggtggaatttactccaatgtttaagttactggatgtagatcaagaactaagtatagtttcaaaattctaaacataacttatatttaacgagcagttactatacacctgctacttttctaagtgctttgcatgaccttgtaatttaatcttgatatcagcctataccataggtgccgtaagtatacccatttcatagattagcatactcagacacagagagtttcggtaacatgtccaaagtcaagaagacagtacatgaaaatggtgatattgaacccacaaaaccacatcagaaaccagaggttttcatgaaaaataatgttagtgtgggactctaattcctttattaaattgagaattttaccctattgggtcccatgtacttcagaagagaaaattatagttgcaagtgtgaaagctgtgcaacagctgcaacttatttcacccttagcagggttcctgaaaagtggggtgatataaattatagcagaggctccttggtggcagaatatttgatggccattagcccatggcataccccacactggggacacacaaggttgtggtctgatctctcctggagacacgggctttactaagatatgacaacaccataactaggagaactgctcagtgccttctttccagtgatgtcccctctcaaaataygacctaatcatagacattcatcagaacagggtggcagtgaactaaaagattgagcagctatgtgctgtgacccatgcacttttctcaatgaattaggtctaaacttccaaatggccattaccagccccctctgtrtatcctgcgaaactcagaaatcttatattctccaaatcatgcaccagataggggccattcaacatcacaagtctataatagaattaactaagaagaacccatttactgtttctgcttccagttggaagagaaatttctagaatctgcagaagatttggacaagttaagaaatggtaagatcaatctctaagtaactctgatgagrgtttctagtagaaggtacagaggaacgttgagcagccaggaatacctatgtgtgtggggggtgatatttagtcacggtggagagggagaaagtggttaaaatggaagggatgtggctccttgatcaggtctggcaactctctccaagctaaaaggaccagacctctcagagtatttgttagaggaatgatatcccgcccccggggaaagccctttttctgttttcatgcttgggggaccgtcagtgagctgtggttatcagcacaggatcccatagagccctccccatccaagcacacgcaagaacatgcgctagatgaaaggaggaaaaatcgacgtggccattgccttgaggtttttctttcatgggggggcgtgacaaagtaacactgtggcactattgcaggctttgaagagcagaaaaggggacccttatattaaaaacctctcagaacctgccttagatgtcgcaaacaccatgagacttaccctgagaacttcccattttaaatggcacctgttgccagtcctattgtaacttgtcccaacctcttcctaaaacatccatgaagataaatcaacacaaaaaatacaagagtcctgctatgtatctggaggggaaataaaaacaaaaatgaagtaacaggataaaaagtagaaggaagctgcttaagaaaaagaagaactacaggaaacttttaaaaaatgttgtttgggccgggtatggtggctcacrcctgtaatcccagctcttcgagaggctgaggygggtggatcatttgaggtcaggagttcgagaccagtttggccaacatgatgagatcacgtctctactaaaaatacaaaaattagctgggtatgttggcrcatgcctgtaatcccagctactcaggaggctgaggtaggagaattgcttgaacccaggaggcagaggttacagtgagctgagatcgtcccactgcactccagcctgggtgacagagtgagactctgtctcaaaaaacaaaacaaggaaaaaagttgtttcaagtgaaaacttaacaggcaataatttctttttcatttcacaaatttagtcatttccataaccatttttttcatcccaaaagggtgggtttcatagacacttcatactcctttttttttcttctttctaagatgggagtttgctgttccagcaartaccaatggttgagattgacgggatgaagctggtgcagaccagagccattcttaactacattgccagcaaatacaacctttatgggaaagacatgaaggaragagccctgtatggtatattttctgttcttccatccacagagaacacagagtgatttaagtccttctttgagtgggtgggaccatggcagggcatcatgaccagcagcaggctgggtcttgrggatgcacgctgaggtccagtattgcagagtcccatggagatgagggaacagtgaacatggggagggttcaggcaagggtgattctaaaagaggatgcagtccatggatcctgcaacctgactgaggtttccagacactcataaaccctatgaactgaggaggatggggaatcatgattcaggtactcagaacttcagaggctagactccagccaacagcgtagggcaaggcatagaatgtctgagagtctgtagatgaaggcctggggagggaaggctgtaaacaagctgaatctcaggtcccagtaattccaagaatcatgaccaggaacctaaattaccaaccaattatatgggccagaacacttgagcagggctagtagaggctggtgcccaggatgctggggttaccttgacacatggatagaaggctgaaacagccagattgattcaataccaacaaagccaaggggtctcctctctgttgtgatgagactgcataattacaaataaatcctgaatggaactgttggcagctccacaaaaactttaacatagtattaccaatgacccagcagttgctctagtaggcatatccccaaacaatcaaaaatacatccacactaaattttttacagaaatgaacaatgcaaataacaatattcatagtattcaaaaagtggaaacaacccaaatatccatcaatcaataaatggaggagaaaaaatgccttagccatgcaatggaaagatatttggtcatgaaaaggaatgaagtaccaatgcatgctacaagatggttaaacaataaagacatgttacataaaatacacaagacacagaaggccaagtattataggattctttttgtatgaaatgtccagatattcaaatccatagaggtagtaagtagattagtggttgcctggaggtaaaggagtggggcttggagataaatgaagaataccgctaatggtacagatgtccttatcagggtgataagaataattctggaattagactgtgatgatttttacagaattctgtgaatccaccaaaaaccactcaatagtgtaatttaacaggttgcaattacagtacgtgaacatacgtcaataaaggtcttgttttaaaaagtattgtgaaactctagtttgacacaaaagaagaaaagtttgcactggttgtaattgtatagagaatttcaccggggaaggggattcttaggtggggtctcaggaaaggcacacatggctagagttaggcaacagcacatggagagggctgtggaaatgtgtttcatgggtgtaattggaagaactgcwaatatggggcacaggagccctgggagctgtaaaatgatgagagaggacaagaaatatggctgagatggctgtgccagggattcttttaggattacttagagggcaggtctttggccatttgactcacactaagttcatgcacagaacaagccacaattgagatgataaatcctggcacagcatcagtgggtattggcagtgattccaccaatttctctcatgactgtgaccaccgatgctctttttcctgtattargtcatgtgtgtaacaaaattttgagatctatctaccttgataggttgttttargaaataaatgttaatatacctgtaaaaatcagaacataatgactatatacctgtaaaactcagagcataatgactagcgtataaaaggcactaactggaggtgaattactttgccaccatctgaccctctattttcttargtttttataaacctataaaatctaargcaaaaggcatttgatggtttggttgtttttgtctttcargattgatatgtacacagaaggtatagtagatttgactgaaatgatccttcttctgctcatatgtcaaccagaggaaagagatgccaagactgccttggtcaaagagaaaataaaaartcgctacttccctgcctttgaaaaagtaagtgaagctgttcaatgtttaggggaactgagtttagacaccagtagaaaaatagtggctgggcattcctggggccactgaccttcactttcagtgagacttcatgaacaccaaggcagcactctgactctcaaggcmtcttatgcaratagacttggaggaacaattgtaccacttatacccaagctatgattttccagtaaaattttaatttacagaccccaacattaaattctctgttcaacaaaatttcatattcataagtagaacgtgggctgtggaaggctctggatcacactggaggttgctgttgagtctatggaaccccatggactttgatggaagaagaacatgatgaaagtgatccatcagaaaatattctggcatcctgtgtaggaagacaggaaaccaattgcccaaccagagaatattgcagtgtttcagggatcagtattttttaaaaggagagtgactgtgggatgcagaggaagattctttaaaatgcattttatagtaagttgcagacatcagtgcagtccacccctaaacacttcagcttgcaaattataacagagtgccggttaggaaccagagtygatgctgtaagaaacatgatgaattcaggttcacccaggtttacttcagaacccagggagatagagcagggaatgaggagggcagacaaggacaaatgaggactctgaaatagtctccttctaggggaagagtgttgtcatgaaggtggagtcactgcccaagggagattggagagggagggagcagaatgtagagccatgtcctgaatgtgagggctccacgctgtagggcctggggcagacagaacatgcggcggcaggtgctaagtccttggcgcatgtggaagaagcaagctgggtgggtcgtgtagacaccacagtgatgtggatgagaagagaaaatggtagcctggcctccaaccaagcagtgagcagagttatagttcttactctctcattcattcagataatgtggagaaagcttgggatttctgcacccatgcaataagrcaacagaggtgggaaaagtcagggtggagaggctctgaaagaagcaggggtcccakcctgggtgkgcatgtgttcctgatctgattcctccaattctccaggtcttaaagagccacagacaagactaccttgttggcaacaagctgagctgggctgacattcacctggtggaacttttctactacgtggaagagcttgactcgagtcttatctccagcttccctctgctgaaggtgacccatttcacagcccagagagacagccccacatctcttatattgggatctcatatctgggccccgggactgaccatrttttgaccccacccttctccagcccttcagtgcccccaaggtctccaaaatgagcttccaggctccaattttgaagaatgaaaacacttttgttctggaaaggaaatttgtggtgcatgctaacccatgaagagtattttgccttttatcatggaaaggacccagtgcccagcagctcttcccatccctctatttcaatgtggtttstgttcctgagttctctgtgatgtcctttatcccacatgtgcccttgtcttcccgcattgaattggtctgagcagagccctttccatctggtttcctccctgggctctggctccttttgtcagacattgtggtcctctctgcacagctctcccagcactctgcccctgacactgtatctgtcactgagaaaaggtggtcccatggtttgtgtttaatgttttctataacattttcctttccaactcatttccccatagttttacttctgcttagagactgatctgtgttgatatctcacaggcatattgatttttcttgtcttatacaagagccacaaatctacaggattaatatgtaaggagaaagatagggatgactgaactgattaaaacttcaagacatctttggggaaaataaagtgagctacatgttattcctcttatcttcatttctcactgggtgtctgtttctgcctccatgctggtactcatggaggggactcgcttggtctttggcatgaggggctcacattccctgggtcatcttaatgatggtggcyggccttggcttcactctgmggctgtgctttgtggattacaggccctgaaaaccagaatcagcaacctgcccacggtgaagaagtttctgcagcctggcagccagagaaagcctcccatggatgagaaatctttagaagaagcaaggaagattttcaggttttaataaagcagctatggaggccaagaacatgccagaccaatattctacagtttgcaacaatgaagtgctttacytaagtgtggattgtgcctcttgtaaagctaataaactctttccaattacatgctaattaaataataaataactcttatctgtcaacttagctaaaattgatttgttttcattagtatctgatatgaattcagatttctaatctcctcctaacctaccactttcttggaattaaaaatttggtaaaaaagaagaaactatagattatgtggtttgtttgacttttccaagaattgtcctgtaacatttgtcatacaatctattaaaatgtcaatgtagaaatgcactctgacattctcaggtatgcacaggagaagagttaccatcctgggtaatggcataaagacattttcttcttttcctggacagtcattttatttctgataaaagcgttcttccttatccatttacaaaacaacgattctgtgtgctgtggattcctcagttttctaggaggtgaggaaatattgaagagcaaacagacccaccctctgctctcaggccaccctgttgtcccttacagtgcgtgtgctcctggctcatcctcactctgctccttaaggctctgtgggggccaccgtcatgaacattccctcagttccctcagtgccactcaggcctgggctgccaagatacagatggtatatgtgaattacgtataaataactactatatgcaaaatcatttttccgtggtgtgtcattgtgccagagtgcttagatgaggagtgctttctagctccacccacatactgggcctataatgttaatctcccctaggacacctgggcttctgcaatttcagctctcctgttagaatgagcttccccacaactggcagaggtggttgagggagcagacagacacaggcttcctacctgcagcttcactttgctctagtctcttctccacttacacccagcgtagcttttctaaaatacaaattggaaaaaaaaatcacagaattctgcagtgagtcctgactgcatatataaggtatcctcacacccgtccacactccttgatctccagcccaatccaccctctgagcatggtggggcctcttgccttcctgcctaggtgcatttgctagccctgcctggcaagctccttcccmgtggacacacttaacactacctcattgcttcccaggaacgccgggctgtcctctgccctccaccgggccccagtgagcctctaataacacctgagggccactgtgtctgctcccctgtactgtgagctggtggtgtggggcttggcctgctgggtccccagtgcttcatcacyaatggacaatgacatctgcacagacccatacacagctctatgcacctccagaacctgggtatatgagactgggctttgagaactcacaaacctccacacactctacctgactgtctctattctttcattaatttctaaaaaactggactcatatccctcaaatgctttgtaaggaccttgcttggatgytgaccaaaataaacaaagtgctaagaaatttttatgggacacatgaactagaatgctgaaactttgatgaaattaagaaattatagaattttaatttgataaaagattatcataataaacataatcatagtgcgcttgtgtttagaaaggaaattcttccttgctagagaagaatactagtatttacagatgaaatgatatgctatctgggatttgcttgaaaagaatcccctggtagtggagggagtacatgggagtttgcatcattttcttgtggctcttctcgcagattcctacaagctacaaactgggtggcttgaaacaacagaaatgcattttcttacaattctgaagtccagaagtctgaagtcagggtgagagtagggccrcattgccttgaaagttctagggaacaatccttccctgcctcctataacttcygggggctcttggcatttctggactttcatggatcgtggccacatcactctactttctgcctagggcttccagcacctcaccctctgcgtgtctgtgtcttctgttctctatgttgcaggtgagaggtgacaacgtgctagcagccctcgcttgctctcagtgcctcttyggcctcggcgtccactctggccacccttgaggagctcttcagcctaccgctgtactgtaggagcccctccctgggctggccaaggccggagccggctccctctgcttgaggggaggtgtggagggggaggcgcaggtggaaaccagggctgcacataacgctcacaggccaacccgagttctgrgtgggggcaggctcggcaggccccacactcagagtgggccgcctggccctgggcagtgaggggcacagcaccttggccagcagctgcagagggtgcgccaggtcccccaacagtgccggcccgcccgtgccgcgctcgatttctggccgggcctcagccacctccctgcagggcagggctcgggacgtgcagcccgccatttctgaacccccctcccctggccccctgcccccacgggctcccacccaccggagcctccctgatgggcaccrccccctgctccgtggctcccagtcacatcgactgcccaagggctgaggagtgcgggcatggggcgcgggactggcgggcagctctgcccatggccccagcgcaggattcactaggggaagccagctgggctcctgagtcgtgtggggacttggagaacttttatgtctagctaggggacttggagaacttctatgtctagctggaggattgtatatgcaccaatcagcactgtctagctcaaggtttgtggatgcacccatcagcactctgtatttagctaatctggtggggacttggagaagttttatgtctagctaaaggattgtaaatgcaccaatcagcattctgtytctagctcaaggtttgtaaacgcaccaatcagcactctgtcaaaacggaccaatcagctctctgtaaaatggaccaatcagcaggatgtgggtggggtcagasaagggaataaaagcaggctgcccagccgggaactgcaagccagctggggtttctttccatggtttgaaagcttcgtttttttagctgcttgcagtaaatgttgctgattattctttgggtctgcactgccttcatgagctgtaacactcactatgaagatctgcagcttcattcctgaagctagtgagaccttgaacccaccgagaggaacaaacaactccagacatgctgtcttgtgacactcaacgaggaggtatgcagcttcactcctgaagccagtgagaccacgaacccaccagaaggaagaaactctggacacatctgaacatctgaaggagtaaatcccagacacaccatctttaagagctgtaacactctcccacgatggtctgcggcttcattattgaagtcagcgacaccatgaacccaccaattccggacacacagggatacttgtcattggacgtagggcatatctggatatattgggattatctcatctcaagttccttaacttcatctgcaaagaacctttttccaaataaggtcgcatttaaaggactcaaggatttggacatgaacataccttgcttgggagccaacataacttaatccactaccttgtatagatgaagaaatattgctggcaattgatgaatccaggtcatgggtaccttcaggcttgttatattactttctctactttagtatttgctagaatttttccatgtaaattttaaaactatcttattctaggagttcttacaatgtccaggttttgtcccagacaataaggactggactcaaataagaaggcggctctgctctcaggagctcaaggtctagggagaaatgtgatatwgaatacttcatgtcaaattaacgtagggaaagacgcaatagagaaaatacagtaggagctgaaagtagaatattccagtcaggacaaataccatgtgcaaaggcccagaggccaggaagggtgatttgagcaatgcagagaggaaacactataaaaacagggtggccagatttggtggataagatacaggacacccaaataaatgtaaatttttagataggtaatcaatactgtattagtataaacatgtttcctacagtgtttgggacatacttacactaacaaatgactgatcctttgcctggaattcatatttaccttggtgccctgtattttgtgtggcaacccagtaagagaagmcttccagagtgccatcagcctgcccttcacagacatcccctgccagctatgctcccagcagagatttctcatctgccttagtccttacatccaagtcattaaaaatgagcgtcttcaaaaagccagtttctactgacttgctgtaaagagagcaaaatctgttgaaatttttggttagacttttattgccaaccttgaaaaggaacatattaaccagttaccttgtgataagatgatgacttgccatttttcttaggatctagtaggcagtcctgtggccctgaaacatgtgggagtggctgtttttaacttgactctattcctttcaatgggagggagttattgaaatgaacatgtagtttataaaccacattaggaccttaagttgtggagccccaagggtgacagcctttaacaaagtaaataccaatgttagaaatctccctgtattacctcatgacctcccatctaggtcactagaaaaatactttaaaatatgtccttggcacaagaaaaatctgttttatactcatattaatgccttctctgtgtgcttggatgacagtttaaaagttctgcattcacctgcttttggatacattgtttcaacttaaataataaacagagaccctttcaaataaaagatatttatttgagaattaagtgttgtaatgggtatatgtttgtcatagtaaattatgtatgtattcagggaagttaaggaagacaaaggtttttataggaaaaaataaggattaaataaacgttttgaaatacttatctttcactacaaatattaataacaagggtaatgccaggccaagtttaaacaggcagttgatgggcaaatgccctaacagaagtattctaagattgcaatggcctttgttcaaggttgtttttcctagtttgttttgttatcaaagagtaagaacattctcttttttttttttttttttttttttttgagacagagtcttgctctgtcgcccaractggaagtcactggtgccacctctgctcactgcaagcgccacctcccaggttcatgccattctcctgcctcagcctcccaagtagctgggactacaggcgcctgccaccacatccggctaattttttgtatttttagtagagatggggtttcatcatgttagcctggatggtctcaatctcctgacctcatgatccacctgcctcagcctcccaaagtgctgggattataggcgtgagccaccgcgtgctgccagaacattttctttatggcatttttcagctgtgtttgtcagagttttgctaacattgtgactccttttgactttgacaattctcacaatcattaaagaaatggaaaaatgaagaatttagaaaactagacaacgagaatttaatgatagtagaaaaattaatgtcatgaggggaaataatagtcatgatgtcattttacttaatctaagaatatgatcattgccagaggaaaggtaggtgtttatgctaaagttacgttctctagacaagtaatcaacacacaattattgcgaatttacgtttggcaagatcacagacttgggaattcccaatgactggtaaaagggacatacaactggacagttccatgtctgcagttgcttctccaaacctccatctcctgctgagcaaagagataccaacacctgccaaacacaattctgatttacaacttgatggtagatatcacacattaatgcttccttcaggaagtgctttctgatttgttgtcaagtgttgatgccattggcttttcaatatttctttaaggttgttatgctccaaagctaggcagaatgttttgagagcaatttcctagaacttacaggtgaatctaagtctttagaacgtttagttctttttttttttttttttttttttttagtatttattgatcattcttgggtgtttctcggagagggggatgtgacagggtcataggataatagtggagagaaggtcagcagataaacaggagaacaaaggtctctggttttcctaggcagaggtccctgtggccttccgcagtgtttgtgtccctgggtacttgagattagggagtggtgatgactcttaatgagcatgctgccttcaagcatctgtttaacaaagcacatcttgcaccgcccttaatccatttaaccctgagttgacacagaacatgtttcagagagcacggggttgggggtaaggttatagattaacagcatcccaaggcagaagaatttttcttagtacagaacaaaatggagtctcctatgtctacttctttctacacagacacagtaacaatctgatctctctttcttttccccacatttcccccttttctttttgacaaaaccaccatcgtcatcatggcctgttctcgatggtctctgtctctttggagatgttgggtacacctcccagacgaggcagctgggcaaaggcactcctcacatcccagacgatgggcggccgggcagaggcgctcctcacctcccagatggggtggccgggcagaggcactcctcacttcccagatggggcagccgrgcagaggagctccccacttcccagacgggatggccgggcagaggcgctccccacttcccagatggggcggctgggcagagatgctcgtcacttcccagatggggcagctgccaggcagaggcacttctcacttctcagatggggcagccgggcagaggcgctcctcagttcccagacggggtggctgggcagaggtgctcctcacatcccagatggggcagcttggcagaggcgctccccacttcccagatggggtggcggccgggcagaggcactcctcacttcccagatgggacggccaggtagaggcactcctcacttcccagacagggcagccgggcagaggcactcctcacttcccagacgatgggcggccgggcagaggcgctcctcacttcccagatgatgggcggccgggcagaggcgctcctcatctcccagacggggtggcagccgggcagaggcactcctcacttcttcccagacggggtggccaggcataggcgctcctcacatcccagacgatgagtggccaggcagagacactcctcacttcctggacgaggtggcagccaggcagaggctgtaatcttagcacttttggaggccaaggcaggcagctgggaggtggaggttgtagcgagccgagatcacgccactgcactccagcctgggcaacattgagcattgagtgagcgagactctgtctgcaatcccagcaccttgggaggccgaggtgggcagatcactcaaggtcaagagctggagaccagcccagtcaacacggaaaaaccccgtctccaccaaaaatacaaaaaccagtcaggcgtggcggtgcgcgcctgcaatcccaggcactcggcagaccaaggcaggagaatcacaggaccccaaggcagggaggttgcagcaagctgagatcacggcagtattggcaacagagggagaccaaagagagggagagggagagggagaggaactattagttctataaagcaagatgacctagattagtgactaacaaaatcaaaaacaataatggcccttattgtgaattttcagtttcctgattcaacaaatatctgttaatccttgtcctttgcccagttgaacacttgcctgataaccttgctttttccaaattcctccttccttagtccttctgggtctactcagtgagccacacccatatctttatttattctgtgaaattgtagaaaattgagtctgataatcaggattggctgatccattatctkgaatctattatttaatttttstatttaattttttctatatcatttgattttctcaagtaagttcaaaagatgaaattatagaaatctctgtgactgctaaaatgtctagcattgctgtgtgatctatccaagtatcagtgatattgtaatactaccatgtgcaatacactgtgttaaacatactgtgagacctctctgctctttcggaacctcacaatttagtagggacacaatgtgtatataagtaactgtaatactttatagctgtgaaaattcaaaattaaggttgatttataataggaataaattagtttctgaatgtcaggaaaactagaatctgattcaktctttcccactaattagctagatgacaagtyacattctctagggttcaaccaactcacagcaaaccttgaaaatggctaaggaaaagtctctcatcttacccttggcacycsttgggatgggtaattctttgggtkcaggggctgtcctgttcatgataggatgttccaaggcatcaccggcctccacctacctatgttgaagcactacccaccaccttctgccttgatgtgacaaccaagaatgactccagatattctgaatgtcctctgggktatgggagcaaaatattttstggtttggaatctgcagactacatgacttctcaagtattaaaattcagaagctgatagaataactaaataattactgcagcatataactagctttgttttgctttgatttagagacagggtctttctccatggcccaggctggagggcagtggcacaatcatggctcactgcaatcaccacctcctgggctcaatcaatcctcccagctcagtctactgagtagctgggaccacaggtgcacgctattgcacctgatgtaatttgttttttttttgtagagacatggtctgctatgttgctcatgctgcacttaagctcctggctcaagtagtcctcccaccgctgtctcccaaagtgctgggattacaggtgtgagtgaccatacccagcccttataactagtttttaaaatgcacctaaaggaacccagttaatatatatggtgccattagaatataagtcaacaatgtcctggaataaatgtttaatagtggggaaaaatgtaaaggaaagattaggagcttcagtgatgtcctccttttggatccagatgtaagacctgtccaggctataaaataattcacaggaaaaaaatatgacacctgatatagtttggctctgtgtccccacccaaatctcatgctgaattgtcatccccagtgttggaggtggggcctggtgggaggtgattggaccatggggtgttttctaatggtttctcatcatcaccctagtgctgtcttctcatagagttttcatgagatatagttgtttgagagtgtgtagcaccttcctgttcactctctttctcccctgccagccatgtaaataygtgcttgcttccccttcgccttccaccataaatataagtttcctaaggcctccacagaagcagacgcctgtacagcctgcagaactgtgagctgattaaacctcttttctttatcaattacccagtttcaggtatgtctttatagcagtgtgaaaatggactactacaagaaactggtaccagaaaagtgggacattcctatgaagatacctgaaaatgtggaaacagctttaaaattgggtaaggagcagaggctggaacagtttggagggctcagaagaaggcaggaaaatgagggtaagtttggaacttcctagaaactagttgaatggttgttatcaaaatgctgatagtgatttggacagtgaagtccagcggaggtctcagatggagatgagaaactttttgggaatgggagtgaaagtcactcttgctatgccttagcaaagagactggtggcattgtgcctctgttctagagatctgtgagacttttaacttragaaatgatttagggtatctggtagaagaaatttctaagctgcaaagcattcaagatttagcctggctgtttctaacagcacatgttcatatgtgttcacaaagacatgatctgaaatctgtcattgaatctgaatgaatcaatctgcaattgaaacttatatttaaaagggaagcagagcataaaagtttggaaaatttgcagtctcatcatgtgatagaaaagaaaatcccactttcaggggatgaaatcaagccagtggcagaaatttgcaaaagtcttagttattaacatactgttccttttgcaaaagtttggaaatttgcaaaagtagctaaatgttaacagcwaagacaatggggaaaatgtctccagggcatgtccagggctttgtgacagcccctcccatcacaggcctagaggcctaggagagaaaactggttttgtgagccaaacccagggccctgctgctctgtgcagcctcgagacatggcatcctgtgtcccagctgcttcacctccaaccatggctataaagggccccagatacatctgaggccactgstccagaaggtgcaagctgtaagaagccttggcagcttccatgtgtgttaaccctgcatgtgcacagagagcaggagttgaggcttgggagcctttgcctagatttcataagatttaatgaaacacctggatggccaggcagatgcctgctgcaggagtggagccctcatgtagaacttctactagggcagtggggaagggaaaagttggagcccccacacagagtctccaytggggcactgcctagtggagctatgagaagagggccattgtaccccagacccccgaatgatacatccaccaacagctcgcaaaatgcatctggaaaagctgcaggtgctcaacaccagccagtcaaagcagcctaaggaatgtactgtctagagccacaggtgcagagctgcccaagaccttgggagcccacccttgcatcagtatggcctggatgtgagacaaagagtcaaagaagtcaaagaagactattgtgaagctttaagaggtaatgacttccctgctgggttttggacttgcatgaggccggcagctcttttgttttgactgacttctcccttttgaaatgagaccatttacccaatgcctgtactcctattatatcttggaagtractaacttgttcttgattttacaggcttgtaggcagaagggacttgcctagtctcagaagacactctggacttgggcttttgagttaatactggaatgagttaagtctttggaggactattgggaaggcatgattgtgttttgaaatgttaggggccagggggtggaatgatattgtgtaactctatgtccctacccaaatctcatgttgaattatgatcaccagtgttggaggtggggcctggtgggaggtgattgtatcatgagggtggttttcagtgttttagcaccattctcctactgctgtcctgtgatagcattctcatgagatctggttgtttgaaagcatgtagcacccaccccctcattctctctctcctgccagccatgtgaagatgtgcttttttccccttcaccttccgccatgattgtcattttcctgaagcctccccagaagcagaagcctgtacagcctgcagaactatgagtggactaaacctcttttctttatcaattacgagtctcaggtaggtccctatagcagtgtgaaaatggactaatacaacacccatgtgagaagatactgaaatgacaagaaatgcatgttgcaaggcaatgtttgcacaagaatgaggattgatactaatttgaagggtaggaaggcagacatttgggaggtacaaaatctactgaacctgcagattgagatgctaccctggaaagaaggagcccacctgggcagaagggcaagagtcctcagttttctcagcctggcagccttctcccctttctctgatttccttggttaacagaatcatgattcccgggttgaaatttctaggaatcctttaaagtgaaatcactgctgagcacattctgttctgtcagttggccagaagcctgttattctgactagatctaaaccactttagggcagagaccaaatccaaccaaatatttttctgctacaagccatcactattgcttgagacaccgaaacagctcaatcaatgttagtcagtttgaatgaaactttttaaaagaaggaaatatgctgaaaacaagaaatagaagaaaggttagcaaaatgtctgcattttcaggtaaggaacaggatgctgtagaggagcaaccattttcatcaagtattgagagtgagaccctgcccaagagctatgaatagctggagagagaagcagtgaggctcactctcactccactggagtttatgcaaagtgggcctgggaacgggacaggttcacagtgctcagagcagggagtgggtggtagctaggcctggcctgaggagagaggcccaccaggtgcagggtatgggagcctttttccggattataaaacgtctgtttttccaggttataaaacaacctgggaaccaggtctgctgcagtctaggagttaagtaagtctgtgttaacgatgggtcaggcctccctgaaacttcactgaaaactttgttaacccaggttgactgtatcagtgactatcattaatctctgtataggagctttaaaaaaagagactcattatatgacttattcgaaaagaaatctagatatatataaaatcttatttttaccagagcttgatgggttaagagagaaagagagaggagactcatgtgctacccagtgtgttccgagagactcatccacatcccaagaagtgggggcaggaggtcactctcattattcagttcctattataaattttatatacaatatttcaytgaactttctcaacagccctcaaagatagatataactatccctattttgaaaggagaaacttgagctcagaatttgaagagcctactgagtttatgaacctcataatggaaggagttgtgatttatctcagtctcccttctctctgatatgaagcaataattaggaccacccagggaccaagagtaaattaactctaatttactactggaatttcaccacttatattcctttcaaaacaagcccattttctagttgaggaaaatacagttatactagttctcaactcatttaagtttttagggttgccaaagtagagaaagaaacatttttattattattattttctccaatcaagctcctgaaaagttgctaacagaaaggaactcgagattcaggtgtccccctctcgcccttcccttccaatctttagttggttaatggagtctgtatgggaaaatatgaaacaatttctcagatagaagcagagccagcttacagggtggagtagaaaagctatggacctgcaatcagaaggagttcaagctgacccaacactcaccaagtgtgcagcgtgggccagtcgctttagctctctgaacytcagtgtgcccatctttaattaggatattaggarycgtttcccagggttgttgcagaaggtagacacactccctagatattgaccatgaatgaggagaatgtgtgtgtgacccatggcaaatcttcgagcctctctggttctcattttctgttgacccaacaaagctcagtggtaacctttgcctcagtgttggcctggcctttggaaacctcatatagtgaaggtgatatgttacatgtaagcgagagcattattataaaatgttatgtgagataataataattcatttccctttgaaacatgatcctcagtaatggctaagggtgccagtgtgcgatttgaatcactctgtgcactctagcccataacaattaaagaagcacaccccactctctgtgaggttcactctccctttccttctgctgaatcatgctatttccatttccaatgagaggaaagtgcaatgtgtaaagtctctaattacaagacagatgagttgattaagtatgtttcaaataattatttactttctaaaagttagactgttgagttccacattttaaaatgtagacatttaaaagattttaatgtctaaattcaagtcatacgtacttttttagaaatacatctgttggtaaagacaagtatatttttgtacaaatgtatcaacctcgatgaccacaaaactttgcaagaagaatcttaatatgttataacagagttgggggtttggagagaaaatgccactgttcctaagtcttggaactcatgctttcaatgagtcctgtgtgtttccactcacattcatgatccaattatttatggcctgtccctgtacacttggttttcatttgctggttctctgctatgctccacctcccaagcaggctgggatagagcaagggccaacaaacttccttgatgatccctagtgaatttatctctaaccatttgcaatggccaaatgaacgtgcacacatgcaaatatccatacacataacatacatgtaactgaaactaaaaactcatgaaacattacttactctccagcatgtcatgctctctggtatttttttattctttcctattttctttaaaaaatatgtagctttcacaattttctgaaaaattagcatacatatttgagaaacactaacagaaaataaggctcagtcattggttttgaatagcaatgggtttgaatcccagattcaccacttactctggacgagttgctttaaaaatctcagtatcaccagttgtaaaatgagaataataataacattcaacttaggtgatttttgtaagataaaatgaagataaatttggaggaatggccagtgtgtgactgatgctgaatagatactatctcctattcaagcctgcaaagttgatgaggcaacatgtttctccaggttataaaacaaaatgcaccccaaagaggtggaatacagaaaaccaaaagaagcaagaaattagggtcctctgtctgttgaaagaatttggttcttcgagctacagttaagcaagcctgaggcctaatttctgcttttcatcaaattcagcctaacagccaaagaggtggtcctccttgtcagtgacatcctctggtttcacagccacttcatgggttctcagggccttcacctgggtgggttctaggcctaccttcattttcgtcctgggtgtggattttcaagttcatcaccacgtggagtgtgatagcggacattgcatttaacttttctgatgttccatttcactaactaaggaatggagataataacaagcatttcatgggactataaggaggagtcaagatataacatattgaaagagactagcattggggaaggaaggatcagtcgaaagttttcaataaatattagttcttgaattcttcctcttcccactaacttccctacattcattattaccacatactcgcacctcttagcatggcgagaatggtcacatttaaccaatgggcacatgagactggtttgctggaatctgagactggtttgctggaatcatagtttttatgttttagggaaacactttgaagtatctaaggatggaatatacggtatttgggatttccttacattattacaagatgggggaagtgggtgggcatgtatatgaaaacacattggctttagttggtgtaaaccaaatataaaattctaagctccctccctcactctgaccatctgaatggatctctcttttcagcaaggtcattccaaagctaacctgaaaaatgaatttaggccatgatgggaagtggagggggttggacaagcctcattatacctcatctcttttggaattactaacagaacaaacttttttagtctgataagaaacaagtacaatcattttctctgaaacttgctaccaggtggcttcatctgcagggtaaaactttgttctctacaaccccttattatcctaaactagacattcctttctattgattccaggtggttagatagtaacttaaccctttcaaccaactgccaatcagacaaattttaaatctacacacaacctggaaacccacacttccagtatccctcctttccataccaaaccaatgtacatctatatatatttgattgatgtctcatgtctcctgaaaatgtgtaaaattaagctgtaccctcaccacctcgaccacacggtctctgaatctcctgagggctgtatctcaggcactagatactcatatttggctcagaataaatctccaaatattttacagagtttgactcttttcaataacattggtagttactgattctatgagaggaatacaaggaaggtcgtgatacttttgtgttatttttatacatgttagaaatttatgtaataaggggataaaatgtatatcaggaagtgaatgtaaagttaaaatgcataccacacatgagaggtggaaggcagtggattataacaaataacctgttaaagactgagtatattaattcgatgattattttgttgtgcacctactaagtgccaggtgctgtgtgaggttctgatgatagacagtgaacragacagactcagttcctgctctcgagtagcctacatacctataagaatggagacaagtaaacagrtgattaaaaycaggagcttccaggagaacacccaagcagtccccagcgttaccaggtcatccttccagtgtttgagcaggaaatgctgggaggtgtctgtgggactccgttgagtgctgccctctagaggtgtcactgagaaaaacacttccaagtccagaacagagtccctcaggggctgcctgagggttttcctcggggtaactcatggacagactcaggagatcttgtccctcgggtggcagccgaaaaggagggtttcaggtgaggtggcatcctgtgaaaggaagttctagcgcgccccttcagcctcacagcgccgtgtgggcctgaaccttgggaaggcactttcttcattgcttcacgagggcctgggactttagcctcaccctttctcaatcctatgaagaaataagcacacaagaaatccaaacactgccattccaggttgttttctttgtaygaatgaataccctgtcacccagacatcagctctacagctcagggatgtgttcagagcccgggtaggaagagttcagcaggagggagggaggggcaaggctgggaggaacccagactccctggcctccaaccagcttgactgaaggcgggggcagggctgactgcagaccttgctcaggcttctggggtctcagtgccctaaggctgatgatcacaacccagtcctcagcctcacaagcacatcccacttgccaatcccaccccacctcggtcaccctcctgccaggaccacccaccgttccttaggtttgtcctgaattggacgctttattaattgctggcacacaccccccatgatctccacatcctggtcctgtgcgatcatagatccacaacaaactgttccatggagcaagctagaaacccccaaattcctgaactttcaccrtaaagaactccattaaactataagtaaccactgcaaacacaactaccatttattacttgatgttgatgcacgcgggtcaggccctgtatcatgcattttgaaaacattacaatattctgtttaagaaaatattctatccccattttgcagatgaggaaactaaggcttgaagatgttaagtgatgattcccagatcacacagctattttgaggcagagtcaagattggtaccagatcatatcaacagtgaaatacaggaaatcttggtaagtgtctactttgacttttatttttatagattctgcctattaagtcaactgcattgttatgcaataactggttttcatagttgtattaaatacctgcatccactcagagcttctgatcagattgagacagccttattgctggctgccattccaaccaaagtgactacactcaggacaaggtgtgatttatttcaaagtttaaatcactgatatagatcagcaatagagtatattttcatcaatattagattgatttaatttttttaaggatgatatgaaatagcagccatacttcagaatcctaatagtgtatgtttaatgagcacttacacacttgctacttttctgagtgctttgcatgactttgaaatttaatcttcataccaacctataacataggtaccataagtattcccatttcatagattaggatactgagacacagagagatttaacaatgtgtccaaagtcaagaagccaggacatgacaacagtgatattaaacccacacagccatgtcacaagccagagattttcattaaaaataatgttactgtggggactttaattccttcctgaaattgagaattctattctattgtgtcccatattctccaggagggaaaattataattgcaagagttataactgtgcaacagctatgacctatttcaactttagcagggctcctacaaactaagctgatgtaaattatagcagagggcccttggtggcagaatctttggtggccactggcctatggcatacccatgctggggtcacaaaggttgtggtctgatctcactcagagacatatgctttcctaagatatgacaacatcataattagaagaactgcatgatcctttaactgcagtgacatcccctctcaaatcatgacctaatcatggacatgggagccatcaaggtggaagtaaagtgaactagaagattgagcaactatgtgctgtgatccatgcccttttctcgatgatctagtgtaaatttcaaaatggccaccaccagcctcctctgtgtgctctgccaagctcagaaatcttatattttccaaattatgtaccagacagaagccattcaaggttaaaggtctacagtgctatggaatgaattaataagagcccatttactgtttctgcttccagtttgaagagaaatttctggaatctgcaaaagatttggaaaagttaagaaatagtaagatcaagtctctaagtgcctctgaggagggtatctagtagaaggtacacagggaggtttgaacagccagcaatgcttacatgtgtgtagggttgtagttggtgatggtggagagggagaaaatcataaaatggaaaggatgggctcctagagcaggtctggcaactctttccaggctaaaaagggccagacttctctttgtatttgctggagaaccatctccagcactctgaggatcccttttcttgctttcctgcttttggcaccatgagtgagctgtggtcatcaactcaggatctcatatagmccaccccatccaaagacacgcaaggacatgttttagacaaaaggagttgaaataggtccattttgaattgtttctmttataagtttgacaaggtgatatctttgcaatattgtctgcttagataatgagacagtgttgacttggttggaagtccaggtcacagggtgaggagggacatgagccagggtagaagccatggggtaagaaacacagagcctgccctgcacacactgtctaatgggggtattgaagggcacacaaaragcctacatagaagcttctctcagaactgtgtttaatgtcttyaacagcatgagacttactttgagaaattcccatgttaaatggcatctggctggtgacctgttgcagtctctcccaacttcttcctaagatatcatgaaaataaatcaacacagacaatacaagcgacctattctgtagctggatgggaaataaaaacataaatgaagtaacagtataaaaagtaaaagaacgcttgataagaaaaagcacttccagaagctaaaaataagttcctatttcatttgaacagttgccaggcaatttttttttcattttatacatttagtcatttccacaaccactttttcatcctgaaagggtgggattcatagaaatttcactctgccttttttttttttttctattttctaaagatgggagtttgttcttccagcaagtgccaatggttgagattgacgggatgaagctgatgcagaccagagccattctcaactacattgccagcaaatacaacctgtgtgggaaagacataaaggagagagccccatatagtatattttttgttcttccatcaacagagaacacagagtgatttcggtccttctgtgagtgggcaggaccgtggaaggagcatcacgactagcagcaggctgggccttgggcatatacgctggtgtccagtattgcagagtcccatggagatgagaaaagagtgaatatggggagggttcaggcaagtgtgattctagaagacaatgcagcctatggatccagcaccctgacaaaggtttccaaacgctgatgaaccatgaactcaggaggatggggaatcatgattccaggtgctcgggacttcagaggctggactccagccaacagcttaggacaaggcatagaatgtttgagagtcggtagatgaaggcctggggagagaatgctgcaaaggagctgaatctcaggttccagtaattccaagaatggtgaccaggaacctaagtttccagccagttgtatgaactggtccacttgactaaggtttgagaggctggtgcccaagataccaggattacctaaagtgcagcatttgatacagacctaagcagccagactgattttgcatcagcaaagctgggaggaggggtctcctcctttgctggcagttccttgagaagtccaatatagagttaccaatgacctagcaattccactaccaggtctacatccaggagaaaggaaaacacatcctcactaatccatgcacagaaatgttcataggagaattattcatgctatgcaaaaggtggaaacaacccaaatgtccacccatggatgaatggaggaacaagwtgtgctgtagcagacaatggaatattcttgggctatgaaaagggatgaagtactgatgcatgctacaacatgggtgagccttgaaaacatgttccataaaagaaaccagacaccaaaggccacatgtaacatgaattcttttgtatgaaccatccagaccatttgagtccagaaaggaaatcagttgttgacaggggctggagaaaggggacaatggggaatggctgccaaagcatgtgctactgctttcccaggtgataaaaatgttctggaattagacagtgacagtatttgcagaattctgtaaatgtactaaaaattactgaataatattctgttaaggggtggcaattatagtatgtgaatacatgtcaataaagctgttatttaaaagtattcgccaggtatggtggctcacgcctgtaatcccagcactttgggaggccgaggcaggcagatcacctgaggtcgggagttcaagatcagcctggccaacatggcaaaaccccatctctactcaaaatacaaaaatcagccaggcgtagtggcaggtgtctgtaatcccagttactcgggaggctgaggcaggagaatcgtttgaatacaggaggcggaggttgcagtgagccaggattgtaccactgcactccagcctgggtgacagagcaagactctgtctcaaagaaaaataaaatacagggccaggcacagtggctcatgcctgtaatcccagcactttgggaggccgaggtgggtggatcacgagttcaagagatcaagaccctcctggccatcatggtgaaacccagtccctactaaaagtacaaaaattagccgggggtggtggcgtgcacctaaggtcccagctactcaggaggctgaggcaggagaatcacctgaacccaggaagcagaggttgcagtgagctgagattgcccccactgcactccagcctggtgacagagcgaggctctgtctcaaaaaaaacaaacaaacaaataaacaaaataaataaataaataaaagttttgtaggaaacacagtttgaaatgagaagaaagaagatgtcctatgctatgcactggttttaactatatgaataattttaccatgtttaccaattttactatgtaaacaattttcccacattaccatgggaatattaggtgaggtcttgaaacacaatcatgactagaattggacaacatcatatggaaaaggtaatggaacaatgttttatggaaaataattgagagagcttctttttttttgttttttgaaaattagtagcttgcttgaaaaaatatattttttaggggtatcttttaaagacataccttatttcctagtttttcctttattaattttatttttttcttttttaagaacttctaatattgggcataaaagtgagcctgggatttgtagtatgatgagagaggaaaacagacacgttcgagatcactgtgctggggaggctgtcttgggattatgtaaatggcagggcttatgtgtaaaacaaaccacagcagagtgagcaaaccctatttgtagcatcagtggttacttgcagtgattccactaatttctctcatgactgtgacgctggacaggtcaccgatgtttcttgtacctgtatttggtcatgtgtataacaaacattttagatataaatctatcacagtagagtgttctgagaaataaatgtaaatatatttataaaaatcatagcctaatgactagcatataaaaggcacgcagtggagctgaattactttcctgtcacctaatgcttcacggtctcaagtgtttaaacataaaatctaaggcagaaggcactcagcagtttggttatttttgtcttacggggtcgaaatgtatacagaaggtagggcaggtttgagtgaaaagcttcttcattgctcattgcatccacctgaggaaaaagatgcaaagcttgccctgatcagagggaacaacaagccattattttcctgtctttgaaactgtacctgggagcttctggatagctgaacacgtggagcttcttggagggtggcctgtccagggaaggcatggaaggtccatgccccttccccagatctcgccctaggcatttcttcagctttttagtggctacatgatttaagcctcaaaactacaatagagaattattcagtcagatatatggattaccacctaacaaggataaagtaaatctaaagtcacagtcaatactctgcctcaagtggaaactgtgatgtttctgtctggcactgccaagtttgcagaacaacaagaaccaaaaatcaagagagaagaacttcattcggttttaggggtgacccacagcaaagtgtgacaaatggaaagaggtccagtgagaacctcaaacttaatgtactgtgaggctatcttgaaaaacaggctcctgggcctctgctcttatgctgcttcttttatgacaaataacacctttagatcgcacgacaaaaaaaagtaacacgaaagactacaaaagaaatgaaaagaaagtcctgattctacaaaggatgctaagcagatgagaaccaataccaaaaccaaggaccaacctgagaataaaaagtgaaagagttcaatgcaaagagaaaagagttcagcccaggtgctgacttgccacaaggcacaaggagcctttgtggatacagcacctggttgacggatggggtccatggcaacgggcaacatagaccatgtcttgttgcaacttccagaaaaactgtggaagtgaagacagtccaaatgagaataagcaaaaggtgtttatacagagcttgctatagaaaggaagtcagccgccatcttttgcatttatcagagattcagaggtaggcaggaaagtctgagagattcatggtagaaaaagttatgtcctgattgctggcctagggatgctgtaagctggctaactagaagtgtggatttctatgggattagtcagagatccatattttgctttctgtggttggtcataaattgaaaatagaggcaaaaattagggaagctggcagttattggccaatgctggtgtatttgactgttgtaagggtcatgatagaagctgtttagtctataagggcactaagagtttagagggtttcttagcagtttggctgcaataacaaaataccatagactgggtagcttaaagaacagatgtttctatctcacagctctgcaggctgggaagtacaagatcaatgtgccagcagatttcacatctagggagcacctgttccttggatcatagacagccaatctctggctatgtcctcacatggcaaacatgccaagggagttctctgagaacccttttataaggggactaatgtcattcatgaaagctccacccccatgacttgatcatctcctgaaacccccacctactaatggcttgaaagaatatattttttagggatctcttctaaagatttgggggtcaggatctcaacatatgaatttttgggaaacataaacattcagtccataacacaaggcaacagaaaaataaaatagtacctgtgtatttttggggcattgaccttcacttccaagaagctttccttgatgttaatggagcacctgactcccaaggcatggtataaaaatagactgtgaataagaattctacgagttctaccaaatagcctgtgatatgtgcatttgaacaatgtatattacaatatagcattgaagttgttttgtttgtgtaccaagtcattatccatacgtttgtatgtatacatagtctgaaaatgtattgtcaaactattatcttaaatcagtgttgccatatgttttctctttttattatttatgatgtcaatgtgctgagatattttaataaatatcatatatcactcaaaaactttattattaaaaatgtatagatctggtgtagtccaaagaaatgttttatgaacatatatacaccaaggattctaaagagcaaagttaaccttttatctttgatttatcacgtgtcagtcactccacccctgtttgcctcactcaaacacattattattattattattattattattattattgtgcatttcaaagtaagttgcagacatctttgcagttcaccctgggacacagtggcatgcagattataacatagtcaaagcagtaagaaccaccattgcaagaaagaggatgaattaaagttcacccaggcttatttcagatcccagagcaggaaatgaggagggcagatgaggagaaatgaggattctgaaatagtctactcgtgggagaagagtgctgtcatgaaggtggagtcgctgcccaagagagactggagagagagagagagtgtgtagagccactgaacatcagggctgcacactgtagggcctggggcagacaggacatgctgcagcaggggaaaagcccctggcccatgtggaagatgcaagctgggtgggtgctgtggatgccatagtgatgtggaatgagaggagaaaatgggagcctgggctccaaacaaggagtaagcagagccacacttcttactctctcactgaatcaggtaacatggagaaagatctggatctttgcacctgcccagtaaggaagcagaggtgggagagggagagtcagcctggacaaactcagggagaagcagaggccccagcctcactgcacatgtgttcctgatctgtttcctctgattctccaggtgttgaagagccatggacaagactacctcgttggccacaagctgagccgggctgacattcacctggtcaaacttctctaccacgtggaagagcttgacaccagcctcatctccaacttccctctgctgaaggtgacccatttcccagtcctcaagaggcagctcctcatctcccatcttgggatctagtatctgggtccttgaactggccacattctgacctcagccttctccaggtcttcagggccccccaggtctccaaaatgagcttccaggtcctgattctgaggcatggaaatgccttcttgttatgccaaggaaattacatgtgcatgctaccccaagaatatttcgctttttataatgccaaggacccaggactcagcatctctcctcatccctttatttcactgtggtttctgttcctgagttctctgtgatgccctttatcccaatatgcccttatcttcccacaccaagtgtgtctgagcagggccctttccatctggttc

SEQ ID NO: 93864 - DNA, 13267 bp, Homo sapiens
atttgaaagtgactggtaccagccactgcaaaaacataccaaattgcaaagaccatcgatgctatgaagaaactgcctcaactaatgggcaaaataaccagctagcatcataatgacaggatcaaattcacacataacaatattaaccttaaatgtaaatgggctaaatgccccaattaaaagacacagactggcaaattggataaagagacaagacccattgctgtgctgtattcagaagtcccatctcacatgcaaagacacacataggctcaaaataaaggcatggaggaatatttaccaagcaaaatggaaagcaaaaaaaagcaggggttgcaatcccagtttctgataaaacagactttaaaccaacaaagatcaaaagagacaaagaaggccattacataatggtaaagggatcaatgcaataagacctaactatcctaaatatatatgcacccaacacaggagcacccagattcataaagcaagttcttagagacctacaaagagacttagactcccatacaataatagtgggagactttaaaaccccattgtcaatattagacagatcaacaagacagaaaattaacaaggatatccaggacttgaactcagctctgtaccaagtggacctaatagacatttacagaactctccaccccaaatcaacagaatatacattcttctcagcaccacatcacacttattctaaaattgaccacataattggaagtaaaacactcctcagcaaatgcaaaagaacagaaatcataagaaacagtctgttagaccacagtgcaatcaaattagaactcaggattaagaaactcacgcaaaaactgcacaactacatggaaactggacaacctgctcctgaatgacaactgggtaagtaatgaaatgaaggcagaaataaagatgctctttgaaaccaataagaacaaagacacaatgtaccagaatctctacaacacatttaaagcagtgtgtagagggaaatttatagcactaaatgcccacaagagaaagcaggaaagatctaaaatcgacaccttgatatcacaattcaaagaactagagaagcaagaggaaacaaactcaaaagcgagctgaagacaagaaataactaagatcagagcagatctgaaggagatagagacacgaaaaacccttcaaaaaatcaatgaatccaggagctggtttttttgggaaagatcaacaaaatggatagaccactagccagacgaataaagaagaaaagagagaagaataaaaaagatgcaataaaatatgataaaggggatatcactaccaatcccacagaaataccatctaccatcagagaatactataaacatctctacacaaataaactagaaaatctggaagaaatggataaattcctggacacatacacccttccaaaaccaaaacaggaaaaagtcgaatccccaaatagactaagaacaagttctgaaattgaggcaataattaatagcctaccaaccaaaaaaagtccaggaccagatggattcacagccaaattctaccagaggtacaaagaggagccggtaccattccttctgaaactattccaatcaatagaaaaagagggaatactccctaactcattttatgaggccaatatcatcctgatactaaagtctggcagagacacaacaaaaaaagaaaatttcaaaccaatagccctgatgaacatcaatgcaaaaatactcaataaaatactagtaaaccgaatccagcagcacatcaaaaagcttatccaccacaatcaagtggctttcatccctgggatgcaaggctggttcaacccatgcaaatcaataaatgtaatccatcacataaacagaaccaatgaaaaaaccacgtgattatctcaatagatgcagaaaaggcctttgactaaattcaacaccccttcatgataaaaactcttaattaaataaactaggtattgatgagacctatctcaaaataataagcaatttatggcatactcatagccaatatcatactgaatgggcaaaactggaagcattcccttggaaaatcagcacaagacatggatgcccttgctcaccactcccatagtattgggggttctggccagggcaataaggcaagagaaagaaataaagaatgttcaattaggaaaagaggaagtcaaattgtctgtttgcagatgacatggttgtatatttagaaaaccccatcgtttcagccccaaatctccttaagctgataagcagcttcagcagcctcaggatacaaaactgatgtgcagaaatcacaagcattcctatataccagtaacagacaaacagagagccaaatcatgagtgagctaccattcacaattgctacaaagagcataaaataaataggaatacaacttacaagggatgtgaaagacctcttcaaggagaactacaaaccactgcttaaggaaataagagaggacacaaacaaatggaaaaacattccacgctcatggataggaagaatcaatatcataaaaatggccatactgcccaaagtaatttatagattcaatgctatccccatcaagctaccactgactttcttcacagaattggagaaaactactttacattttatatggaaccaataaagagcctgcatagccaagacaatcctaagcaaaaagaacaaaactggaggcatcacgctacctgacttcaaaatatactacaagtctacagtaaccaaaacagcatgttactggtaccaaaacagatataaagaccaatggaacagaacagaggcctcagaaataacaccacacatctacaccatctgatctttggtaaacccaacaaaaacaagcaatggggaaacgattccctatttaataaatggtgttgggaaaactggctagccatatgcagaaagctgaaactggatcccttccttacactttctacaaaaattaactcaagatggattaaagacttaaatgtaagacctaaaaccgtaaaaaccctagaaggaaaccttggcaataccattcaggacataggtatggacaaagacttcatgactaaaacaccaaaagcaatggcaacagaagttaaaattgacaaatgggatctaattaaaataaagagcttctgcacagcagcagaaactgtcatcagagtgaacaggcaacctacagaatgggagaaaatttttgcaatctatccagctgacaaagggctaatatccagaatctacaaagaacttaaacaaatttacaagaaaaaaaaaaccatcaaaaagtgagtgaaggatatgaacagacacttctcaaaagaagacatttatacagccaaaaaacatatgaaaaaaaccttatcatcactggccattagagaaatgcaaatcaaaaccacattgagataccatctcaagccagttagaatggtgatcattaaaaagtcaggaaacaatagatgctggagaggatgtggagaaataggaatgcttatacactgttggtgggagtgtaaattagttcaaccattgtggaagacagtgtggtgattcctcaaggatctagaactagaaatatcatttgacccggcaatcccattactgggtatatacccaaaggattataaattattctactatgaagactcatgcacacgtatgtttattgtggcactgttcacaatagcaaagacttggaaccaacccaaatgtccaacaatgatagactggataaagaaaatgtggcacatatacaccatggaatactatgcagccataaaatatgagttcatgtcctttgcagggacatggatgaagccggaaaccatcattctcagcaaactaatgcaagaacagaaaaccaaactccacatgttctcattcataactgggagctgaacaaggagaacacatggacacagggaggggaacatcgcacaccagggcctgtcagggggtggggggctaggggagggatagcattaggagaaatacctaatgtagatgacaggttgatgggtgcagcaaaccaccatggcacgtgtatacctatgtaacaaaactgcactttctgcacatgtaccctaggacttaaagtacaataaaaagtaaaggattgtgaaaccccagtttgacacaaaagaggaaaagtttgcgttggttgtaactatgtagagaatttcaccaaggaagacaatcttttaggtggggtctcaagaaagtcacacatggctagagttgggtaacagcacatggagagggctgtggaaacgtgtttcatggatgtaattggaggaactgctaatatgaggcatagaagcagccctgggagctgtaaaatgatgagagaggatgaggaacatggctgagatggctatagcagcgactcttttaaaattgtaggaggtaggtctttggccatttgactcacactaagttcatgcacagagcaaaccacaatagagatgatcagtcctggcacagcaccattgggtactggcagtgattccaccaatttctctcatgactgtgaccaccgatgctcttggtacctgtattggtcatgtgtgtaacaaaatttagagatctatctaccttgataggttgttttaagaaataaatgttaatatacctgtaaaaatcagagcataatgactagaatataaaaggcacccactggaggtgaattactttgccaccacctgacactctattctcttaggtttttataaacctataaaatctaaggcaaaagacatttgacggtttggttgtttttgtctttcaggattgatatgtacacagaaggtatagcagatttgggtgaaatgatccttcctctgcccatatgacaacctgaggataaagacaccaagcttgccttgaaccaacagagaacaaaaaatcgctatttccctgcctttgaaaaataagtgaagctgttcagcgttttgcatcactcagtttagagaccagtagaaaaacagtggctgggcattcctggggcactgaccttcactttcagtgagacttcatgaacaccaaggcagcactctgactctcaaggcattttatgcaaatagacttggaggaacaattgtaacacttatacacaagttataattttccaataaaattttaacttactagaccccaacattaaattctctgttgaacaaaatttcatgttcataagtagaacgtgggctgtggaaggctctggaccacactagaggttgctgttgagtctacggaaccccatggacttttattgaagacgaacatgatgaaagtgacccatcagaaaatattctggcaccctgtgtaggaagacacaagaccaattgcccaaccagagaatattgtagtgtttcagggatgggcatttattaaaaggagagtgactgtgggatgcagaggaagattttgtattttataataagttgcagacatcagtgcagttcacccttaaacgcttcagcttgcaaattataacatagtgctggttaggagtcagagtcaatgttgtaagaaagatgatgaattcaggttcacccaggtttacttcagatccgagggagatagagcagggaatgaggagagcagagaaggagaaatgaggactctgaaatagtctcctcctgggggaagagtgttgtcatgaaggtggagtcgctgcccaagggagattggagacggagagagaagaatgtagagccacgtcctaaatgtgaaggctccatgctgtagggcctggggcagacagaacatgtggcagcaggtgctaagcccctggcccatgtggaagaagcaagctgggcgggtggtgtagatgccacagtgatgtggatgagaagagaaaatgagagcttgagctccaaccaaggagtgagcagggctacacttcttactccctcagtgaaacagggaatgtggagaaaggtctggatctctgcatctatgcagtgaggcagcagaaatgggagagtcagactggagagactcagggagaagcaggggtcccagccttactgcacatgtgatggagaaccaggggtcccagccttactgcccatgtgatcctgatttgattcctccaattctcgacgtcttaaagagcaatggacaagactaccttgttggcaacaagctgagctgggctgacattcacttggtggaacttctctactacatggaagagcttgamtctagccttatcttcagcttccctctgctgaaggtgacccatttcacagttctcagagagrcagacccatatctcccatcttgggatcttgtatctgggacctgggactgagtatgttttgaccccaatgttcaccaggccttcagtgccccaaagtctccaaaatgagcttccaggctccaattttgaggaatgaaaacacttttgttatggaaaggaaatttgtggtgcatgctaccccatgaagagtattttgccttttatcatggaaaggacccagggcccagcatgtctccccatcactctatttcaatgtggtttctgttcctgagttctctgggatgtcctttatcccatatgtgcccttgtcttcccgcattgagtcagtctgagcagagccctctccatctggtttcctccctaggctctgactcctgctgtctgacactgtgttcctctctgcacagctctccagcacactggccccctacactgtatctctcactgacaaaagtggtcccattatttgtgtttaatattttctataacattttcctttccaactcatttccccatattttcacttctgcttagagactgatctgtgttgaaatctcacggcacattgttttttcttgtcttatacaagagtcactaatctacaggattaatatgtaagaagaaagggatggctgaactgattaaaatctgaaagacatctttggggaaaatataagtgagctacatgttattcctctcatcttcatttctcgctcagtgtctgtttctgcctccatgctggtgctgatggcacagacttgcttggtctttgtgtagaagggtctcagattttctgggtggtataaacggtggtggcaggccttggcttcactctgaggctgtgcattgtgaattacaggccctgaaaaccagaatcagcaacctgcccatggtgaagaaatttctacagcctggcagcccaaggaagtctctcatggatgagaaatctttagaagaagcaaggaagattttcagattttaataaagcagccatggaggccaagaacatgcaagaccaatattctaaagttttgcaacaataaactactttacctaagtgttgattgtgcctgttgtgaagctaatgaactctttccaattacatactaattaaataataaatctcctatttgtcgacttggttaaaattaatttcttttccttaggatctgatatgaattcagatttccaatctcctcctaacctaccactttcttggaattaaaagtttagtaaaaaaataatgtagattatgtggtttgtttgacttttccaagaattgccctgcaacattcaatttgtcatacaatctattaaaatgtcagtgtagaaatatacttctgacattttcaggtatgcacaggagaagagttaccattctgggtaatgacataaagacattttcttcttttcttggaccatcattttatttctgataaaagcattcttccttatccatttacaagacaaccattctttctgctgtggattcctcagttttctaggaggtgaggaaatattgaagagcaaacagacccatcctctgctctcaggccaccctgttttcccttacagtgtgtgtgctcctggctcatcctcactctgcctccttaaggctctgtgaggccccaggcatgagccttccctcagttccttcagtgccactcaggcctgggctgccaagatacaaatggtatatgcgaattacatataagtaagtatatgcaaaattatttttccctggtgtgtcattgtgccattgtgcttggattaggagtgatttccaggaatccttccctgcatcttctagcttctgggggctcttggcctttctggactttcatggatcgtgaccacaccactctaatttctgcctctgtcttcctgcacctcaccctctgtgtgttgtgacttctcttctctctgcagtgaggacaattgtcattggattcagggcctttccagatataccaagatgatctcatctcaaattcttttacttcattacatctgcaaagagcctttttccaaataagatcacgttcacaggatctagggatttctatatggacctgtctttctagggggccaacataaccccctatatggtatagatgaagaaagattatttgcaattgatgaatccaggtgatggatgctttcagatttgttatattatgggcaatttgagtgacgcaaagaggaaagcatatgcagatagggttcccggatttgtcagataaaatacaggacacccacctaaatgtgaatttcagataaacagtaaataatatttcagtataatctggtttcataccgtgtttggaacataggtataactaaaaaattattgattgtttgcctgaaattcacatttacatggatgtcttatattttatttggcaacccagtaagaaaagggtgccatcaacttgcccttcacagacatcccttcccagctatgctcacaatagagatttttcagttgccctagtccttgcatccaactcacaaaaaaaagcatctttaaaaagccagtttctgctgacttgaaaagagagcaaaatctaggtgaaatgtattgtttaaactaattgccaaccttgaaaaggaacatattaaccagtgtcttctgataagcagatcacttgcctcatgtcttagaatccagtaggtggccccttggccatgaaatgtgtgggagtgggttttccctaacttgacctttctcctttcagtgggagggaactattgaaaggaacaaagagcttataaatacattaagacctggaattcagttgcccagccacgacagtgacagagtttaacaaactaagtactgatcttataaatccctctacattgcctcacatgctcctctctagcctcccagaaaaatatgctaatatgtgtccttagcacaaggaaaagtctgtttttactcatatcgtgccatcttggtgtgtttgggtgacagttcaagaattgtttatttcttttctgttggatacatctttacagaaatgtaaaaatgaagaatttagaaaaccagggcctcagcatttaatggtatgggaaacaatgacatgaggagaaaaaagaaatggtagcattttaaacaatctgagaataatcagtgctggaagaagtggcaatgtatgcaaaaatttctttctctatataagtagtcaaaacataattgttgtaagttgtgatcctgtaatactatattggctgtgaaaattcaaaactaaggtttattataattagaataaattagtttgaatgtcaggaggactagattctagttgagcctctgccactaattagcttgacgacaagtcatattctgtctctggagtactaccaactcacggccaatctacaggatagctaagaaagaggctctgactgttgatgccctttgaactgtgtaattctttgaatggagatctgtccggcccactctaggaggtttctaagcgtccctgccctttacctatctgatttgtagcgccctctccctccccgcagatgtgacaacccaaaatgtctctagaccttgctcaatgtcctctggagcagaggagcaaaatctccccagttgagaaccatgggactacatgaattcatggggctaagcaaggctatgttaccgatgtgccccactgcttggacattcactggaaacttcctgttaatccaggtggactgattagtgaatatcattaacctctgtacagaagctaaaaaggaaagagagagagaaacagagagccaccatatgacagatttgatatgtctggattcatataaaaatttattcctactagagttccatggacaaaatatagagatctagagatatggatagatagataatagatgatgaagagacagacagattacagacaaatgcatagaacgattgatagataaaataatacatacttggatgggtagacagataaggattataaatagatacatatatatagattgttggtaggtaaaataattaatggatagatagatcaaagaaagaagatccatgggctactcaatgtgtccagagactcacccatcttccaagcactgggacaagagcaaacacccattgctgagttcctactatgaattttttgtacgttatctcatttaactttctcaacaaccctcaaaagtagaaataactacctctactctaagaagagaaaattgaggctcagagactaaacaacctacagcttttatgaaccttgtaatgggaggagtcatggtttatctcattctcccttctctccgataagaaacagtgtcattgggaccacctcagagatgtaattcttttaatttactcctggaattaccatagcttatattcctttcaaattaagcccatttttaattgatgtaaatacagttatactagtcttcgactcactctggattttaggttgtcaaagtagagaaagacacactttcattactttttccttccaagcaagcccctgaaaagttgctaagagtaagaactcatgaattagatgttcccctctcaccctctccttccaacatttagttggctaatatactatgaatagaaaaatataaaacaacataatcagacaggagcagagagccagattatgaggtggagtggaaaagctctggtcctgcaatcagaaggagttcaggctgacccaacactcaccaagtgtgcagcatgagataggtgctttagctttctgaaactcaatgtacccattgaatggctattaggagccatttcccagggttgttgcagaaggtagacacactccctagatattgaccatgaatgaggagcatgtgtgtgtgacccatggcaaatccttgagctctcaggttctcattttgtgttgactgaacaaagctcaacggtaacctctgccccagtcttagcctgacccttggaaacctcatattgagaggcgatatgttagttatcagcaggagtgttgtgataaaatattatataagataaaaattcatttccttttgaaacatgattctcaatcaatggctaagggagcttagtgtggggattggaatcatgacactgtgaactctagtccataacaattaaacaaccgcgccccacacttttgtgtgaacttcactctccctttctttctgctgaataatgctatttgcatttcccaagttaggaaagtacaacatcaaaatatctaatcacagaacaggtaagttgattcagtatgatttcaaagaattctttactttccaaaggctaaactattgactcccacattttaaaatgtagacatttaaaagattttgatgtctatttatgcagccaacaaacatataaaaaaagctcatcatcactggtcattagagaaatgcaaatcaaaatcacaatgagataccatctcatgccagttagaatggcgatcattaaaaagtcagaaacaacagatgctggagaggatgtggagaaatagcaacacttttacactgttggtgggagtgtaaattagttcaaccattgtggaagacagtgtggcaattcctcaaggatctagaactagaaatactatttgacccagcaatcccattactgggtatatacccaaaggattataaatcattctaccacaaagacacatgcacatgtatgtttactgcggccctgttcacaatagcaaagacttggaaccaacccaaatgcccatcaatgatagactggataaagaaaatgtgccacatatacaccatggaatactatgcagccataaaaaaggatgagttcatgtcctttgcagggacatggatgatgctggaaaccatcattctcagtaagctatcacaagaacagaaaacaaaacaccacatgttctcactcataagtgggagttgaccaaggagaacacatggtcacagggagggtaacatcacacaccgggacctatagtggggtgggggcctagggaagggatagcattaggagaaatacctaatatagatgacgggttgaaaggtgcagcaaaccagcatggcatgtgcatacctatgtaacaaacctgcatgttttgcacatgtaccccagaatttaaagtataaaaaaaagattttgatgtctaaatttaagtcatacatacttttgtagaagtacattagttgacggcgggtgcagtggctcacgcctgtaattccagcactttggaaggctgaggcaagtggatctcctgaggtcaggtgtttgagaccagcctggccaacatgctgaagccctgtctctacaaaaaatacaaaattagccaggtgtggtggcatgtgctggtaatccaagctacttgggaggctgaggcaggagaatcacttgaaactgggaggctaaagttgcatgagctgagattgtaccatagcactctagcctgggaaaaaaacagtaaaactccatctcaaaaaaaaaaaaaaaaaagaaatacattagttgttaaaggcaagtatatttttcttctaaactcaacaaccacaaaactttgcaagaagaatcttaatgtttaataacagagctgggggtttggagagaaaatgcaactgttcctaagtcctggcactggaactcctgctttcaatgagtcctgtgcccttccattcacattcatgatacaattagttgcatctgtccttgcagccattggttttcattctctgatactctgctatgttccacctcccaaacagcctgggatagagcaagggctatcaaacttcactgatgagcccagtcaatttctctctaaccatttacaacaagcaggtgagcgtgcacacatgcaaacatccatacacacaatatacaaataactgaaactaacaactcatgaaacattacttacccttcaacatgtcatgctcactgatatttttattcttttctattttattttaaaaagtactggggtttca

SEQ ID NO: 93865 - DNA, 21589 bp, Homo sapiens
aggaaggaggaaggaaggaaggaaggaagcaactctgcttcttctcacttcattcttaccatccaggtgttgcattcatttaactacatttgtctcaagaataataagaaacagatcattttctttaaaagtatagaacaatcttgtaggtactgacacaagagcattatctttcactgccaaaaatatgtctcctattttttaatggatttttaaaaactctgttctcaacatacttaaaagctaagctattgaagttcataaagacctttcaaaaataaatctttttctatatgcatattaattgtaaatataaggaatcagcctcttctgtaacccattcaaaaaaatttctgtagtcattccaaaatggtctcttagattcaaagatgaaggagcagagaattttctttaagcctgtgtccagctccactgtggtttaacatggggacagcaagtaaccccrgtgacttgatattcactaaaatgttctatacactgttttacccctgacagaaggcactaagttcatttgttctctagaaatggagatactttatatgaatgcagcccagaacatggtttatatttaaatattttgtgaaatgtacaattttatgtaatctgatagtgctacaataatgcaaaaaaaatctttgtaaaaggttcatcaccattttttttctaatcttttggtttgaatttttaagtcttaaatgaaatttttgaaagtacacaaagaaaagtacaaagaatattgcaataaacaaacatgatctcactacctggtttgagtaattattaatattttgtcatgtttaccttcaatatatatttttaaaaacacagacagaactgtgtgtggtggtaggcacctgtaatcccagcactttgggaggccaaggaaggaggattccttgaggccaagagttggagaccagcatgggaaacatagcaagaccccgtctccacataaaaattttaaaaattagctgggcatgatggcacatgcctgtagacctggctaatcaggaggctgaggcaggtggattgcttgagcctagaagtttgaggttgcattggggtatgatcgtgccactgcactcgagcctgagcaacagagcaagactctgtctctaacaagaaagaaactccacagttaatatattaatataatcttgtttaaaatataaaatactaacaaataagtctaaaatttaatagaaccatcacctccatctccacttaagcaacttctatccagtcagtccagtctttatatttttgcacttactatgtgggctcaccaacctctgacttgtggacctttggaaataatttacataaacggctccttttgtgtactattctgtattttcctctttacaatcaatattatgtttttgcaatttgtcctttttgagatggatagatgacagatgggcaaatgatgagaccgagggagaaagagagggggtggaggaagactccggttcattcctttataattgttttcaaaatttcaatgtttaggtattgttgcattagaattagatcagaataaaatatgataaaacatgcacagaagacaatgtgaatccaaagcctacctatcaaaaacactccagtatctttggagggcattaaatatttttagtgtaattttttaaaaagctgaatttgtcattgcttcttctgatgacctaatttttacaaaacaataaaaggccaattctcttttctgagctatatgaagctctttattggatcttctgattcctcaccattttttagacttagggttggtattattatggtttgtcagagttagatggaaattctagacagtcatgcattacttaacaatgggatacattctgagaaatatataattaggtaattttgtcatgtgagcaacatagaggttattctcccaaacccggatgtaaagactgctacacacctgggctttatggtacagtctattactattaggctacaaacctgaacagcatgttactgtagtgaatactgtaggaaactgtaatgcaataataagtatttgtgaggccggttgaggtggctcacacctgtaattccaggactttgggaggttgaggtgggtggatcacctgagtttgggagtttgagaccagcctgaccaacatggagaaaccctgtctctactaaaaatacaaaattagctgggcatgatggcgcattcctgtaatctcagttacttgggaggctgaggcaggagaattgcttgaacccgagaggcggaggttgcagtgagccaagatcatgccattgcactccagcctgggcaacaagagtgaaactgtgtctcaaaaaaaaaaaacgtatttgtgtatctaaacatagaaaagttacagtaaaaatatagtattataatctcattgtataagcagtccatggttgactgaaatattatgtagcacatgaccgtagccaatagccacctcctgtgcctgaaatttccttgtgttatgagtcagagtaaattttcaaaagtttaataattatgctctaagatttacaattttgctgaaatggctgtgctttgcttgtctttggagcccctgctgtacctaacacagctcctcacacaattagcctttaagcaaaagataaaattgaagatttttaaaagttcaggagcgaaacctctttggtgtgatccggcgaaactcaatcaaaacgtagcagaaaattcttcagatagtatctagtctgagaaatctggatgtaccccatatagtttcatgtccagacctagaactgtgaatgccagcaggctggcctgcctcctatttcccacaaccctacctctccctccaacctgccaccctcccgcggtctgcccacctcctctcagggcttaccctggtaaagcccttgttggaattggagattgagctctgcctctctgattcttggagactcgccggatcagatagcctaagttacctcagagttcctgacatgaaaaattgtaggagaaactgaaatcacaaacgtatgcatttttcatcacacttcataaatattgtaagttgtaagtaaatagtgcttaggaaaaaataagtaaagtaaagcatgtttaggaaaaaaatgctgctttttggaaagctttgttttataccttggtaatcactgtccatattctcatatttgttaactttggaatatgaygacttccttttataataattatttacataaaattacacatttaccaagatgataatattgaagatgtagtaggcttggtgagagggcaacctagctctggttcttctaccatttagctgaaagactttaggcaagtcacttgacctctctaggcttcctaagcatccaaaggaagctttggttaagaagagctccaatattataatgtcagctgctgcctttccttttttcctggtgaaaatatgagagagagaaagagacccaccaactctctgaaacatggaagtgttttggagcatcgaaggtagtgaagagaaaacatctagtactggggattgtaaagcagacccagagagaacttattttgcaaaaacaaagagcagaggggataaagacgaactccctccccatattcacactcacactctacccttgcatacagattatttttaaatttagtaagcatccaatttctacttctgaatgccacatttctgttcattaagacatagtcataaggaaaataatatgtctactaaacatctgctcatttttagagaaaggccaatatgggtggctgaaaatttttatccgtattttctaatttttctacaatgagttttagcacttctgcaataatattgaaaatatttttaaataaataaggggaagagagctttacatccatcttctttgtcttataaaaatggcagaattccctgagactgaaatgtctcttactcttgtgtttgagagttgaagttaatgctggtcttcaggtataggaatgagagtgataggacatcaaggtttaacactatttaacattaagtacttaggaattatgaccaggaagctatgtattagcatcttctctgaatattttttattactccaaattgtaaaatttaacatttcaaattattttttattgtaaaacagatagaatacaatctgggaaaaataatattttccagtttttgttgggtttttacatctctatgctagaaaatattaataatacaggaaaactaattgtatttcaattttatgttaaaattatgctatacaaaatgcacacatttaattggtaaatgtattttaaagcgaaagtatccagaagttaattggtaacaatctaacaataacactgattaaaaactcttgtgagtggtaagaaaagatagcttgatttatgtttctttaaatatgcaacaaaggatcttttaagttaattttgttttattattagattgttaccaagtaacttctaagattagctgcaacttaattcctatgtctaagcctctttggcttaaagagaaggtatgtaatgagacaatcaaatatttgcctgttctttagcactaggaataaggggtaacaaacaccacccaagggaaagttatgagaaaaaaaataacaaaggtcaaatactgagccaagatgggagttagtctttactatacatcatgtcatttaaccatcatgacagcaccaccagtaggtattagcttcatttcacatgttaggaaactgaaattagaagagagtaacttatctgagccaattaaggggagtagcctgcattcaaattgcggctgaaaagtttaccaggcaagttatatctgcacaatagtagactatagatatttctcaatcaactgagttcagtaaaccctttgctttggttttatataaaaacttccttgctttcgtaagatccagaaaacgacagcatgggttcaacaacttacttgaaatattggtttatttggtrgttaggccttttactttctattcctttctgtgatatcaacagtaataacaataaaaatgttaatagcaacatattcttatattctttcatttttcaatttgaagaaaacctttttgaaacagacgaagaatttgagaaattaatccaaggtgagataaacgccttgttattcgtgatgttgcattagaccaaagagatgagatggtctctccattaatatgaaaggctctctctctctctctctcatattctaaataagagcagtgaaaattatgtaaatagtatctatccatatcctatctccatataaggaaggtagtgcttggatcttgcaactaggaggagccctgcctccaagcttctaagctgtcataattccaacccccttcctttgtttttgttgccctagggataatgtctgctttcacagttgccaacttcatgatactgcactgttcctttgttgttttcagttctccaagatataattcattcctttatatttaatgttctgtgctaaagtacctgatgtggttctgtctcccagctagaccctgaaacaatggaaaggagaactgcctcaacttcaggtgttaaatgggaaaagggcagagccagccttactgttgccattctgaggcagagagagagaaagagagaaagtccctccagtcttttaaattaaacggttgttctctctagttacagttggttggctggttggttgattggttggttggttttaatgcaaatattccttgggaagattgaaaaagtaagcccaaagcagagagctgtcagccagaagggagatcactgggattccaagaagggaggggtaggacatggaaggttgatgtaggagaacggtgggaaaccatgtgcagaagaaggtgcagggaggcaaatgtcaagacatgctttgaattccaggcagttaaaatatgtatgcttattttcctataagaaaatggggaataacagaaaggttttaggcagaggcttatggcttcagaaaaacaaccaggcagagcatgttgggtagataaatgtcgtggtagtccagaggtaaaaagagggtgaccataggaaaggagagtaaggaatgagaaaggacaattcttggtcagacagaaagctttgtgcctaccagagtactcaacatcattttcttgcactctacacatttttgtatgagtgaatgggtaaatatttctccttttacttggcctctaaaaatatttgattacatagttccattttgtaccacctttraagaaaacagttattattatcacagacaataaataacccaactttcctttgtgtattttaaggtggaaccctgatgtatggacaagtgcccatggtcgaaactcatggaatgaattaggtagaaaccagagccttcctaagatacatagctgcaaaatatgacttgtatggaaggaacatgaaggaacaagcctggtacaacartcgcttctttcttagaataaaacttwaaaaaaaagttttaagcttattagcagtcatgtgtagcataattcttgacagattaatacaaagctcttctctggttaactttttattgtagcaaaatctaacatatcaaaggagagagactagtataataaaccctatgtacaaaatttaccttcgacaatgactaattcatggccaattaaacagtttctttaattttctgattctatgtttagctctttattagttatgtattatttatttactaaagcaaagacgttagtaragtacatctaccactttcttgtgaatttgtgtttccctccacaaggtggaagtggcacacagagtaaatcaccagaacacagacccaaaattttcggaggaggagcattctatccccacgcaattgattctagaagtggttgttggaaactacttcattaatctctggtcacaccaatatctgccccctggcctcccagacattagttaattcccttgtgcagacatcagtccttttacaataggcagacctatctacaaactgacaaaatagtcttatcttacctggggtttttaacagcaaccctaaattgtaaattattgcacagaattagaaaaccattaattggtaaacaacaaataatccatctttactaaatgagatgtgttttaaataaatttctgaagccattgttttatttcaaaaatgcatgtgttttcagaaacttagctttaaacatttcaatgtagtaaacatttttaaattgatctcgtattttgaaatctcaacaaaagttttcccttactttctagtagtttctcactgacttagaaaccaaatttctgctgaaaccaaattacatccctgcagtgtagtttaacatgttcccctgtctctgtatttttataaattggtagctgggtttagaggctttatcagattcaggttctagtcggttttgcaaggctacttycagtgtcgttgtgtattctttatgatatcagtagccattgatgttcagggctaacattccttctgcatctattacctgaaatgttctttttttttttttttttttgagacggagtctcactctgtagcccaggctgtagtgcagtggagcgatcttggctcactgcaacttccgcctcccgggtcccggttcaagcaattctcctgcctcagcctcccgagtagctgggattacaggcacacaccaccacgtccagctgatttttgtatttttagtagagacagggtttcaccgtgttggccaggctggtcttgaactcctgacctcgtgatccgcctgcctcagcctcccaaagtgctgggattacaggcatgagccaccgtgctcggcctgaaatatttctataaagaaaagcttttgctaacacaacaaaagggctaacaagaaaaataaaagatcaaaaaagaaaaacaagggtcaggaatggtggttcatgcctgttatcctagcactttgggaggcagaggcaggtggatcacatgagaccaggagtttgagaycaacctggccaatatggcaaaaccctgtctctactaaaaatacaaaaattagctgggcatggtggtgctcacctgtaataccagctaatcgagaggctgagtcacttgaacccaggaggcagaagttgcagtgagctgagtttgtgccactgcactccagcctggtcaacagagcgagactctatcgcaaaaaaaaaaaaaaaaaaaaaaaaaarggaaagaaaaaacttcctttcatctactatctggttacttggacatacagttttcaagactgatgcttgattctttccctttgtttaccaattttccaaataatgagttgtttcatttgcagtgaccagttaattagtgttgttttcatatcattatgaactcatcaatttaaaacatctttgatgtgtttcagttcacttcaggtatcattcttatttatgctcaaattgtcccacctttggccaatrggagccaatgggaatttttggtctgacctgagtgatctctgataacttccttattatctggtataagatgataatcccaattaattctgaacatctcctgctccagaactggactcagtcatttctctaagaagctctggttccttttaatgaaaaacagtttttaaatagatctttcatataaactgaaaatgaattatttactattagtgctttcattggtatagtattgtgataaaacctcatacatgttagaaactttgtattttaaaactctttcaactgtataaacccacaacaatcctaatgttcagaatagtactcttctggttatctgttgctatagaatatgatctctcacggtgctgagttgacagggctcagctgggtggttctctccaagtctctcatggagtgctttactcatgtgtctggaacttgtgttgggagggctgctgtcatgccagatccctattgacttcaatagggatggcaccatgtttgagagtctgaagaagagacctagagccagcaaacaagacttgggatttattgaggggacttacatacaacacggtccagtggtggcaggctcgacaggagaaccactaccatttgtaaaaagcatgctggttatatagcattttcacttagcaccctctcccttgcaacctccacctggcaacctttatgtaacccagaacaaagggcctcaatcccttgcatggcctgcacaccatgggatgggccaggggttcagatgctcctcatagataaggaatgaatctagaggttggccactcctggattccttagcttggaactccaaacacacattcttcttagaccataggaccattatcagggtattgctatcaagtgcatctgccatatagctggaccatatgggcctagtggggcatcggtctctctctacgtgccttcttcacaggactagcttgggcttccacatggcatgaggttctcagtgtagttggactttgtacgtagtagctggttggcctctgagcaaatgttccaagagaaccccgtggaagctgtgaggcttatgtcctagatatacaagtctaaggacattacttctcacattctattggccaagcaagtctccaaggcccactcagattcaaggggagaatgaaacttactctcaataggagaagtagcaaagaatctgagtccatttcaagacatgcactgctactgtagcttaaagttaaaggaactgtggttcaaaaagattaataagagactcatcttggacccagaccaaagtttcccaaggcccacaccagtagtctcactacgtcatggtgtcttgtcaaacataacatccatgtttccatacactttggcacagagatgtgggtggtggcaagtgggaacttgtggagtaagttttgtcttctatgaaattgctctactatgtttgagaaccttcaatccagatggagatgtgtttggcagtgcagaggcccttattacctcttcttccacatgcatcaccagtagcagcatgggtgatctcactattattacaacaactaaatagccataaatgatatttgcccaatttgctgttttgggattattttaatactttgtgtatatgtattttattaacactagtgttacataattgatagtcacacacatataattgctcacacactttgatcctacaacttttctatctcccagatgcatcttccctaatatttcaaaggaacagcatgcctctgaaaacacytggcttcagttcctggaacaatgttccatgaaaacacctgataactaagcaggtaaaacagaggcactacttaaaatgtttctttggcccattaaatgacagttccctttatctgtaactcttttttgaattaacaccctttttctaggattcacatgyatgtagaaggcttgaaggacctgagtgacatgattatgttccagccactctctctgcctgaagagaagatgaatcttgcatacatccttgaaagagccactacaagattattccctgtctgtgagaaggtaagcaacaaactcctgccctgctttatgacttgaatcaagggggagaaaaacaaatgaaactaaaaatagacaaagaattttatcaataaaggtytccaaaccctttgcgaaagctcaaaattcttcccccacttgcagttagacaacaaatctgctctccttcctcacaccctggtcttctggatttttttttattttatgcataatttcagcactatttgtggttctggtgctgatagaatttcagttacctgattctaagggaggaaatcccacactaatgaaagagctgggggagaggggatggatattatttctaaaatacactggacagtcctggggttcagggctgtttgtaaggttagaattctaagcagtattctaaaagttaaaaaattgttttaaacataatacttgagcgttcatgtctctgcatttttaacagctgtaaaatgctgtctgaaagcttgcacttggtcagggttggatgccttctttagttattaatgctcttcatctccaggtgcagtcattataatattagtaagtctaggaaaagatgatgaaaaatgttagggcttggtaaaaacaaagaaaaaagagccagttaagtttttcaaactcacctgccatgctgttttaacctatcctttttgggttgaataacaatagttctcattaaatgatttaatacatgtatttgaatatatttatcatgatcaacagttttagagcctaatcatgtaacatagattatctagttgatacttatgtatttggcatagatgacagataccctaacttcctcggttagacttttcccttaattatacctggtgagttcctagctccaactggatcaaatkgtgaatattctaaacccccaggttttccccatactgtttccttcaaaagtgtttcaaagataatgkattcctttgtaatcagcrtgtaacttaagatcttttaccayacaaatactgacaacagagtgaatgtttaccaccaccatgtggtaaactaatgcatgaagtttttgttgtaagatactatgaagtgcagacttctcataactaaaaatgtgactgtaactgcactaacaacagtgctaataataataatggctcacctttactgagtgccaagtgctgtgctatatgattcgcatgcattaatccatttaatctttataataactccacaagatactatgtggttgcttcatctgtaaataaggataaattatttcctcatttacaggtgaagcaactatatcttaaagaagcaacgtaacctgcccagtgtcatacaactaataaagctggaacctgtactcaggtctctctaggtcctgatcctatgcccaagtatcaaaacatcatgaagtctatggcctagaatgtaccttagtgaccacctcctccaaacttacatttcattttgtatttgatcaattttgactcaaagtgacccataatttacagccctatttgaagaaaattcgcttataaaaatgagggttgggtccctctgagaatgacactctccctgcaaacacagtaccttccgaagagcagcacacctcaagaatccaccctgagatggtgcaagtagaaataccatcagcccaggaagagccaccaatggagggtcggtgctaaaatcactctacagaggttcacgggatagctacagggagaggagatgaaaagaagacaagcacatgagataaagctgtttcctatgttcagaataagtcaggagggtttaagctattccattcctttcacctcacraagcccaagagaaatggggtttgygtgagctcacacagctagtcagtggcaaagaacagattagaagccaggtctcttaacttctagaagactttctgccaaatcaagctgactttaaattatatgttaggtgtgtccttcatcttctaccttttccttattaaccatcatgcaggcactgagagaccacagacaagattttcttgtgggcaatcggctgagctgggctgatacacagcaacctgaagtcatcttaatgactgaagagtgcaaacccagtgtcctcttgggctttcctctgctacaggtaatgctatccaaatagctcccaagaactgcagggagaatgaatttgtattatccacttattctttcattcagtcattcaccatcatttatgaacctactaacttctttatgccaaggcctgtgctagaaatacaaagatgccctcaaggcagctatctcctggtgaaaccaagcatacagaccggtaacttcaatataatgtggtaaactaaaacgtaacatgataagagaaagcagatgtcttgaactcctgggctcaaatgatcctcctgcctcagcctcccaaagtgctgcgattacaggcatgagccactgcacctgacccatattacattataaacatgttttaacattgttagtctgcctcatttctttacaatgtagtctatttttgaaacttttcttgattatatgtatattccatttattgtgttcagaataaccttttttaacaagaaagaaatattttaattgttacaaaaacaaaggaggcagatactagaaactctgcatttcataaaacaatgaaactttgtttaaatgttttcatgatcatctttccgcagacaccattcattttaaaagtcctagtcaagaccattaagcagcttcatcttctatattaaaaaaaaacccgagacttaaaaaacaacagtaaagaatttcactatctttatatattacatcttataaagctattaaatttttcagtgtcaagagtgaaatattaccccatacctcgcttcatcactagaaggtggacacctgattgagcaatactcattaactgctaggtagatgaactgtgttgactgtagtaaagccattttacaatcaacttaggaagtaataacaccagccaaacacagagacacaaacatcaaaaatgatatgtttagtatgtacaaatagctatacttggggcatggctatcaagtaacaagactgatttaatactttacagtcatagcacattaaaaatatattgccagagggataatggtcccacacatcaaaaatgtctatatagaaaaggctgtgatttattgcaaagcataatatatagcaaattccaaggaagggcaaataatttttaaacaaatctttaaatttaatggcttaagccaaagcctcagttactttttggaggattcataacaagtaggggttgaagaatgcttttctttttttctgtttcttttttttttgaaatgcaagtctcgctctgttccccaagctggagtacagtggcacgatctcggctcactgcaacctctgcctcccggattcaagcgattctcctgcctcagcctcccgagtagctgtgactacaggtgcacaccaccatgcctggctaatttttgtatttttagtagagacgggtttcactatgttggccaggctggtcttgaactcccgacctcaggtgatcgcctgcctctgccttccaaagtgctgggattacaggtgtgagccactgcacctggcttcctttttttgatttactttttctttttttttttttctttgagatggagtcttgctctattgcccaggctggagtgcagtggtgtggtctcggctcactgcaacctccacctcccaggttcaagtgattctcctgcctcagcctcccaagtagcttggattacaggcacctgccactatgcccggctagttttttttttttcctgtatttttaatagagacagggtttcactatgtcggccaggctggtctcaaactcctgacctcgtgatccacccacctcagcctcccaaagtgctggaattacaggtgtgagccaccacacccagctttttttttcttttctttgttctgatatttttgtttcttttgaaatgtccttttcagtggaactggatgaataagaccttttccttttttaaaaaaattgcttttctctttgctttttcttctcctcttcatttattctttttttccagtaatgcttgcaatttattcattcttcattttattcatcaatcttcactgtttgcactgctgacatccaaaactatgtccctttggggtctacttggagaaagttgcagcattcaaaagtcaggtgaccaggaagccatattttttacagcctgctctgacactgtccttgttgcaacctgggactgccatgatggtggtaagaggggtcgctggagactctggctttctagaacacgcttgcttcccattagctgtgaggacgaggcaccgccaaagtggccactttcacccatgccacagcctaacctgattttaaatagtgaaaatcataaacaacttaaatgtctaatattaaactgagaaacatctatataaatgaggatatgttcattggatagaattctatgcagccacttaaagttttcaaagattacataacatgaaaaatgcttctggtataagaaaaatgaggacttctctttattgtataccaggatgctttagaatgtttgtttttataaatagtgttgcaacaatatctttgtaggtatagatttttccacatttaagattacatcattaggacacaatttttaaaatggaatcacttcgtaacagcctatgaacgtttttgtggttcttgagaaatattgctaacttgcaaagtggcagtatcactttgcaatgtccacaatgtatgaaaatcccaattatcccccacctccaccagaatgtggctcatttgcattttactttgttttgttatattcttctctcttggatagtattcttttgcattttagaaattcaaggccagaatcagccacatccccacaattaataaatttctccaacctggaagccaaaggaagcctccactggatgaagaatccattgagactgtgaagaatatatttaaatttgaacatggcctgtttcttaaaaacatgagcactacagtagctgagtattaacaaatgaaacaaagtctaagaaacgtagtaaatatttcactatgcattggtagcagacccataaaaatatcataaagccacattaatgtaataaagtaataagacatgaggaaataaactgcctaatacctgtaagttacagagcctcttctacttttcataaaacaagaaaacaccaattaatcagagccatccaaatatgaatccttctggattctacgtattgcaaaagagtaaaatcacaaatatgcaaatggaygccaaagatttctttaaaaacaaaacaaaaaaagcacacacatcactatcattcacttctatgaccttttgggaaaagtccagggaatagcatagcttcaaaccagtttcttaaactttgaatcactagagtattctgcagacacagcatgtatttctaggatcaatttcacagttagtttctacttcagtatcgtaatcagttttgactataagctgctgtcagtctgaatctgaaggttctcctcagtcatctctgacagctagcaagtgagcagagcacctcaatgatgacggctttttccagccttgcctgtggtaacaacctctttgccaccattaggatttatgggattttttttcttcttctttaaattgggatttttttaagtacatcaaataattttatctagatttcctattcggttcaactggtacagcttttttcttcccttaattgaattacttatcactgaaagtttaacaacctccttgaaagtcagttgggaaaggtaaccaatctaacagaaccatatgaactctgccgttatcagttgaggaccctacgctttcacttaaagaaagggtttgaagtatgacaccactgcacataaccaacaggataggaactgtagatttttagagctctaaagggttgatcatttagttcaattcctccttaagaatgagaaactgagtcagaggaaaaggaaatgaccttccaaagagcatcaagtgggtggaagaattgggctgggattcaggtctcccgatgttcaatttgggccctaaaagtgccttggacattaaaagttataactatgcctaaaaataaagtggtaatttgaaacaaaatcagtttgtttcagaatcgttactctttcagagagaaaaaatatctacgcctcaggaagtagaatgttggcttaaataaaccctccttctcaacccttttcgttaataattgaatatttaaatgtcaaagatgatttgagtattcagaggaaaaactgacatgaaagaaacaggtttgaaccaaaatgtcttttatttgaatactgaatacattcagttaggacataacagtgtgctaagaataaaattttttaaagaaaaaaatagcactggcagcaatacaattaaaatggaaaaagcataatttctaataatttcaaatataacacaaatgacaaatagatacattatcattctgtgaactccacttaagacttcctttatgtgacaagttgtagtttaagcttacttgagacatgagtatttggaattttcaaaaaataccaaatatataaaaaatagacacaacaaatggaagagtatatcatgattcattagacacttttaatgaaaatagtgcttgacaattagaaaacagttaaaatttttgctttagaaaaaaactacctcaaactaatgttcatattagaggtgacagtgctatttgtgtttctagcattccatattgaagtttatcttttaaatacaaaaaaaatatgctctgcccattacagcaggatgacatgaacttagttttctgttcctccagatgctcagagcagcaacaagacaagtctcaggatcatcatgaggctggatttaaaataaaacaaagacaaagggagagtcacttttatctggcataagacagaaagggccatgcactcgcctacccagtagtgttactaatccttggcttgggggctctcccagctcaaccccttggaggattaaaacatcccagacataactgaattagccactttaaaatgttcgctaaatgaataaggaaaaatcagaacctgttgttctgaaaaccttggatgagggtttataagagaaaggtttgggaagaaacaaactttcagaagctagtaaaataaagcaacttgaaaaaataatcgaggaccaacttggggcagttactaattcaatctcagctactttctattaactgaggccttcttccggatccataaaccctacttcattttttcttcttttttttttttcttttttctgatggagtctcactctgtcacccaggctggagtatagtgacgcagtctcggctcactgcaacctccacctcctgagctcaagcaattctcctgcctcagcctcccaagtagctgggattacaggtgcccgccaccacacttggctaatttttgtagagatggggttttgccatgttggctaggctggtcttgaactcctgacctcaagtgatccacccgccaaagccttccaaagtgctgggattacaggcatgagccaccgcacccagcccataaaccctacttctgattcttcccaccaccaagtatcacttttagaacagggctataactggaaagctgtcttttgtaatcacactcctcctcccctccctgaaacataatacatagtcacactagaaaattctacacaaaagtagaaagaggaacattacaattattcatcacactatcacccacagaaaaacactaacagcttgaaatatttccttcctgtttttttatacacaaactttttttaatcacactatatgtggttgttttsatcctgtttttataccttattatgtcactaagattttccaatgccaccaaatcatttttgaaaacataaaaatgtaatgctcattcaatattccattaaatggacaaaacattttttcaaacatctccttactggtgaactgttaggttgttcctaatttttcagtctattgtgttttcactagaaataaagttgcaatgaacatcagtctttgtgcatatctcactgctttggaataaattccaaaaagtgaaaatgtctatcaaaggaaataaacatgtttatggctttcaacatataaagccagctttctggagaaatttttaaaatgttatctctaaatttttatttggtaatatgcttaatctcatggatagaattactggatcaaattaagagaaacttgaggccctctgtttatcttttaaaaaatattaaaacttctctcttaaaaactcttaaaaatattaaatttctgtcccttaaaaacttgaaataactgtatcacactgtcgctctgtcaaactctctaaaagggactgagtattagatttaaatgaacacatttagtgttgcagatgggtgaatcttgaggaaaaatgaggctgagtttagttagctctttcttctgaaaaaggcaagtatgcctatgtgaccagatactacagcaacactatgcgtatccaataagaatgttcatgggtacatcaatatcaaagacccactgaatccatgctatcttaaggtttttactgtcatgcttattataacaaaaaggactttgatctttcaaattaaaattgatgtttcccaaaaattcagcacttcaaaacaacagcagaggaaagtattgatcaaaatagttttacttaccttaaacctgcaaccaaaccagcaggcattattttcttggacctcttaaatctcacacccattatggtagccaggaagaaagctgtaactgaaaaccaaactaattcatgaaccagagtttcaaacatgttatcaatgcttgtgggaaaacagcgggtaccatttaaagctttctaacattacaactattatggataggtactgagttgccattgtcttgaaaagataaagtgctctattaaaacacttcatggccgggccagtggcttacgcctataatcccagcactttgggaggcagagatgggtggatcacctgatgttgggagtttgaggccagtctgaccaacatggagaaacctcgtctctactaaaaatacaaaaaaaattagcagggcatggtggcacatgcctgtaatcccagctactcgggaggctgaggcaggagaattgcttgaaccggggaggcagaggttgtggtgaactgagatcacgccactgcactccagactgagcaacaagagcgaactctgtctcaaaaaaacaacaaaagaacaaacaaagaaacacttcatcatcatctacctcgccgaaaaggtttctgggtaaacaaacatgttaaaatccattcctgaaatatcttcaaaagagaaagaccttttctttttcttttttttttttttgttgttgttgttgttgttgttgttgagacagagtcttgctctgtcacccaggctggagtacagtggcgtgatctcagctcactgcaacctccacctcccgggttcaagcaattctcctgcctcagcctcccgagtagctgagattacagccatgtacaaccacatccagctaatttttgtacttttagtagagacagggtcttgctatgttggccaggctggtcttgaactcctggcctcaagtgatccaccggcctcagcctccaaaagtgctgagattacaggcatgagccaccatgcctagctaagaaagtctttttctaacctaaatttctattcaaagaacacgccttgaaggctagcactgagctttattcaacttccctcagaaacactaagtagcacacttggacccacaggagacactcattaatgttcagttaactgaatataaagaaaatagttaatgtatcttttacaagtaagatctgattaataaaaaaaaaatactaaaaagaaggctgattggttttgttttgtagcatcccattttggagaatttgatgcctggagactaaataatagtctaagcaatagtattttattcagaagcatcatgtcagcctttttggagctgtatctatgaagggagaggtagttttatgtaagagattaggacatcaatgccacaatttaaaaacagctttcaaagaaaaactgtttattgatataaaaaataaaatgactgacaataaatacttgtgaactatttaaatgcatatcaataaaaatcctaatatcactacatctggctgatacatctaacacaacctcattactaaaaatatccctagccccttataaaaataactaaaaaaaaaaaaaacccaaatctctcactctccttcaaatatagaacaattttgtcttcatttatatttttttccatacacgaccaaggcactttgaataataaatcaactagagaaaatgtccttggtatggttttctaaatcttcactgtgtatctctttcaagtgagatgaaagtcaagtgtcctggtgactttaaacacacaggtttccattttttctgtggatattctcccattaaacttaacaagggaagaagctaaaaaagcgtcagccttgcttttttaggttaagtcttaaggcagtgcagaatctaaaagatgtttgtgaattaaatgaaataatgcaaggctgtctcttttttagttatttccacagcaatgtaaaaactatgctaaatatgcatttaggagagttagcagaaaatctgaaaataattccttgcttttcctaattcaatttttctagtaacgagtttttatagaaatattcttctgagttggaaggcctggtagcagtaccatcattttttatcaggtctttctagaaaggaataagtgttgtattcagcctcaacacatgcatatggccatttgccatttgactaaatatgttctaatatatctagcatagggtatcaaaaagatcacctccaatgtttgagtctctgtaaccaggaaaaatgccttacttacacagtgacacttttacatctcgtttgtcattggaga

SEQ ID NO: 93866 - DNA, 14615 bp, Homo sapiens
aagtgactttgagacccggtaatgccccagtaaaggtggccactctcagtttttcattttctttccacaaagaacagaggaagagttcctagatcaagtgaagaggaagctggctcagaccagccctgagaaagacctgttgaccacaaagccttgtcactgtaaggatatcctgaagttagtgctcttacccctcacccagcattgcttggtcgttggagaaaccacctgtgcattttattacctgctggaggctgcggctgcctgcttggacctgtcagataattatatggtgagcaggctctgtaatctgcccttcagctgagccttttactttgagaatgtgattgagatctcttacaatcataaccatgagtgaaaagtggaagaaagtaggagagagagaagagctagaaaggatttaggaaaaaacatgcagtgggaatgtggtaatggaatagcaccaacctgtgccagcactgcccctgactcttgcacaagcagtccagctcccgtttctagcttgaaatccaaatctgtttcaaattctgatcttgaccctcatcataaccttactccagcctttgccctaatctcaccccagcatcatcctaatcctaatctggtttctttatcccttgccctgtttggaggccttcttttatttgaggaaggcaagcagtcttctgggccaaccctcagcattttcatttttgaaaaaacagaaggtgaagatctgtcagtttgaggaggccactttctgccgtcttctgtcagaggtgagggcagggagtgaccttgaagtgccggctatttctccttgagggttaccctattatttcttttaaaatcttttcattgttttttgtgtatgattataaatgtgataatgtgataaaacgtttatatacatttaaaatatagaaatatgtaataggtagaaagtgaaagagctcccactaatcctacacccaccaccataattagtaattgtgtgcatgttccaccaactgtatacaaacagccatatcattgttttccatttttttataggctcatattctacattttcttgctcctgcagcttgcttttattcttaatagtacagacggaacatatttacattttggtatgcatactgatccaccacatagttacaactgccaagtattccattggctagatcatagcttagctcttcccttcttcaggtgcatttaggttatctctaatttggggattattataaacattgctacagtgaatattcttcttaagtatctctttctccccttgtgagagtgtttctgtaagagaaatttccaaaggtggcaatgctaagacacaattttaaaattcacaaatacactaccaaattgccagccaaaaatattatatcaattcaagttttttccatttcctcatatccttactaagatcagatactaccagtcttttctaaccttgctaattcctagataaagttatattgttttaatgtgtttctcttaattaataagatacatcattcttctaagtttattggtcatttgtattttttgtaaattatccattcttattcattgaagtagatataaactaatttgctcattggagtatatgtaaactaattttaatgtaaaccttaagataattgggttaggagagtaaacttaatgtacataatgtcttgaaggccaaagggaatattagagttgtcacattgttgcattatttatgcttcaaccaagaggtcttcagagcaaagttaaataattattctttccctttataagagaaagttattgtacagtcctcccaagattgttctttgttctagaatcacgtagactttatcactttcttgagggattcagccttagaatgtgaagatacaggataacttcaaggtagttccccagctcccaccccacatctactatgattcaacctgtttaggaagagagataaaggatttggtgatattatagatgctttctatgtcatgtgagagcatctgagtctccactcaaatgacgatcccttctcagtctagcagcatcacattttaaatcacagccttcctctactgcccactgacaaatgtgtgggagatgagaagggaggatactttctccataatcctattttctaaaccctttactcacttatggccatactggtgcttgttagggtgactgctaaccaggctatgctctagctcagctcactctagcacctcagtaaccccaactacacatctcaaaatgaaagagccagtgtgttatatccaaaaccttatatttacattaattcttcttttcccatctccaggtctgtttcaacatgggacgtatcactttagccaaaaaattggctaggaaagcccttygactgctgaaaaggaatttcccttggacctggtttggtgtccttttccagacattcctggaaaagtattggcattcctgtaccctgagccaacctccaaacgaccctagtgagaagtgagaagtcttcctaaaactgtagttaactagcctgagctttgcctttttgacctaaaactactctttttctatcaagtaatcttcaagcatctaacagacaagcagataacaagacatgtaacagtcagcatacatatatatatgcatgtaacagataagtgtataacatacagttctaactcttccaccttactcccccagccagttacatgtagcaaatagggattcaaagaatgaatctttttttgaaacctctctctgaacttttcccgatcaagtgggattaatcaaaatggcatatgaggttaggagtagtgggatccaaggactatttctgaatttgaacatctgtagatggccccatgatgagtagattggagctcttatagggagggaacgttgggcattagtaaagaataagggtgtgctaaccaccctgtgcctcacaacagtaagaagaatttggcagtcctgcagcagcaggtgcattgcctctccctactctggcagctctataacctggaggccacagccagtagctacaggtttgcctgcctggctactcttatgcagaagaattcagctgatgagtttgcaaatgaagcccaggtaagcaagtccttgctttacctttggacctcactcagaaaccaagttcctggttttagcatgattctccaataacccagacaacactgttcaagcgaggtttctcaatttgcagtttatagatgggtttccaggtatgagattatctgcgaactccctgaactgaatgcagaattttatgtgtatattcaaaagaacctttgggggttggcaggaggaagaaaaggggtcatagctctcatcagattctcaaagaagcctgttatctaaaaaagatttaaaactgctgacctaggaaaaaacaaaaggaaatgtgtcttcctcattttagtgtcttatctttctctctgtcttatccacatattcaacaatgaactatttggtgaacacctattataagccaggcactgatcttgactccagggaaatataataagtaaaatatagagtatgttaggtgataatcaatgcagtggagaaaaataaagtggaggcaaggggatatggggttctgtgaggtgaggggtggggtatagttttgaacaaggtggtcagagaaagctttgctgagcaggtgacattggagtaaatatctgaaagaggcaagaaagccaggctgtctgggagtagagtatccaggcagagggcacagtgaatgcccaaggcatacactctgtgtttgaaggacagtgtgactggaggggaggaagaggaggagagtgaaccaagagatgaggtcagaaggaccaggaaggggtgggatggcaaacggtgcagaccttaggccactgtaggagttttggcttttactctgaaagagatgggaagccattaatgggttctgagaagaggggtgacagtatctacttacattttaataagatcattctgtctactgtgttgaaagtaacctgaaggggacaagggaggaagcagggagaccagttaggaggctaatgcagtaatctaagcaagagatggtgatggcttggattattgtggtagggaaaaaaaagttgggggtggtcttttgtcaaaatagagccaacaggattcacttatggatcagttctgggatgtgagggaaagaaaagagtcaaggataatctgaaaagttgtgacccgaacttctagagggacagagatgctcttaattgggatagggaagtctgcaggaggaacagatttgggggaagatttgggagctaggctttagacatgttttatttgagatgcccattagacatcaaggtggagacaagtctggtgaatatgagtccaggtgaatactcaagtctggggttcatgggagaggtctgagctggaaatagacatatgggaaccatcagtgtgcaaatactgtttaaagccacaggactgggtgagaacaccaagggaatgagtatagaaaggagaaaaagtccaggaactttgttaacagctccagtgttaaaaggtcagagtggtaaggagaaaccagcaaaagaaacagaataagttgccagggagataggaggaaaaccaagagagcatggcatcctggaaagttagggaagacagtgttccaagaagagagcactatttcaagtgtgcacatagttatatagagcactaactatttcaaatgtgcacatagttatatagagagatctaggcagcagccctgaagagctctatggagcaaatatcagaggtcttaaattagaaaacaaagaagagggagtttaatcagtgttttgaaagggaaagtcatggattggagaggaaaagcaggagcatgtagagaaagtggtttgtttaaagaacatgcagtgagaatgatccaattagaagtgtaggggtgagaaggagcatgtttttctagctgggttggaggcaagtggtgggataccaggagtttagactgggtgagcagcagggcaccataataggctcttacataggaaaggatcaaaatggaaatgtcacatgaatatacaatgggaatattttgccctgtgtttgtttccctgcaggttgtctctacctatgtggagctctctcagttctcccagagtgtgggcatcaaggacaagtggctgcactgtgagcagatggccattcagaaaagcagtttatgttggttctccagggaggggttgttggccacagctcagctcatgcaggccctggcctacaccaagctctgccttggtcatcttgacttctccatcaagctgggtaatgggacttagggatggtgggtctagggcttttagagagtacatgttcacagctagacctcacatggtgctcttaaacctcctcaggttttcaagctcgtgagatatgcagacacctccagaaaccagctctggagaatctgattctctcagttctcttcagatctgcatttctgaagaagtattaagatcattttctgtcatttgtatttgtttcctaagaggggtgtgtatattttcccagagaagtttggagtggagagggagatgctgttccatttccacaccctgggatatccttcccttggccactccagacacattatcttaagtgtggaagagtcaggagtggaaatgcagagtcagagctactatatattcctcagtacttgggtctcatggacaaagtttcttcaaaaaaaaatctgcagggagatagagaattgcagcagctgaagactctggaaactgcctcagaggcaatctcccacctcctttgcctagagatgggtctgatcccaggcttagatattctctttataaatagagctatgaagagatttaaaggatgttaggctgctttgaaggtgtaagaccccttcctttcctacccatcctcctcactccctagctggtcccagtggctctctctctcggcagatttggtctgtgtgtccatgtactggagagtcagtgggcgctcatttctcaragttatgatgtccttggcctggcctgcttttactctgcttgcttagatctgctgctctatggaaaaggtaaatcttgcgcaggtctctgctgtwctcctgagggattcagacctcagatggggctctaggtttggaatacaggcagtcatgaacctgtccctcaggcatggcctctgcccctgacctctggctccttaamgtctgggaaccatgttgtgattcaggggtgtctgcctttggggtcttttttccttccctgtatcacataccttctataccctggttcctacactgatattatatactagcrtggttaccttctctgtccacaggattgctgtgtcggccctttagtgagtgtctgcgtttcgttcaagtctacgagcacagccgtgttctaacctctcagagcaatgtcatgctgggggtccactcctccctggccatgtggtaaygtcttactcaagggctgtggaaaaggatagacatttatgtcatttaagctgtctctccccaccagacaggacttttgaacctctctaaccaacttttaaagaccattcacctcccataccctcccatcttattagaagggctcttgtcctttaacaggttttggcctataggtcaagggttacrtttagggttacatttaactgctagagtaacccatagcaaggctgaatataattggtctccttttaagtttccttgtatgtgagttagtagccttggtcactttctagcatcacaattctgattgtccatgaggtcttagagccttaaagaagtgatgattttaagcaaaagtcatggtgggtaagcagcggatattgctgcragctgttactcttttcctccaggtttgcccaggaatcacagtgggacctgtttaagcactatttctccaacgcttgcagttggtgaaaagaaccaatgcctcgctatttggtgcacatggctttgtccgattcctagaatgccatgtgttaatgttacagaaaatgccagagggtatcttcatgcatattcctctagagcttcacagccaaacccttgaggtacctgtttctcagctgtcctttgactaacacctgattcacttagttctaccctatggtgctctttctaccacctgcatctcttccttttttcccttttactggctctgtttccctttactctttgaatcctttgtttctccacctagaaagtttctacctaccttatgtatccttcccgatattattgcatctagttctggactgggtttcttaactttccacctttgccagctgctacccagtatcattaaaatattaacatttagccttgctcaatggacctgtagtctatggttcagtctataatttgatacagctccctccagcccttctgagtctaaaacacattccaattcctctgttttccaggcttattttgccatcagtaactccttcctgttcccccagccatgagtgaatatgctgaatgaggacctttgtaagttctgatgaagtagcatgttaggagaatgaagcactaatcccagagctaatggaccttcctttcctttcagtactgtaaggagttcttctctcaatgtgtgacctgccctgtctatcaccagtgggtatctgagcttaaggcctctgtaatgagatgtgaaaagagagaattgatgtccctgactaacagcatcagaccttttgacacctgcttgaccaggatttggataaaaggagaatttctgcaggaaaataactcttagaaaagaaacttaggaatacagagtaagcatttcttcctggaagccttgtgtgagagacataaagacagtctcagattcttactcacaagcagtcaaaggctgcacctctgaaataaaaagggacacacagatgtaaggagttagtccttgctccagaggtaagtataatcctcttcctagtgctaggccctgcctggacagataggaatcccttctattgttaaacagcaatttcttcagcttctctcagctctttgtttcagtattggtaactctttggcatagaaagttcttccttgcttttagccaaagcagttgggttgtttccttgaagtaactggatggtcactaaggagagaaaaaggtcttagaagtcacaatgtaatgtctatgaaggtgaatgataagattaggcaagaaaaggagaggaaagaatatagttcctttcctcagaggcctgcaaatcttctttcccatggctgctatttaactttgtaattgctgaggacattctttgtatttgtgacattctttgtgttccttctttcaggatttgacagagtggctgatgtcaaggagaacaaggatgcagaagaaactcaagatgtatgtattaaaacaaaagaacaataacctgaagggaccatgattctgttattgtatataacacaaggaaatgccccagattctcctttaaaagatataatgtacatattaagtatactagcctttatagttactgctatctacatgtttatcaaaataaaagactatttttttctaaaacatgccacttagattttttttcactcttaaaagtcattagcacaactttaccagaagttacaaccaggagtagacgggaggcctggaaggctttaagatgaactgattccatcttttataaggtgagatccattagcagatgaaaaactatgaccctaataaagaaattgccattacttaaggaaggctggtagtgcagtgccttggtgttgccctcttttggcacagatatggtaatgggctcctaagaagtcaaggagtcttttgagaggtacaaagggctgtgggaatccatttctcctttgtgctatgtgatttgggcattcccaggtaaaattgtgaagttgccagagtatgtattaactttagctttcttcctttttcttctctttggagttgccatctttggcctttatctgtttgatggtgtttcttctgctgagtatgatcttcccattgatttcttacactttataactcaatcatctagtgtccatagagtgaatttgctaatgttatgatagctgcaatttgttatttacttacttgtgcttgaaatacattgtttaaatcctttatcaactctgtgaggtaagtactattattatcccatattacagatgaagaaatggaaggctagaaagagtttaccccaacaaacacagccacaaaatggtagatctgagcttctaagtcagatttgattccagagattatgttaggctatgcaggctttcatgggaactaggctttcctgtacccagtcttcactattctcttcaaatggccaagatcagaactttaaggacaggaagggagaagtttatgaaagggaggcctgtacttaccctttaaatcatgcaatctaatctatacatttcctccttccacttttctccctcttgctacctttctttttcctgtccctctattcccttcatcttcccccttgcattcctcccatcttaccccttccttcctttctttcttcttctaacccactttctgtcctccttcctcattcctttaaatttctgggaggtaatatagagtagcagtccagacaaggactctggaaccagatagactgggttgaaattctaactctgctgcttattagctgcattcatttgggcatataatttatcttctatatgcctcagtttccttttctgaaaggaagttttccttttcctttctagaaagtttccttttcctttctagatggagttaaaatatcctcttgtcctaaaaataggacaaaagactgtcaatgtgaagattaaatgactataaagcacctggcatatagtaagcactcagtgactagtagctattattattggttcagcttttatatttaaaagtagatgttacatttatgtggtacaaaattcaagagaaacaagtgtgtaacagtgaaaaactctttcccatctctgtcttccagacaccagttgccctccccagagataatcagtgttaccacttccttgtgtaccctagcaaaattatactatgcacatgtaagcaatagtatatagttactgcatccttctttcccacaaatggtggtgataggtaataacaccctgcactacttcatcctttttttttttttttttttggcattcccttttggcactttttttattaagataaaattcacccttttaaggtatacaattcggtgctttatagtatatttgtaagattgtacaatcatcaccattatctaattccagaacatttttatcaccccaaaaaggaactctggtcccattagcagtcactccccatttccccttcccctaatctttgttaaccactaatatattttctgtctttaaagattggcctattctggacatttcatataaatggaattattacacatggccttttctttcagttagcataatgttttcaaggttcatttatggtgtagggttactttttatggccaggtaacattccattgtaccacattgtggcacatgatgccacattttgtttatctgttcatcagttggtggacatttaggttgtttccagtttttaactattgttataaataatgctatggtaaacattcatgtacaagttttcgtgtgaacataggctttcaattctcttgcatatatacctatcttggcgtttccaggaattgtcaggtcatacagaaagtccgtgtttaactttttgaggaactgtcaaactgttctccaaagcctctgtaccattttacgttttcaccagcaatgattgaggcttccagttttccacagcctagccaacacttgtttttgtttgtcttttttattatagctatcctagtgggtatgaagtggtatcttatgattttgatttatatttccttagtaactaatgatgttgagcatcttttcgtgagcttactggacactagtatatcttcttggagaatgtctattcaaattatatgcccattttttaattggagtttttgccttttattgctgcgttttatgagttttaaaaatatattctgcatactggacccttattggatttgatttgcaaatattttctccaattctgtgagttgtctttccactttcatgacagaatcattttgcaaaatgaaagtttttagttttgatgaagtcagtgtatctattttttagtttggatccttgtgctttaagtgtcatatctaagaaactatcaactaatctgaggtcacaaagatttactcatgttttcttctttgacttttttgttttagcttttatatgtaggtctttgatttattttgagataatttttgtatatcatgtgaggtcatgttacaaaatcatgcttttgcatgtggctatccagttgtcctagcaccatttgttttttaaaaaaatattctttcactcatttaattgtcttgacacccttgttgaaaatcagttgatcttaagtgaatgggtttatttctggcctctccatttattctattggtctatatgtctatccttatgccagtaccatacagtcttgattattgtagctttatagtaagttttacaatcaggaagtgtgaatccttcaactttactcttcttctgcaaaattgttttggctattctgggtcccttgcatttacatatgaattttaggattggctcatcaatttctgccaaaaggacaactgtaattttgatagggattgcatcaaatctatagaataatttgggaagagttgccatcttaacaatactaagtcctctgatccatgaaactggggtatcttttccatatatttaggtcttctttaatgtctttcaataatgttttgtcattttaatgtataaatattagtcttcttttgttatatttatgcctaaatatcatattcttcttggtactattataagtggaattgttttctaaatttcatttttgaattattcattgcaagtatatatagaaatacaactgatttttgcgtatatatatttttctttttttctcagacaagttagagaatgtgtattgattttgcatcctgaaactttgctgaacttactagatctaagtttttttttagattccttaggattttatatatacaagatcatgtcatctaaaaatagatggttttctttctttctaatctggaatccctctatttctttttcctccctaatttctctttcttagaacctttagtacaatgttgaataaacgtggtgaagagtgaatattcctgtcttgttcccaatcttggggggaaagatttcagtctttcaccttttaagtgtgctgtatgcttttgatagatggcctttatcatcttgaggaaattcccttctattcctagtttgttgagtatttttgacatgatatggtgtcagattttgtcaaatgcttttttggcatctgttgaggtgaccatgtggtttttgtcctttgttctattaatatggtataatatcatattgactgatttttatatgtgaaatcaactttgcattcctgggataaatcccactttgtcatggtgtataatactttttatttgttactatattatatttgatagtattttgttgaagatttttacatctccattgataaaggatgttggtctgtagtgtttttgtttttgtttttgttttcttgtgatttctttgtctgttttttggattaaggtaacactagcctcatagaatgagttaggaagaattcccttctcatttgttttttagaagaatttgtaaagggtaggttttaaaattctttcaatatttggtagcattcaccagtgaagccatctgggcctgggcttctcgttgtgagtttttttaattactaatttaacctctttacttgctatagatcaattttttatttcttcttgagtccatttcagtaatttgtgtctttctaggaatttgttcatttcacctaggttatcttaatttgttgatatacaattgctcatagtattcctttataatcctttttgatttcttaatgccagtagttctccctccaatttcattctttattttactgatttgagtctttttttttttttcttggctagtctagctaaaaaaaggtttatcgattttgttgatcttttcaaagaaccaactcttggtgttgttgatttttctctattatttttctgttctctatttcatttcattcatttctgttctaatttttattactttcttccttctgcttgctttgattttagcttgctcttctgtctagttgcttcaggtaaaagattaggttgctgctttgagatcttctttaatgtaagtgattaaagctataagtttcattctaagcactgattttgctgcatcccataaattttggtatattgtgtttatatttttatttatctcaaagtgtttctaatttcccttgtaatttcttcgttaacacagctgtcatttagaagtatgttgtttaatttctacatatttatgcatttccaaaatttacccctgttactaatttctaattttattccattatggtaaaagaacatatttttgtctaatttcaatccttttaaatttatggatacttgtttatggtctaatatatagtgtatcctagagaattctgcatgtacacatgagaggaatatgtattctactgctgttgggtggagtgttttataaatgtctgttaggtctagttgatttattgagttgtttatgtctactgtttccttgctgattttctgtctacttgttctatccatttttgaaagtgagattttgaagtctccaactattatggtttaattttctatttcttcatttaattctgtcagtttttgcctcacattttttgaaaccctatagttaggtgcatatatatttataattgtagtatcttcttgatggattgaccttcttatcattataagatatcctttttgtctctagtgacaattttagtcttaactctattttgcctgatatttgtatagtcattccagctctctttagctagttttcatggtatatgtttttacattctttcactttcaaccaacttgtgttttttaatctgaagtttttctcctataggcagcatatagttggatcatgtgtttttaatccattctgccaatttctgccttttaattctgtttcatccatttacacttaatgtaattactataaagttagatgtatgcctgccattttatttgttttctatttgtcttatgtcttttttcctctcttcatcaactaccttctgttgtgttaaacagataattttaactttagatttataattgttactctatgaagttctcttttaaatcggatagatggggagaaagacatttttcttaagtaaacattccctctattgatgcaagtctttggttaatttccagagttctgaaaaagttgattctgaatatatttgccagttttcttgtttcttgttgcttttttcttttttcttttctttttgagagagagtctt

SEQ ID NO: 93867 - DNA, 20149 bp, Homo sapiens
  misc_feature (1)...(20149): n = A,T,C or G
agccagtcttggtggcgggcgcctgtagtcccagctacttgggaggctgaggcaggtgaatggcatgaacccgggaggtggagcttgcagtaagccaagatcacgccactgcactccagcctgggtgccagagtgagactccgtctcaaaaaaaaaaaaaaaaaaaaaaaaaaaaaagaatgcagactgaagtcagaattcattgcacaaactcagtgatctagagctagtaccactgacagctttagttattcttatgtataggtagtaagcccaggtatcccaagtacagaatgtgatgtctggggaagagcgttgaagaaaaagtcacaaatctttcagttaatacctctgtgactcagctagaactcatctgtctgggttatcatgaaactcaaatgagatgtacacttgaatgaactcaaatgagatataggcttaataaagatatgtactcatatatatgagtatataattgcattaagagccaaccataatgatgaactacaatgagctattggcaccttcccctaaatcagtccttagagaatcaattggagtttgaggaaactaataattccagaagaggtggggggkgggggcagatagggagggagagagagagagtaggaagagaaagaagaaaagaagacatgaaaatggagaaagaagagggatagggaggaagaggaagtggaagaaggaagggaggaaaggaaggaaggaaagaaggaaggaaggaaggggaaagagaagggaaaggaaagggaaaagaggggaaggggaaacctgagacactcttagggagatggaaagctccatatcctccaacaggcctctgccaggaccctgcttcatgtcaactccactgcctctatcccctcaggagttcccagaggctctcctggagtccaaagtctcacccagacatccccatcctttgcctcttttccaccgactttcactctgctttttccttctccagtgaaattagaatgtctctaacctgccttaattcagagaataattgtttagcatttcccctgctgaactatggttgtgtttaccagtgtggtggcttttctcttaacttcctcaaatttgatttctctaagcagatacttctcttgcaggaaaactcttgaacgtacgacaaagaattataaaacctactgaatctccagattgccaagtgaaacacaatggttgcctcttcaaatatatcccctttaattactaatggttggatcaaactcgttgatttatgtcttcaataaatgattcttagcagaaaacctggctggcaaacatttctcttgattaataagaatctttaaaaaatatcagatattctattttctcatccccaaactacttgactcatgccatgggttccctctgttcttacacagattgtaagcaaatgaccacaaaaatctaaaatcttagtaagaaaagcaagctttctggtgtttttaacttgccctgtacccattctccctaccccaactctgctgtaggcttaaattaaaccagccttgaaatcatggtggaaaccagcctgcgaaaagacattcaaaggggaagaacaggtttggaggtccccaaaaacaccatttccagaaaatgatcgttatttgatttgcctggcagttccctagagacctcctccagctgggttgctttttggctttttgttttgttttttgttttgttttaacctgactgagagttctctcactgagaactttttccctggggcatctgtcaaaaacaaacagcctcaatttttaaaatttgcaacaaccttaagcagtgataacatttgggacaaacaaataacaacaacaaaaaaaaagtaaaagaaaaagctgagaatagaatgtccatggagcttttgaaaagctctggcatatttctaggaatctagaagaccaagagcatgagcaggtctgtaatatgtccaggagaatctttagaaggccctatgtgctcaccttggctgactttaatgctctaaatagcaagaaatgaagtctaaagcagagttgtaaactgcctgcctgaccattgaaggcatggctcaatacatacagaatacctcggcaaaggcagaaagacttattggttccaagtatttaaaaacactatgtccaatcattagatgaccactaaactaatggaacagagtcttcaatggttacacactaccaagaatacatactttaaaaaattaattgataaaaatcactacacaaatgaatagcaacaacaaacctgggggaaggggagaatctgatttccaaagttgccacattatgttgtttaaaacatccaattttcaatgaaatattgtgacacatacaaagaaacaagaaagtctggcccatacacaagaaaaaaagatcagtcaataggaattgttgccaagaaagctccaatgttggacttactagacaaagactttaaatcagcccaggcaggtgactcatggctataatcccaacactttgggggcctgaggtgaaaggatcacttgaggccaggaattcaagaccagcctggacaacatagttgtcctatctctacaaaaaaattaaaaattatcaggcatgctggcacgtgcctgtagtcctagctacttgggaagctgaggtgggaggattgattgcttgagcccaggaggtttaggctacaatgagctatgattgtgccactgcattctagcctgggtaacagcgaggccttattaaaaaaaaatacacatacatacatgtatacatattttttcaaagagataaactatgtctaaagaaataaagtataagaatgatgtgtgaacaagtagagaacatcataaagaaattatttttttaaatataactttcttgaggtgataagtacaataactaaagtgacaaattcactagagaggctcaatagcaaagttgaacaggtagaagaaagaacaagtgaacttgaagaaagattgacattaaccagtgcgaggagcagaaagaaaaaggaacagagccctggaagcctttgggatataattaagcataacaacataaagataatggtagtccaggaaggagaaggaagaaagaaaagggcagaaagatatttgaagaaataatgactgaaaatatctcaaatttttcaaagaatgttaacatatgcatccaagcaactcagcaaactccaagtaggacaaactcaaagaaatccacacctatacacatcataatctctgtcaaaagccaaagaccaagagagaattttgaaagcagcaaaagagaagcaaatcattaagtacagatgaccctcagtaagattaacatctagtttctcgtcagaaatcatggaggccagaaagcagtaggataacatattcaaagtgctaacagaaaaaaaacatcagccaagaattctatatccataaagaaaatccttcagaaatgaagaagagtggtgactcactcctgtaatcccagcacttagggaggctgaggcgggtggatcatctgaggtcagaagttcaagaccagcctggccaacacagtgaaaccctctctactaaatataattacaaaattagctgagtgtggtgttgcatgcctgtaatcccagctgcttgggaggctgaggcaggagaattgcttgaacctaggacgcagaggttgcagtgagccaagattgcaccattgcactccagtgtgggcaacaagagcaaaactccatctcaaaaaaaaaaaaaaagaaaaaaagaaaagaaaagaaaaaaaaagaaatgaaggagaaagtaagatgaccaacaaaactaataaaaaccgaaataatttgtctccagcagatccaccctgcaggaaatactaaagggaatactttaggctgaagcgaaaggacacttaaatccacaaggggaaataaagagaactggtagaggtaactacacagttaaagacagtataaatatatggttttgtttgtaaatcttttattctcctatatgatttaaaagacaattgcataaagcaatagttaataataaataataacagccaggcgcagtggctcatgcctgtaattccagcactttgggaggccgaggcgggcgatccatcgcctgaggtcaggagttcaagaccagcctggccagcatggtgaaaccccatctctactgaaaatacaaaaatcagccaggcgtggtggcaggtgcctgtaatcccagctacttaggaggctgaagcaggagaatcgcttgaacccgggaggcagaggttgcagtgagccaagatcacgccattgcactccagcctgggcaacagagcgagactctgtctcaaaataataataataaataataataacaaattatacgcttgatgatgtgtcacaggtttctgaggctctgttcctctttttctaacttgttgagatggaggcttactgaatttccagtctttcttcttttctaatatatgtattttaggctacaaatttccatctaagcaaggctttagcagtatcaatttttaaaaaattgtatctaagtacagtatacatacagaattcacataagcgtagcattgaatgaggcacctggtcagtactgtttctaagtgtttagtaaatgttttttattactactgtgaattgtcctttgcctcttatgccatagcatcctggcaatggggaggggtttgagggtgggatggtgaagagattctgggattccattttattggagcatttttttccccttgcttctcataaggtgtctgtcggggagagatctgtgtcacttattgcagtttgttgcatgctggaatgctgcagattctggaatgccatctatatcagttgtctggaatttggtttcacataaggttcttgtcttctgtttaactggtttgctgggacttctgaagtcctgatgatcatactgagaaggcagactcaggggtggcgatgctggctgtggccctcatctgctgggccatggtggttattgtgttgcttcttttgctgtgtcctagaacaggggctttactgagccacccatgtcctctgagagctttgcaacttacaaggactgttctcttccttcaggggctgggatgacttgctgatttaagcccctttgttgagatacagaggtattgtcataatgactgggacttgtgttgctcatctttgaggaagatttgtttaggcttgctgttatccaccatatcttttatttagagtagtttgctggctaactcactgggtcctttggcctactgcagattcagttgctacaactccgtcagtgattccgtgtagggagaagtaatgggttgtcatttttggagtcagggttgggggcctggggtttgagaatcagaggtcagaattcatgggttgaggtttagggatttgaggttgggattaggaggttagaagataagcatcaagggctcaggatctagagaccaggtctaggattaaaggattataaatttagggactagggcttgggttaggattggaactgagtagcagaggagttaagattagaatagggggtggtggtcaagggtctaaacaaaaagagaagagatgcaagggtctgcggagagactggaaaaactttcctcgtaagttcccaaaggtgactgggtatcaggaaactattgggaagtggcttcttattgctgcagagacagaagccatgagttggggataaaccttccaagagggcaatacctgtgtaggcagacactgaagtcagttaaatgtgcaagtaagtctttacattgatgacagttatcgtttattttcattcttctcattctcagtgatttccctcaaaaaaaaaaaaaaaaacccaagaaaccaaaacactttttttttttttaaccatctttattcaacctgtcaccaagtttctggtcacctgccacagctgacccccgatccattctccctgtccccatcctctccatacatcacagtacacaccaggaatacccccagttctcatctcctcaccctgggctgcgtcaatagactccagagtaacccaaaccacaccctgctgcccagattcctaatgacacgtgaaaggccgttatgacttgctttcctcatgccctatgcacacctgggctccagccaaggatcctccttcatcaacccccatattagctacgatccttcatgctaatgtatcgctcagagctcaaaagactttgaagggcctgtgccttcgctatcgagcgcttaagttctttgccctccgcgtacttttgacaaatactgggcatcaaccatsttccaggaactaccctrggcaaagaaaataactgggcaaggtttcyatcggtgtctctgctrgcgggcatcgcccccgccgggccgccaccctgaacgagcccgtccggtcctctgggttccgccaccctgcgtagcgctgcgccagcacccggcccagcactccctcccgccgagggcgcccaggccggcttccgagggcgcccaggccggcttccgaggggcggttcccacaagcgagttccggcgcccagaacggcttcatcctctcgtcccgtccgcggcaaatgcatgcgcctggmaaacccgccaccctccagggcaactcacacctcacctcacgccgcggcgcaaccggactaggaccccgagcagggctgcccagggagcgcctgaaggaccctgcgagggccgcaggctatccarcgtggcgcctggtggccgggccctgtgccggaggacaaggtgaacccgcagccggacttctgctgcactggggctccgaatgacccagaatctggggtgggcttaggccccgggtacgaggggtgagggctgcgcggttgcaggcctagagaagtagggggctgggtcgagagttgaggccgtgagcccggggggctggagggcgtggccacrggggtaggggcgcaggtcccggccgcgcgtgggtggaccagggctgggccgccgccctccaggaagcgagtggtggccccctcgagtgctggggtggcagtgtaccgacagctttactttttttttgttttggagacggagtctggttctgtcgccaggctggagtgcagtggcgcgatctcggctcactgcagcctccgcctccagagttcaagtaatgctcctgcctcagcctccctagtagctgtgactgtaggcgcgcgccgttatgcctggctaatttttttgtatttttagtagagacgggctttcaccatgttggccaggatggtcttgatctcctgacttcgtgatccgcccgcctcggtctttcaaagtgctgggattacaggcgtgagacaccgcgccctgcctaaaatttttaattctcatggagtcacctttaagtctaacaggattctcgacttgtcagtttgttgtaaaccaagagtcaagacagccacaacttagctgcgttagtaaaggaaccatgtcctccctacaggccgcgtgttcttgccacgagaacccctagcagcctggccttggaatggctggatgaggtgcattcgttggttcattcagatactgttaagagccagctgtgtgctaggtactgcttacaccttctggtggtgaagacggaactgaagggaacttgcaaggagctgtgagaaagtgtaacgggaagtgagctaagatcactaaggtgggcaggaggcaaccagagaaagcacattcaggactgcgaaaactactcacacaaaggctgtcaagccagaaattctttcaaaactgaaaggcccatgaggttggagctagagaaacttaaggagtgtggggttccagatgaggctagagaggtacgtggggaaccacaagatcatgcagagcctgggaggccgtgataaggattttggtttttattctaagaacagggtgccctttaaagggttaaggaggggaaccatatgattagattttcatgtgtggttcactttggctgctgtgtggagattgtagaggttggcaggacagaaactgggagaccaaagaggaggctgtcaagatgtccagaggggaatgatgatgtcttagagttatggtggtagcagttgaggatgggagaatggtatgggttttgagatatattaggtagggaaaattgccagaagttggtgatcgtgtggatatgaagagtgagggaggggaggtgtcatggatgtctctgtagacagttgctgaaaatgacgtgttaccacctgtggcattagggagagtgggttagctgatcttgtactggttagattgggtgtggctttatggtttgagtggaaaatcaggttgaaagctgtagaaaggacatgaataggagcgaccatggcagtttctttgcttgggccagattctaataccacctttaacatgattgacagtttttaggataagataaatgagaatgttgtctagactctgtccctgcctatgttaatggaagccttctctgtatttgtcgacaaatgattttatatatatacacacatatatattatatatatatacacacacacacatacacacatatgtagtagagtcagggtcttgctttgttgcccaggtcaaactcctggcctcaagtactgatattacaggtgtgagccactacacatggccaaatgagagataatattgagataagattttgagacaaagtctttactcctgcagaggtgataaatttctcacgtataactcggatttcacaattggaaaagacctcaaaattcccttagtccagtttataaaatgcttttatgtccattatatcatttctacaatattgagctcttacaccatgctagacattaggaatacaaagatgaatagaaataagactatataggtttatttagtaaataaaattgatcaagcacctttgtgtcaggcactgtttcagatgcaaaatggttatgacttgttcctgatgttggagttgtgtgttgacctcagtgttaccactgaggacagctgagtgtattaacaggtttgatttgggcacaggagatcctgatctctccataatattagaatagagatggtgtttatccagcagactttttggtatcctggtagcacctcagttgctgtccatcaatcttccaawtctagatttgwtaggagagcactaygggatggaagattttaagagatgaattcrtcattatgaataggccttgtggataggctgtttaggagtataaattgtaaatcctctgtaaaatacaaaaggaagttaggaagggatattggcagagacaggtagtatttaaacttgagtttcttttaatgggtaattccctcataggcttacagttgcactagattgtatactccacgggggaacttgaatgctccctctacaactcccctcccttgatcccatgagcccaaatgggcaattaaaataatgtatatggccttaagatgaaactgtcaggttctttatgagtgtcaggagtgagagcactcgttggcttgcaaggctgcgtggctccaatgtagggaaggctgggagtgccgtcctraagggttcctaatacagctctctaatggcaggagtgagatggcctcaatcttgcgaagccctcaggctctccagctcactctagccctgatcaagcctgacgcagtcgcccatccactgattctggaggtaagaatgaatcctaagtctctaccgcatgccctgggaattgctactgcttcaggtgccattgggccatttatggtgactgacaacacagacttgtgctggatgctgtggaggcaaagctagaagccatgaactctgacctaaggagactaagaatccattggagacttgaggcagacctaaaatgtaagaaaggacccaaagcaataatagaaccraatatcaagacaatgtgtatttgttagtttctattgctacataacacattactccagacttgagagcttaaaacaacactyatttgttatttcacagytcagtagtttagaggtccagtaggcttggctgagttgtttgcttaaggtctyacaaggccaaagtcaaggtattggctgaccaggtccttatctggagggtctgggggaagaattcacttccagactcattcaggttgttggcagagttgatttcttatgatggtaggactgaggctgccatttccctgttggccttcaggcaggaactcctttcagtttctagataccactcacatcccycatcacatggcccagtctgtcttcaagacagctgcagtgcattgaatccttctcatgctttgaatctctctgacttcttcagcctctagccagagaaaatgcctggcattgagaagccttcacaattctaatcccacagggctcatgtgattaattaggcccacctggataatctcccttttgattacagcagaatcaactgattagtaaccttaatttccctcaaaatccctgttgttatgtaatgtaacataatcatattgcatcatattcacagtcctggagattagggtgggaaatcttggtggggctcggggtcattttcacattctgtgtaccatagtttgataaatactaactgagtagcactgctaagtaagcccactatggtgcagaggaagatctaagcagtcaggagtgggggcctggaagtggcaggactcagctgggcctcaaaggaatggtaaactttggttagtgccaggagaaggacaggtgttgcacagaagggagacgctgaggcaggaatgcatgtgatgggtctgagggccgcaggcagcctgcgatggtgagactagagaattggtacagagtaaggaaagtataaccttgagcactgggctaaagtggttgtacttcattccttgaataacaggaactacttaacaccttctgaccagagtgtgacgtgtcaattatagagtttctcatctatcaagtgtgatggtttggagggagtgagagaaacccaaggcaggaccactaacaagacttttatggtggtctgagtggtgggtcctgtggtcttgagctcaaggggttataggtatggaagagcagagacagcgcatcctatcccctttcacccaaggygcacactctggctgtgtgactgaaggtcttcacctcaccccacctcgtcttctcacccttcaatgggacaaaccctcaggtcctgagcaacaagtggtcctcatggtttcttttggtcagtttcagtctcctgattgatttttattttggggatggtctttattcaggctgttcatcagcagattctaagcaacaagttcctgattgtacgaatgagagaactactgtggagaaaggaagattgccagaggttttaccgagagcatgaaggtaggatcagtagtcctctgaatggaaggtgcctcaatcccaaraggccataagagagattttacctggaacacaatggcaggctctctgacctaccaaccgtgtacagttgcagccagttttctaaaatcttggtttaaaacacacacttttcatgattatccatcttttcccaaggagggttctaccttgtagtcccaaccagaaacttagttttatgtcttgataatatcagtagttaacatatagtgaatgaatgtttaccatcagacattgtcctaatgctcattttttcattcaattttcccaacaaccctaaaaagtaggtgttgttatatccctcgtacgcagattaggaagccaagtttaggaggttaatgatttacccaaaactacgcaggttgtaagtggcagaccctggattcagacccaggtttgtcagactccaaggtccttgttcttttctctgaaacaatttttattattctaggtaaggaggtagaagtacagaaagttgccttgggcaccaggatgaaggtatcttgatgaaggtcctctctctttgcagggcgttttttctatcagaggctggtggagttcatggccaggtacttcaaatttggttccagcatctttatccactgaggctaatctcccctgcccctaaatggatttgttcatttcactgccattctttaaagttgtaatcaggccaggcacggtggctcatgcctgtaatcccagcactttgggaggctgaggcgggtggatcacttgaggtcaggagtttgagaccagcctggccaatgtggtgaaacaccgtctctactaaaaatacaaaaaattagcccggcatggtggcaggtgcctgtaatcccagctactcgggaggctgaggcaggagaatcgcttgaacctgggaggtggaggttgaagtgagccaagatcgtggcactgcactctagcctgggcaacaagagtgaaacttcgtctcaaaaacaacaacaacarcaaaaaattagccaggcatggtggcgggtgcctgtaatcccaactactcgggaagctgaggcaggagaatcacttgaattcaggaagcagaggttgcagtgagccgagattgaaccattgtactctagcctgggcaacagagtgagactccatctcaaaaaataaagttgtaaacaatgtcaaatctgaagaaacacgggtttggggctgtcactgagccgatgctgacctgttaggcacctgtcctctggtggttagaagagtccccttgaatgctgcatagccaccctgctgatctctgcaggcttgatgtacaccagcaggggccctgcatcacctatttgaagcagcattggtactcagctggaaaggcaggaaaactctcagaacgtagagtgtgtttttattcaggccctgctcacagcacaccctcctagtctagatggccaggttctttacatgtgcttgttttgttcacagcgggccaatccgagcctacatccttgcccacaaggatgccatccagctctggaggacgctcatgggacccaccagagtgttccgagcacgccatgtggccccagattctatccgtgggagtttcggcctcactgacacccgcaacaccacccatggttcgggtgagtcccctgtccatagccataggatattttggggttagcgggcaggctgtgtggtagagttgacagccaggtccctccagtgagctttcttccatttgtgtttctggtctttgtagccatgttggcagatgtggcctgtggactttctttacatgccccaggactgaaggggcaggcagagtagaggctcaggattctgaacctgattatgactgcctcttgcttctaccatgtgagaaccccttctctgtcttatctccccttacagactctgtggtttcagccagcagagagattgcagccttcttccctgacttcagtgaacagcgctggtatgaggaggaagagccccagttgcgctgtggccctgtgtgctatagcccagagggaggtgtccactatgtagctggaacaggaggcctaggaccagcctgatgmaggtctatgaagaccagtggtagtgcccagacttctcctagacatctagtctaaaacattctcctaggaccagggaagcctggsttacagtgccatttctgctgggcaccaccacctgcctgagggcctagctcaccacagcacatcctccaggatctagccttctatctacctcttctctggaatgtttatggtggttcagaagaatgatgactcctctttgctgagaactgttcatccttcttcaagaagaagcttgccaggccgggcacggtggctcacgcctataatcccagcactttgggaggccgaggcgggcggatcacaaggtcaggaattcgagaccagcctgaccaacatggtgaaaccccatctctactaaaaatacaacaattagccaggcatggtggtgcatgcctgtaatcccagctactcagaggctgaggcaggagaattgcttgaacctgggaggcagagggtgcagtgagccgagatcgtgccattgcactccagcctgggcgacattctgtctcaaaaaaaaaaaaaaagaagcttgtctaattgacttgcctaaaaaatgcagtgactccaaacaacatttgacctgtcttcctcaataaaagtcagtgttctcctgaatcctttatgctgccacatttaggggaaacttttcaggcttcatcattctgacttctcagcagcattcagttattgcttcattctccagaaacactctcttctcttggattttctgatcccacacccttggttttctccttctgtgtgtttttcttcatctcctttatcagcttatgcaaacatttattttcataaattctctattcaagacatactgaaaaatgcaaagatggttaagacatgattgggtcctcaagttgctaattatgaatttgggtggtcagccagctataacgtggcagagatggagaagtgccctaacagaggtataaagtcctgtgggagaacagaggaaagaaggtttcctttggctgggtgaggaggtgaaggagatagggtggaaagtcttttataaaagatatagctggctttggaactaagcctgaaggtcaaatagggtatccatagcaggggtctggggcactagacagtctgttcattttcaggaatatatgggtcagttttgtatgtgtgacctaagaaacctgtgacacttcttacaggtcttgacttttctttctcagtacatgtgtatttctctttttggtggccttgaaacctttgagttgaaaattgccttcaccatctgccactttcactaatggtagaccaggaaatttggacccactgaacatagagaacaactagaaaagctgtgcaaaatataaacagcatctatctgaaagcatcagctggcaatatagaaccaaaattcaggacacgaaggaaactcaagagaagtgagcctgggacttagagctacttttcccataagggcacctgctgattctggaagaggcagctaagaagctgagtagaactttcaacaacttcttgtgttagggagccagcttcatgaatgctggcagaaaacacaggattacttgggcagagactactgctcagggcacagcaggcagtgtgttagccttggtctcccttgccctccaagtcccacagggcaatactggcaggcccaggaaagtgttacacactgcaggtttgcatgacggctaaggaaccacaatcttagggagatactatctctgtcttctaaggccatttgctgtacaaaaatccttgaaatacctgggcacagtggcacacctataatcctagcactttgggaggctgaggcaggcggatcacctgaggttgggagttccagaccagcctgaccaacatggagaaatcccgtctctactaaaaatacaaaaattagccaagcgtggtggcgcgagcctgtaatccagctactcgggaggctgaggcaggagaatcgcttgaacccaggaggcggaggttgtggtgagccaagatcacgccgttgcactccagcctgggcaacaagagtgaaactccatctcaagaaaaaaaaaatccttgaaatagtctggaacaaaatctgtcaacatctcagcccacaaagtatcaacaaaattgatattttgttgcatttaaaaaatttaaatggtggtcaaagcgtacaaaatctgacaattaagacacccacaagagacacagaattatctcccaataaaattgtctcataaaaacctggctcccacaaatatggaaagggagaaaactagaataaaccctgtggtgtcgaattggagatatcagtgtgaactcgtgtatttcagtctatagagatagatgtaaatatgtttttgtatgtatagtcctttgcactgatgtgagagcaatgacactccaatagtaatgaccacacccagcacccaggtccaccaaaagacaaagtgctatggactgaattatatccccctaaaattcatatgttgaagccctaacccccaatgtgatgatatttggaaatgggacatttgggagataattaagtttagatggccaggtrtggtggctcacgcctgtaatcccagcactttgggaggccaaggcgggcggatcacaaggtcaggagatcgagaccatcctggctaacacggtgaaaccccgtctcttctaaaaatacaaaaattagctgggtgtggtggcacgcacctgtagtcccagctacttgggaggctgaggcagaagaattgcttgaacccaggaggtagagtttgcagtgagccaaggtagtgctactgcactccagcctgggtgaaagagcgagactccgtctcaaaacaaaatgaaacaaaacaaaacaaactattgcctatagcaaaccaattgtagcctgggcaacatagtgagaccctgtctctataaaaactaaaaataggctgggcgcagtggctcattcctgtaattccaacactttgggaggctgaggggggaggatcacttaagtccaggagtttgagaccagcctgggcaacatggtgagacccctgtgtctacaaaaataaaaataaaaaacttagctgggtgtggtggtgcatgcttgtgtcccagctacttgggaggcaaagtgggaggattgcttgagcctgagagattgaggcttcagtgcagtttgagccactgcacacactccagcctgggtgacagtgagaccctgtcttaaaaaaataagagtatgacatgagcatgtgagagcaaaagaaaacaaggaagtctgcgaccatgaagcgaatgcttagtctctgatatcacaggcttaaagaaaatgataaagacctaaaaagaaaagaaatatcccagcatgctgaaggaaagaaaagttccccaatacccttcctgcttatttttccaatatattacacagctgggtccaccttaccacgtcctgtttgattccagcgttaccaacttttctattggagccaaataagacatactgcaatcagtgatgaactgtctatatgccaagtgtatcccttgtgtaactgtgtaatggctgaaactgagaaattggggcgaagtatcaagtggcttaaaggattgccaaggatccaaaatttgaacgattaccaaattaccacgcacaggaaggaatctatgcagatgactgcttagcacagagagttactcagcataagtgttgtagccacgaacctgggaccttaaaagaagaatcctaagattcttggagttcctatcatgtacatttctaaccatagatacaacatgggaactgatgtcagatgattatggagccccttggttctaattcttgcccaagttcctctgcctttcttccaccaactttctcttgttgccagttcattaaacatggaatagaatgttattctgttcaattcatttgccctgttatcagctgaatatggttaaacacactcaatttttcatgctgttttgaaattgatattttgttgcatttaaaaaatttaaatgatggtcaaagggtacaaaatctccgacaggaagaatccattttataatttttttgaggtctgttgcacagtgtggtgaatatagttagtagagtattatacatttcaaaattgctaagagtaaatttcaaatgttctcactacaaaatgctaagtatttgaagtgatggatatgttaactagctcgatttaattattctacattgtatccacagattatgacatcattttgtaacccataaatttatacaattataaattgtcatttacagtaagaaataatttgttgcatctttttagaaaaataaaataattttttacatctgtgtagttcaggtaaaaaaaaaattttttttaattttaataaaataaaatttaaaataaaataaaaatggtggcacatgcctgtagtcccagctacttgggaggctgaggcaggaggatcacttgagcctggaaggtggaggctgcagtgagccgtgattgtgccactgctctccagcctgggtgacagcgagatcccgtctcaaaaaaaaaaacaaaaaaccattgtatttgtttctggtttactcttcttacatttctttttgaaaaaatgtgtttccccttcctcctcacacaaaagataacatacttcatgatactcctttgcattttgtcttttctttaaccctgaaatataatctagaagtcacttcatataagctcataacagtcttctttattctgtgttttacagctgtgtaatattcccatgtgtgggcataccataatctgttcaataacaggcatttaaatggtctccaaaattttcctattacaattaatttcacattgaacaatcgtgaacatgtgttggttttcccccatctttagctgtgcacactagttacctattgctacagtattgctgtgtagccactccaaaatttagacttaatcatcttttctcacaggttttcagatgaagactaggtgtggggcatctgtgagctcaggcgggagctgtaagggaggagcagccaggagaaaagagggaaggaaacaccgagtcttgcacccatgtctgaaatcattctccggtgtgtctgcggctctccacatccactgctccatcctggcccaagcgaccttcatctcttactggatctcaagcctcccaacttgtctcttccactctcaccatccaccccctccctcaatccacctttccacacacattaaaaaagtgttattttttaggcggggtgtggtggctcacgcctgtaatcctggcactttgggaggccgaggtgggcagggcagatcacctgaggtcgggagttcgagaccagcctgaccaacatggtgaaaccctgtctctactaaaaatacaaaattaactgggcatggtggtgcctgcctataatcccagctactcgggaggctgaggcagaagaattgcttgaacccaggagacggaggttgcggtgagctgagatcacgccattgcactccagcctgggcaacaagagcgaaactccgtctcaaaaaaaaaaaattatttttaaatgtccatctcttcaggtcacccccatttaaaactctccactgcacactgaatactaagaccggcactcccccacagcactcttcagtgtcctctctcaccactcacccactcctagtgctggagcttgatggacgttctctacctgctagggtctttacccatgaggtccccctacttcctgcctggctcattcctgtttctcctttaggtcccaacttaaatgtactttccataggaaggccttcctacatcctgcagtccaactaggttctcctagtaatttactctgtcatgcagtgtatcatgctcttcataacatgtaccaccattgtaattaagtcatgattcctatctttttttttttaaagactggtcaagtgcagcagtgagaaaggggaaagagtagaacaaggcattcaacctgtaactaactgtgaacaattgagataactcactaccttcagaccagcctcatagcttatttgtttaaaatctggctttctgaagggaaaacaaatttcattagtgcaaaggctgttttcttcatgcctgtatccctgtcacccagcacagtaccaggcatattgctcctttattaatggtaatgaatagtatccatactctaatctttgacattattagaattcttccatctctaaattttttttttcttttttttttttgagacagggtctcactctgtcacctaggctggaatgcagtggcgtgatctctgctcactgccacctccccgactcaggtgatcttcccacctgagcctcccaagtagctgggactacgggcatgctccattatgctggacgaatttttgtattttttgnnnnnnnnnnnnnnnnnnnnnnnnnnnnnnnnnnnnnnnnnnnnnnnnnnnnnnnnnnnnnnnnnnnnnnnnnnnnnnnnnnnnnnnnnnnnnnnnnnnnnnnnnnnnnnnnnnnnnnnnnnnnnnnnnnnnnnnnnnnnnnnnnnnnnnnnnnnnnnnnnnnnnnnnnnnnnnnnnnnnnnnnnnnnnnnnnnnnnnnnnnnnnnnnnnnnnnnnnnnnnnnnnn

SEQ ID NO: 93868 - DNA, 14120 bp, Homo sapiens
  misc_feature (1)...(14120): n = A,T,C or G
ggggcgtaagatttgtttgctcaagttccacaaattgtggaggcagaagttcaaatattgggttgcaggactctggtagggctggagatctttccatcagaaggtcaacaaccatcatgtgaacacattatctctatttgtccgaacggactaggctatgctgctgtaacaaaccccaaatacccagtcttaacataacttttcagtcatcgaggcttctttgggccctcagtgattctctagggcgattcgcttctaagtggtgactcagggacccaggctgcttcctctttttggccatatacaagaaatgtggctagttatgggaaatgtggtagagcaaataggtattttggtgagcagtaaatgtttcttccatgttaccttaacaaaaggcatcttttttggagaacctattcaagaagattgaaacacatgtttgactccacaggccctccttttccaccacacagtaaagcctacagtccatccttctgtgccttggatgattaaaaaagtcaaggcaggttgggcacggtgggagacacctgtaatcccagcacttgggcagatcacctgaggtgaggagttcaagaccagcctggccaacatggcaaaaccccgtctctacaaaaaatacaaaaattagccgggcgtggtgatgtgcgcctgtaatcccagctacttgggaagctgaggcaggagactctcttgaacccagaaggcagaggttgcagtgagccaggactgctgcactccagcctgggagacagagtgagactccgttgccaaaaaaaaaaaaaaaaaaagtaaaagtcaaggcaaacctaaactctttggtgaggtatgatgcagtttggatgtttacattagatttagatgcaacttgacatattttattgtattataagctctttgggggcagggaccatattgcattcatatttgtatctttcctaatgccttgcacacagtaggtctttaatatagcttatatgtttatatatacataaatttagcacatatttatggaacaaaacagacagtctctgccctcatgactataattaaaataccccaactggactcagtggctcatgcctgtaatcccaacacttggggaagctgaggctagaaggtcgcttgagttcaggagttcaagaccagcctgggtcttgaagtaagacctcgtctccactaaaaataaaaaaactagccaggccccatggcacatgcctgtagtcccagctgcttgagaggctgaggtgagaggaacacttgagtctgggaggtcaaggctgcagtgagcagtgatcacgccattgcactccagcctgggtgacagaccaagaccctgtctcaaaaaaaaaaaaaaaaaaaatccctaatcataacttaaattagtgttgggtcttgccatttgtaatatgttttagctaccttgatctcattttagttatgaatgttaaaaattgaaaatatagacctaggtgttactacatatgcttttagaatattaaatcaatttttttaaatatagactgattagcttggacttctcactaagttaatttctcaatttgtagtctactgacacatttatttcactcctgtttcatagcttatgcatccagatatgaaactgcaagtatgcagtttacagctaacaagataatatattgctgtgcttatgttacacatatacccaaaggttaaacacctttctgatcatacagatagatttgtagacttttaacaactttcttgaaaaatactcgcccaaagacagttgagggacaatataaaaatataagattttttttatattttatatttaaattttattatttatacttatttgtattttatatttaaatttattttatatttttaaatttttcagtttacaaacacaaggattttttttctgatcttttttggcccgcctttaagatatttcgggttttataacaaaataagaattttggcttaaaagcaatttttaaatttttataaaacatttgtatgaacaaaggaatatattcactacagaaacattaaaaaatagaggtgagaatccatttatgtttctcccttcctagccactattagcatttcagtgtatttccaaactggctatttttagatgaaagaaaatgtgtagttgtctctgcctattctcctgcaaggttatttggtctaagaatattttttaaagtctttttgggtagacatttttcatttagctagtattttagtgattatatttcatgcaacagctgtgaggtgaaggttcagaagaaaccagggaattcgtttggttgatggtaatttacattttctccctagtgggatgggaaaaaagacttaagaaaaatttaaggaagaaacagaaaagagacatatgtagtggtcctaaatataaaacacgtaaactgaatgaaaaaaaaattacagaacataaaactgggggtaacttatttttcttcctaaataattaaagcaaaagcttgtgtctttttttaaggtcctgattttcctaaatattcaccagagtaaatagctataattaggattcatcacacgtaatcagtttccaaattatttcatgaatacattatctgttgcatcaagcctccctttttcctcacaagtcgatcttcaagcctgttgaagtttcacaatggtcctttaaatcagtacttgtagctcacaatgtctgtatgtccagagtactcatgtctggctccctttgatctattaaatgttttagttccatatcttttgggcatttaaatcattttgattcagcatgtgctgtgaaggtagaagtatttcaggagccctctcgctgcatgttaagtgctgttctctgactcccagccagagcttggatgttggcagggttgatggctcaaatgtagtgatttcatttccaacctttgcacactaaaattacatagcctaaacacaaaacttccagattttccctcttagaagcacaatttaacattgccataaataaaacagtctttaaaatgggaagaaatttgaaaataaaattgtaatgcttccacaataaaatattggggatattaatgctggtttgtgaggtttggtagctgcgaaacctttaaaaagttattgttggagtatttaatttttcctacttttattttttaaagagagtgggtgtcttaggttgggctgcccctaaaacggaccctgagtaaaggatatgagggcaagtggttcatttgggaggtgatgccaaaaagaatgagtaggggagtggggatataagaaagggaagggaaggaagctagcaacggtacagtttctagccggttgctgctgtgggacctcgtgctcaactctaatggagaacctagagataaagtgtagaacacacctcagagatatcccaccaaagggccaagggaacgggttattattcaccaactcccatctatgtctagccagaagctactcacaggggtgttaactctttgccacttccagaccacctccaccgtgagtcatgagaaaaccctcaggtgtagggttaccaacatttgcaggagttgccactggcgcatactggaatgctgagtgccaaagccatacagtgtctgttcaaggaaggttgttacgagcatgggtttcgagtcacagacacctcatttaagtcctgcttctgccacttatatgtgatagtgagtgaatgacttaatcagtctcagcatctgtttctttatttgtaaaagaaaaataatactagaacctacctactaggccttttatggccattgtaagtatgaatgagatactgtgtgtaaactgcacacaaggtgagtgttcaccgtatgtatcaaataattggctcaaatggacatgagagagtaagtcagcaaattttatctgctaaacttttgtggcagacaactcccgggtcgcctgccagggtcacactttcttataatatgggtttcccctaataatgtctaaattatgtgacattggtctctggcaggaactagggtggacatcaggaccagtccaattctttggaaccaggagggtactatgaagtctagaacagagaatcactgagcctgggtggctttgtctttgtcaagtcacattaatggcaactattttaggaacttcagccaagggcttgaagcaggactagttccctctcattgacctttggttgttctaaacatccatgaggtaatttacatcctttcaaaaatgtgcctttttgctaaagttagaggatttctgttacttacaaccaaagaatcttaaccaataaaacccatctgttttttatttttgtttttttttagagctgtattttaggctgaagcgtggtagggcaatcatgactcactgaagtctcaaactcctgggctcaagtgatcctcctacctcagcctcccaagtagctaggactacaggcatgcgccactacacctggcgaattattattactattatttttgtagagatgggtcttgctatattgcccagactggtctcaaaatcatggcctcaagcgatcctaccacctcagcctcccaaagagctaggattacaggcatgagccactgtgtccagcaaaaaccaatctgtttttattttattttattttattttattttttttggagacagagtctcaccttgtaacccaggctggagtgcagtggtgcgatgtcagctcactgaaacttccacctcccaggttcaaactcctgagtagctggaattacaggcatgcaccaccacgcctagctaatttttgtatttttagtagagacagggttacatcattttggccaggctggtcttgaactcctgacctcaggtgattggcttgcctcagcctcccaatgtgctgggattacaggtgtgagccactgcgcccggccccatctgtttttaacctaataatttaattaactgctggatgctctcttcttttatcaatatttttatataaatataatatttcttggtattttatacttgttcccagagctagtaaaaaacaaaacaaaactcccacaacctttcagtcctttctgcagttattttgctgactgactatgcaaagcgtagaatatacagtcataactaaatggatttcaatctcaggaaggtgcccaatatgtaaacaattaactgtaagcaaatcaaactgaaaatttgttctttcatggccttggaatgagataaatctaacagaagcagcttctaaaaatataatcaagatgatcttgtatcttttaaaaaataagccattattagcaagatccttctctccttctgaagtgtgggcttcccttcaccgtagctatatgtgcctccatttcttagtaaactcatatctttctattctgctttcttaatcctcttatctatttatccagcaattaagtcaactgatacctatttagtgccaactgggaattgattgtggtaggtgctagatctataatcataaaacaaaacaaaacaaacttagttcctgaccttaaagagcctatgatctcatagtgagacaaatattaaataaataagcattaaaaaatacctagtctccgggcacagtggctcacgcctgtaatcccagcactttgggaggctgaggtgggtggatcacctgaggtcaggagttcgagaccagcctggccaacatgtgaaatcccatctctactaaaaatacaaaaattagccaggcatggtggcaggcacctgtaatcccagctactccagaggctgaggcaggagaatcacttgaacccgggaggcagaggttgcagtgagctgagatcgcgccattgcactccagcctgggggacaagagcgagacttcgtctcaaaaaaaaaaaaaaaaaaaaaacctagtcaaagtatgtgtcactgcaggctggactcatggtcttaccactgagtttcaacagctggtgatactggtcactggtgtagggaggactgcrcccagtctatgccctggctttcgtagaaaaaggagcactaattgttgtgaattatttaagaggaagttggtaaagcatccttagttgctgataaggttgttgaggaaataaaagacaaaggtggaaaagtggccagctatgattcagtgaaaacaggagagaaggttgtaaagacagcactggatgcttttggaatagatgttgtggtcaacaatgctggaattctgagggaccrttcttttgctaggataagtgatgaagactgggatatcatccacagagttcaattgcggggctcattccaagtgaccctggaaagcatgggatcacatgaagatgcagaaatatggaaggatcattatcacttcatcagcttcaggaatatatggcagctttggccaggcaaattatagtgctgcgaagttgggtcttctggtccttgcaaattctattgcagttgaaggcaggaaaagcaacattcattgtaacactatttctcctaatgctgaatcagggttgactcgattatgcctgaagattttgtggaagccctaaagccagattatgtagcatcgctggtccttcggctttgccaagagttgtgaggagaatgggggcttgtttgaggttggagcaggatggattggaaaattattctgggaccggacccttggagtggttgtaagacaaaatcagccgatgactgctgaagcagtgaaggctaactggaagaagacatgtgacttcgagaatgccagcaagcctcagagtatccagaaatcaactggcagtatcattgtagttctaagtaaaatagattcagaaggaggagtttcaacaaatcatatcagtcatgcaacatctacagcaacatcaggatttgctggagctattggccataaactccctccgttttcttctgcttatacagaactggaagctattatgtatgcccttggagtgggagcatcaatcaaggatccaaaagattttaaatttgttcatgaaagaagctctgatttcttctgtttgcctacctttggagttatcataagtcagaaatcgataatgggtggagaattagcagaagttcctgggatttcaaggaactttgcaaaggttctttatggggaacaatacttgcagttatataaaccacttcctagagcaggaaaatgaaaatgtgaaacagttgttgctgatgtcctagataaaggatctggtgtagtaattcttatggatgtctattcttattctaagaaggaatttatgtgctataatcagtcctctctctttctcattggctctggaggctttggtggaaaatggacctgaaagtcaaggtagctgtagccatacctaatagaccacctgatgctatacttgcagataccatttctcttaatcaggctgctttgtactgcctcagcagaaactgaaatctgttacacgttgatcctcactttgctagcctagcatgttttgacatgtgtacatggattatgtgtacatggattatgtacatttagattttttgccaggcatgttttataatctgtcaagattcaaagtgattaagacttgttttgcaaaaccagtatatccagggcaaactctacaaactgagatgtggaaggaaggaaacagaattcactttcaaaccacggtccaaggacctggagacactgtcatttcaaatgcatatgtgaatcttatgccaacatctgatatttcagctaagacaccctctgaaggtgaggaacttcagaatacccttgtatttgaggaaaaaggtcacttactgccttttaaggatgttgggcgtgagatggcaaagaaagtaaatgctgtatttgagtggcatattactaaaggtggaaatattgcagctaagtgacctgaaaagtggttctggaaaagtgtatcaaaacctggaaaaggttttgctgatgcatactttcagatgaagatttcatggaggtagttctaggcaagcttgaccctcagaaggcatctgttactggcagactgaaggccagagggaacattatgctgagccagaaacttcagatgattcttaaagactacaccaggttctggctgggcgcggtggctcacgcctgtaatcccagcactttgggaggtcgaggtgggtggatcacgaggtcaggagttcgagaccagcctgaccaactgaaacccgtttctactaaaaatacaaaaattagctgggtgtggtggcagacacctgtaatcccagctactcaggaggctgaggcaggagagtcgcttgaacccgggaggaggaggttatagtgagccgagactgcaccattgcactccactctgggtgacagagcgacactcagtctcaaaaaaagaaaaaaaaaaaaaagactacaccaatttctgaagggcacactatattattaataaaaacagaataattaaatactctcttcacccaaatatgcttgattcttctgcagaagtgatcagaactaagacgcagaggaagttacttaccattttcagatgtcagataagttttcagatttttttttttttttttgagacccagtttcgcctcttgttgcccaggctggagtgcaatggcacgatctcgnnnnnnnnnnnnnnnnnnnnnnnnnnnnnnnnnnnnnnnnnnnnnnnnnnnnnnnnnnnnnnnnnnnnnnnnnnnnnnnnnnnnnnnnnnnnnnnnnnnnnnnnnnnnnnnnnnnnnnnnnnnnnnnnnnnnnnnnnnnnnnnnnnnnnnnnnnnnnnnnnnnnnnnnnnnnnnnnnnnnnnnnnnnnnnnnnnnnnnnnnnnnnnnnnnnnnnnnnnnnnnnnnnnnnnnnnnnnnnnnnnnnnnnnnnnnnnnnnnnnnnnnnnnnnnnnnnnnnnnnnnnnnnnnnnnnnnnnnntattttctactattttttaaatgtatcattatttttacaaggaactatatataagctagcatatagttatccttctgttcttagatctatatcttcataataaaaaattttcactcaagtctagatttttagaatttgtgatagcatttataaaagttaaaaggaaaattaaatgaataaaggccactttgatacctttaaaaaaatacctagctaaaaatcatgaaatatgtaatataggaatattgtacattaaatgagaggttaaaatacgaagtcttgtttagattcaaggggtaagaaaaacttctctaagacagtgacttctatgctgataaatgaaggataaggaatagaggttagataggtacaggagaaggaaagagcattctagacaaaagaacagcatatgaaagagcccagaggtaagaaaaagaactttaaaaaggacaagtgtaggccgggcgcagtggctcacacctgtaatcccagcactttgggaggccaaggtgggtggatcacctgaggtcagaagttcgagaccagcctggctaacatggtgaaactccatttctattaaaaatacaaaaaaattagccgggcgtggtggcaggcgcccgtaatcccagctactccggaggctaaggcaggagaatcgcttgaacttgggaggcggaggttgcagtgagctgagattgtgccattgcactccagcttgggcaacaagagcgaaactccatctccaaaaaaaaaaaaaaagggagagagaagctttgtttctggtttcagcatttagatggatggtagtggaattattgatacaaggaactttggaagagcagcaggtttcaggggaagatcaagatacatgggcttgtagttcagaaaagtgatatggcctagagatagaaatttgggagcagttgatatacagatggtatttaaagccttgagagtagaaaacaccacctgggaaaacagtgtcgactggtaagagaacagaaccccacaccaactctgcagaacaacatgaagctaaaggtagaggaggatgccatcaaaaaggcaaaaaggccgggcgcggtggctcacacctgtaatcccagcactttgagaggctgaggtgggcggattacctgaggccaggagttcaagaccagccttgccaacatagtgaaatcccgtctctactaaaaatacaaaaattagccgggtgtggtggcaggcgcctgtaatcccagctattcgagaggctgaggcaggagaattgcttgaatctgggaggcggaggttgcagtgagccaagattgtgccactgcactccagcctgggtcacagaggagacttacctcaattaaaaaaaaaaaaaaaaaaaaaaaaggcaaaatgtttaagaacaaaagaacagccacagaatctggaggaaaaaccacgtgagtgtagagtcagcataaaaaagcaggcagaagaaaaaatttgtttcaagaaagctgtatgctgtatttcatggaatgatgctaagtgacagaatattaaaaaagactaaaaaagtacacattgattcggtcacatggctgtcactgatccccttagactagtttgaagaagtgtttttgcaacttgctatgccctattccaatcatgttctccctgaccaaaaattttaaaaagcgaaaaccattctcctacatttttctttgaaatctatagcattcctactccaaggtgagaaattctccttcatataaaatgaattcaaaacctctttcatttccttcctcaccttattctcacatgacaacctccccatcttctgaggaagatccacttcaaggggaggaacttaaaatacttgttctttctttccatcattacttccaggcaatcataactccaccagttttctgttgaatgaaacgttggttctagcatttgcctctagcattaattcaattatttaacaagtatttattgtgtacttttatcactagaaatacaaagacacagtatttattctcaagaagcttatagatccctagaataagcagagatagtggtatgatatagatataaacaagtattttactgagaggaattacttacggaccataaatatgtataaaatcattgatgactggaccaatggaaatcaaggccacagtaagatgccattttacacccatttagtagacaaatgttacaaagtttgacattgtcgagttttggaggaggagatatgcattcacaaagtctcttgtacactacaagtggagtggaagttctgtggccattttgaaaacactttgacatcacctcctaaaggtggacattcacatgccttatgactctaggtatacagcagtgttggatactttgtctttgtccctccaggtctgctttccgcccttcttcatcctgctctccactaagttgtctgacttgtatggactgcatcaacaggatcccatacaccattgcttctggttgggttagctactggggagcaacaacaggaaaagagggagagtgaggttagggcatttattccaattccctctgtgaggttgctgtggggtggccatatcccttatctgatggttactgtttccctcaaggtagcagagtctacatgactctttctctttccaggtttcagtaactattccccgcccttgttcctttgggcttaggggtagtaactagcaccatgcaccctcacatttgtaaataaatgctcttcacaggtactattgcatgctaagacactgattgatacagtaattgacaccagacctaggttaaaacaaaacaaaaaacaaagaaacttctcaaaataggattctaggactgggttagtcatatattcaaacacttgtgcactgttgtgaatgtaaaatgatatagctgctatgaaaaacagtatggcagttcttcaaaatattaaaaatagcattattatttgatccaccaatttcacttctaggtatatactcaaaagaattgaaagcagggccagacacagtggatcacgcctgttagtccagcactttgggaggttcaggagggcggattgcttgagcccaggagttccagaccagcctgggcaacatggcaaaacactgtctctacaaaaaatacaaaaattagccaggtgtgatagcatgcacttgtggtctcacctactctggaggctgaggtgggaggatcacctcagcccggggaggtcaaggctgtagtgagccatagtcataccactgtactccagcctgggtgatggagtgagaccctgtctcaaaaaaataataaataaagtaaaataaaataaaaaaaaattgaaaacaggattttttatttttttgtttttcagatggtgtcttgctctgtcacccaggctagagtgcagtggcatgattttggctcaccgcaaccttcacctcctgggttcaggcaattcttcctgccccagcctcctgagtagctgagattacaggtgtgcgccaccatgcctggctaatttttgtattttttagtagagaccagggttcactatgtcagccaggctggtctcaaacttctgaactcaaatgatctgcccgccttgccctcccaaactgctgggattacaggcatgagccaccacgcctggcattttttgtttgtttgttttgatggagtctcactccgtcacccaagatggagtgcagtggcgcgatctcagctcactgcaacctccgcctcctgggttcaagtgattctcatgcttcagcctcccaaatagctaggattataggcatgtgccaccatgcccagctttttttttttttgtatttttagtagaggcagggttttgccatgttggccaggctgctcttgatctcctgatcttaagtgacctgcctgccttggcctcccaaagtgctgggattacaggcatgagccactatgcctggcatggaagcaggatcttttttttttttttttttgagatggagtcttgctctgtcacccaggctggagtgcagtggcgcaatctcagctcactgcaacctctgcctcctgggttcaagcgattctcctccctcagcctcccaagtagctgagactacaggcatgcaccaccacatctagctaatttttttgtattttatttttagtagagacagggtttcactatgttggccaggctggtcttgaactcctgacctcaggtgatccaaccaccttggcctcccaaagtgctgggattacaggcgtgagccactgtgcccagctcttccagggatttatagttttggattttacatttaagtcagaaagacaattttcttatgttaaacttatatcttacaaccttgctaaactgaactattagtactagaagtttcctttttttttgtagattccttttttttttgtagattccattttctacacagatgatcatgctatatatgaattttactttttcctttccaatctgtatgtcttttatttctgttttttaattatggtaaaatacacataacatgaaatttgccatcttagccatttttaagtgttcagttcagtaatgttaagaatattcacgtagttgtacaaccaatctccagaactttggcatcttgcaaaactgaaactctgtatcattcaacgactccccagaaacagcccctggcaaccaccattctactttctgtctctatgactttgactactctagatacctcctataggtgaaatcatataggatttgtctttttgtgattggtgcatttaacttagcaaaatggcctcaaggttcattcatactgtagcgtatgtcagaatttccttatttttaatgctgaataatattcctttgtatgtatataccacattttgcttattcattcatccatggatggacacctgggttgcttccacattttagctattgtgaataatgctgctatgaacatgggtgtacaaatatctcttcaagatcctgctttcagccgggcatagtggctagtggaagacaacctagacaataccattctggacattggaacaggcaaagatttcataacaaaaacttcaaaagcaattgcaacaaaagcaaaaattgacaaatgggatctaaggaaaaagagcttctgcacagcaaaagaaactagcaaaagagaaaacagacaacctacagaatg

SEQ ID NO: 93869 - DNA, 24386 bp, Homo sapiens
  misc_feature (1)...(24386): n = A,T,C or G
tgttctcttgccctctgacatttcactcaggatggcctccctaccctcttgccaaattcaaggtctcccttaacatcccttctctcttcattgcaatatctaccaccagcatctattatttctattccatattctaccttgtctttctttctttttttttttttttttggtatttattgttttttcaacaagattacattcctattgttgagggacttttccttagtttggctaaagacgggatccttgtcacgtgaccacaaaagattaggctcccagacaatttgaagggtgagaataatgggatttgttgggtgaaaaggaaaaaaaaaaacaagaaacaaaaaatagggaaacatgaattctccataaggctagggtcctgctagtgtgcttcctgcctcacagtttgaattccagtttccacccaggaagaggaggggccaggctcctccccactgcaaatagcgcgaacttctgtggctccgcccaagtgtgcactcctcccagtgcacaggctggttggagtttccgtgcggaccacttcccacctggctgtctcactataaaaaacatcccctgaatcctgtactcatttcttatcactcactctgttcaacacatagtaggtggccaaaaatactgaaccaagaaatgcttattaagttgaatgttttctctatgcaaactggtcaactaatacatgcccatcatggtcatcagcccccaaagcagcacttctcagaaagactaaatgtcattctattcataaaaagaaaagattcaatttaacaatgttcctagcatgtactaggaaatgttgaatcctctcattttttaaaagccacctttagagaattacatgattgctaatgtaacagaaaaagcttatatttgattttcatttgaaacaaaaaggtcaggttactgcaacattttctctgttgtgatgacatgtttaatacaggacagtttgacctcttattctatcttaatacttttcttttctctaataacacggtgtctataatggtgaattatgatatttagaaatgttttgaaaacttcctcgagtcaagtgagtaattctgaccactgaagatgtttttctgcactaaaataaaggattgcaaggcagttgccctttgccatcatcccagttgactttgaagagcatagtgacatagcaaacatgctttccttcataggacttgttaaatgtgtgtcttgcccatatctgagcgtctccattactgatattgcctcagccccttgagactctggaaaaagaggatgattcgggttagtatttccagcttcacaggcagtatttgctttagagacacatttatttctgaatgtgtctcctgaagaaaaaaatggcacaattttatgacttaggaaaaacacaggatatttagaaaccaaccttttaaagagtgtttgttctaataccacttctgcttgttgttatattctctaacttggtataactgcccttaattccaaacagccttcaaatttgcaaagattgtcttctactgattaagaagttaacgggtattgagttcctggtactgcacagggatttacaaatgtggtccacagtaaaaggcaggaaaacctctcagcagcaaaggctaaaaccccaagaaaggggaattgcccatggcttctgtcattggctattgacactttcagccactgccccaattccatttttctaccatcttgaccaaatagtctgtttggcataactagtatattccatgtcttctcggcattaacacacaggaaaaacgtggcaacctgaattttctaactattatgaaaattatatcttatttggtgagctttaatgaaacacttgcactggaattcagagtacaccagataggaagggctttcctcccccatctgcaccttctttgttggggctggggaaagggtctggctcattcctctccttgagcgttgcctatgtcaaaccagagcaacagaagtagatatttgacacagcagagaaaaggggccatacaataataacaccctagcagtatgctgaaagaagtagtctatactacaagaggcagaagtgtgtttacctaataaacattttacttcaaaggaactgaagaacttaaagccctcccactttctctcactctccctggctctatgagaagaaggtgaggaatctcaatagaaaaacatgattggaatccagtaccttggaatggggctagaggaatgaaagtgtagtcagataaaagggatggagatgggaaaaaaaagagagtagagaatccttgacaacgagccgaggtgacatcagtatagcatgataagcaatttcagaggaaaaaaaaagggttggtctgctccatcctctggtctagatgtatgcttgattaagtagcatattatttcctttttgacaatatgtcttttatccctttaaaacattaggctatagaaaatatacacacaaaaaaggaacaggattcctgcagtggcagttcactagaagacagttcataaatgaaacacaagtattttctacagatgcacctgagcaatagtgcactcatactcttcctcctttttttcctaatatcattattcagtactcagtgccttgcacagcctattttagaagttctctgctctattttacccacttccataatggctgtagatacaagctgagagatcagaaaaggtgtgtgctggggagagtagcaaagagcctgtcccttctttcctatctacttctgccttactgttagtctgcatgctcaaagcctacagattttgtaaagcttttcaaggtgcagaagttatatgtactatcttataaaatgtttatttaagaaaacattttaaaaactctctcattcatatgggctgtaggctgcttgagcagaggggcaaattaaaaagtagaaaacacaacagaaaaacagactggtagaaaaccagaaacagccttctgcagaaggaactgatggttctgaagtctttcctggctctttttcactcactgggggcctgaattggtttctgatgtccatctaaattaaccccttgttactgaaagtcaagacccatttgtaggagtcaaaaagttgttctcctgaaatcctggtgccatgcagctatgcaggagcaggccagagtttctagtgagatgagaacattgatttccctgctgctcacacaactctttttcacactccagaaaaacctgccagaaaacatgttggtgctcagaatcaagtgactgaattagagttaccatgaaaccttatttatttttatgtcacttgctatcattgatgtaaacagagaaaaagctaagaggagaggaagttagatgtcattctaggttgaatcataatacatgaagaatgatcaaagatgatctatgagggatctgcacatgccagtgccttggaaagtttactcatgcctcgggttccaagtaccacagtaattctttaagctcctgagcccaggaccccagctcagcagctcctctgagaacctacaccctggaaactggtacagccgtggctacctgtgggccatgtcagatctggtgccaagaggcatccccttggctagaattttccattgtgaaaaaaaaacccaaccaatctctaccacaaaggatcccaacagctcatgctaccattgcttctgtcacaaacacctgcaatctttgccaggactgacttcagctgataaagctgtacagagattacactgctgcagctgcccactcagaaccaaagctgctgcactcccatccaaccaataccctcacacccacctgcaggtaaaagttttcaccactgaacccagactgtaaagtctggaaaatgtgactactccatcaaatgcacagacatcaaatgcaaggccataagaaccacgaaaaagcaaggaagcatgacaccactaaaagaacactgtaatatttttagtaattgatcccaaagaaataaagaaaaggaatccaaaataattatattctccacaatttttgaaattctactctcttctatatctctctttctaactgcaactgttccaaccagcagggcagatgaggacagaatagataaacagtaactgtgtggtgagttgctgttgcataattaaaaacagtcttttcctaggttatgctgcaaaaacattttgtaggctagaaaagtatttattaactaccaactctgtgtatagattggcgatagacactgaggataccaaaaagaccaaaggaacaggttctgtctttgaagatcttaaaatttagctgggggtgataaacatataaacaaaactagaggtcagttcaaagcaattcacaaaactgtagcctgtgcaatgtgtttcatagcctataagcaagctttgtaatggctccagtcaatggaggatggagaaacgtgcttcatagttacctagtgtcttttgtagtgcccagctctaggtgtcagctgtagtaacacactctttgaatatgtccctggaatatttcacttatattgcatatccatagcatgtccacatatcacctgtatgtcttgcaactctttataaaatctaaccctcttctgagtttccataatacattggaagcccatcaaaaggagagagactttctctgccctggtgttcatacattaagtcttgcacatggaagttaagatggaaactctgcagccagactgcctggttctaattctcattaactgcgtgaaatcagggcaaattattaatttccccatgcctcagttttctcacctataaaatgaggataataatagtatccacctctcaggctgttatgaatattaatttagttaatgtatataaaagcactttgagctggcctggctaatagctgaaaatgcctgttagcttgttttattattttccctttcttcgacagcaagataattctctaacttttggaacgactatatatttttaaattgtattctgtcattccttcttttacaatatctccatcattgcagagaatttatttaccatatatcatgttctagcatgctgtgggaaaacaaaaacaggatcttctgtgggacacttcctctccattcctatgaccaccgctatcaaatctgggccactgtaatcagatcagtttctctaatacctatctctaatgaagccatcctactcaagcctctgtactatttcctaatgaccactagcttgagcttgaacactggttacgtgtctttctccatggattccacctctttttgcttcactctgatgacaattttcctccagtccaacttccttggttgtcagtggagacaccatgcttcttttattcttgtgcctttattctcaattagattctaatttttttattggtaaacaatgatattatgaaaagaacacaggctttgcactgagacctggctctggcactacacagcatggcagttagctaacttgtctgagcccctgttacttcatctataaaagagaaaacgtctagcacagtggtgggcatatagtaaatttgagtttccctcgtttttctgtcatctctagcttctattagaatgctgagtgataaacaggtgtgttggctaaacactcaaggagtatgtaattgcaaaaccaaagaaattcatctaaaagttgcttccttagctccactttctcattgaggctatgggaaacgaagaaaccttccctcttttgttagaatcacagcctctgtttaacacttcctctatactattactaggacaagaactggagtctggatttttccagcaattcctcctgtaatttttatttctgatgtctcagatggagctcccatactgccagaacttcaacatcagctttggaggatatccaaaaggccttttttttttttctttttttctttttagtaaccaggactccatgctgctgcacaaattgcctggcaggagggatatggtgcatgagagtccaaatcttccagctggagaacaaggtgctgcctggctttccatgggcttgcagagtggacctctatggccagattggatttgatgctgcagctcagtggtgagttggcaactacagtgtgagaggatcggcttagattattaatggttgaggctgtgtgtggtggctcacacctgtaatcccagcactttgggaggccaagtgggtagatcacttgatgccaggagttcaggaccagcctggtcaacatggcaagatcctgtctctaataaaaatacaaagttagccgggcttggtggcatgtgcctgtagtcccagctactcaggaggctgaagcaggagaatggcttgaaccagggaggtggaggttgcagtgagtccagttgacgccactgcactccagcctgggcaaaggagtgagactgttgtctcaaaaaaaaaaaaaaaaaaaaaaaagcttgagtctctgatgattcaaagactgggttcctgtgagcagccccaaaagagtccagggagtttaatcttgtgttgctatggtgttgagcctagaaaacttacctagaaaattcgagggcttgtttgtgccagaaattctaggagaaatatctttcttagatgtatttacatgagctgaaaaaccagatatgaggctaaaaggaacaattagaatcattatttgaataaaattattaatattatattaaagagatgcacggtaagtttcaacatagattaatgtaaaatatttttggcactctaccttatttaaaaaacgatggaaagtattactgaacaacatgacacatagatgaatcttaatgggttagttattcttgtgttagtcttacttgaagatactgagaataaatgagagaactcctgatgttttactctagatttattattctgcaggtgatgttgcctggtttaatataacctaaatttagggtcataccattcacagtgggagaatatataagcgttttcttcctctctttttctttctttcttttctcttcatttctttcttttttgaattttgtgacaaattttctattttgtgacaaaaggagattcatgaataattatgggaacgtattattgaatgacaaagtcaagagctatagaaccttggacaacaggatatcctttccaagaagtttttaaaaagcaattaaacaaaatatcatttaggcataaatgtgattaaaaccacattttaaaaagcatggggatcgtagataaagacaaggttcaggatagtggctcctgtgcattggaggcaggggaactggaacacataggctaatctatttaagttactggcaatgttctagtgtttgtgtcaggcagtgtgttcacaagggtttgttgtgtttataaataaataaaatgtttttaaaatgtgactatgcatgaaccaatagataatgtgtctcaaagtaagaatttagatcagtccaatttggtacacctgaggttcattttaaaaaacttttttttttcaaaaataaaataattttggaggaaagaattacacttttcaaacttttttttttaaaggtttcagacatttaaaagtttgaaaaaaagtttaaaaagtttaaaaagtttaaaaaaaagtttaaaagttatttttaaaggttttcaaactttttttaaaggtttcagatttaggtacatacatttttatcactagcgctaaaatcatataaattaggtaagggataatttccccaaaagcaaccagacctagaaccatacactgtggtgggaggcagaggaggagaaggaagggactggaagagagaagtggagactaaattaagaaagaaatggagggtcattccatctgtagatgaagcgtccatctgtagagatggaaaaatgtccagaatataaagtcatgaatcaaaaaaacctattggctgaccgtgacctcattggcagggccattagataagacatgaatatgcaactatctattgaacatctattatgctagatatgagatacagttacacacctcaaagaggcttacagcctgaaggtaaaaggcctagcagattctcagcttcaaagaaaccattatcttccctcatctgagtaaagaaattagggaataaatggggagaagatcagggtacctgttttgtataaatacactggacataagtgtgggaaacttgattcaatttcccatagtaaacccaccacattcccccccctccccgatagtcacaggacttccttccttataatttggaagcagagaacttggtaataaggatgatagaaagctctttgaaatgggtactttccccttcgtatctacaggactcatttaattcacattcttggttgcctgctctatgcaaggcaaacaggcattgaattaacaatgaagacagtttttcccccgtccccccggataagacagtcacctaaagcagtwttaaaaattgagcctgtccaattttattccacccagtcatggcatacctcttgtgaatatttaggtttgcttttgatttgtgatgcctcgctaggagcatctgtcctcgccacttgtgggcaccctccccctttattttgtaatatatattacttaggattggggctgaaggacatctgtaagcagcatgtttctgttcatatacaacaactttactggaactgcmatctgatttgcaataaaacttactttctggtatttactgacttctttagtctgaacaccaattctagtaattaggctgaaaccatgacatgattgatttagagaggctggtgttagctgcttacatcagcgcattctagggactttccatgaaataattttactgcaaactgccatcaccttatagtaggtgaaaaacaatgtccatagaagccctctgacgtacttccaactttgattattcatggtaatgaaggctaggcagacagccctgcaattcccagtggaacatcaagttaaatgctgatggcctaggaatcatggcagccccttggtcagtatgcccaggggccagtttggcattcattagtggtactttctgcacttttccttggatgggagtttagcataccacctactcaacaacccntctatctctattgacctcaaatgatgctgggactccaaagatcaccccaagaagcacctggagttccagctcttagataagcaacgtagcttatcttctctgtggagacatactagcagccctggcattctatcatgggggtagcctgycttcatccccttcctacagcctttctctgagtgtaagtaaggcagagccactggtaaagaaggctccaccggagttgagggagcagctggccaggtgtagaacgtgctgtgtgaggtgggggctcaaaggagaagggacccagcaggcagaggaggcaggtgttccattccaaaggggccaggctgctggctgtgtccctgtggggactccggtgtggagaaagtactttctcttgctctcacttcttattttgtagtgcaacaaaacaatatcatagtccaggacatggcgctagccacttatttaagaattcttattttgtttttttgttttttgtaaagtcactaagaagggattatgtcccagagtgggttggatgttgaaaataactcagtagcttcggcaaagagattgaatctgggagtaaataacatgctaagagatggtcttagatttccaagaaaaattgggaaaacccttcttcaagtaaaagctgatgggaaacattctattaattagtgtaaatgaacaatgtagtttggatcacttgtaatatatcagcaatgccatatacatttaataacacatataaaacaggcatgttttatagttattatttgatcctaaaatggtcctgttgggtactattgaccaggtaaagcaaaacatgaacatcaaagaagttgtatgacttgtccatgaaaaaaaatttcatgtagctaaggagaatggtgaggaaaggcaatgctatatgatggaaagtgctcaggttaaggataagaagatctgctttctaattcaaatggactaactgattttccaacagtaaacaagaaaatcacttacttgctcaagaaattcctcactccgaatgtgatggagtttgagaggattagttgttatcatcgttaacttctcttttgattctccgtctccccatcattggagagttctttaaaatattaagtctcagactccagatttcactggagtactaattaattaattaatattaatctgtgtactgggacttcaaccattgccatttgtttgtttgcttgctggtttgtttgtttctcagctgtctatgtggttctatgctgcagccagcattgagagcccttgaattagattatttctgaggtgacatctagcttttacattctaaattaatttattttccaagccccctatttagggccaggtgttttgaagtccatttgcgtctcgttgctttacctatcacaatgtgaaaacttgatgagaagctaaatggagttgtttactcacaagagcaaagatgggatagaaatatgtgcatcataatcttgcccctcccacgctgtttcctttgatatcccaaaggcccatggaaatgttagtctaatggaaagaaagaactcagttgtataagaagaaaacagtaaattttcattgaaacataatttcgatttaaggaaatgataaaagagaagaaacaactattctttttcagttctaattatcaaaaaattgctggcaagaataaccatcttttaaaaaaagaaatactacaacttaaaatagttcatcttgtcaaaaaaagaaatgatactaattctcatatccttggtatccacaaggtactggttccaggaccctctgcagatacccaaatctgcaaatgctcaaggcccttatataaaatagcatagtaaatgcatataacctacacgtatcctcctgcatactttaaatcatctctagattacttataatacctaatacaatggaaatgctatgtcaatagttgtcatactatattgtttaaatctgtataattttttattgtactgttactatgtatattgttgtgggttttttaaaaatatttttcatcaatggttggctgaacctacagatgcagaacccatagatatggagcgctgactgtacttgttttttcaataagaaacaaatagtaattttaagctatataaatttgatttacaattgattgaagatcctaaaggcccaggaaatatttcacttttgtacttttcctcggcacactaatattaactatctggcattatttgttagatatgatctagccagtgtttggaataatgaaatctacattgcattttgacttaatgtctattttaattctgatacaggtgtagccatccctgttttcatttattatttgcatagaacatctttttactttcagcctacatgtgtccttaaatctaaaacaagtctcttgtagacatatagttsagtcttgtttttatttttttattcattcagcaactctatctcttttgatttgggtggttaatacattgacatttaaagtaattattgataggagggacttactattgtcattttgttagttattttctgttgatcttgcagttcttttgttcttcttttcctctcctgctatcttactttgtgctttactgatttttttaaaataataatgtgttttgatttctttctctttcttccctgtagcttcttttttggagacagggtcttgctctgtcacccaggctggagtgcagtgatgcaatcatagctcacaacagcctcaaactcctgggctaaagtgatcttcttgcctcagcctcccaagtatctgggactataggggtacacaaccatgcctggctaattttttaaaaaaaattattttgtagaaatgagctctcactatattgcctcaggctaatctcacactcgtggtctcaaatcatcctctgccttgggctcacaaagtgctgggattagaggcatgagccatctctcccagccttcctgttatcttctataggtattttctttgtggttaccatgaggctagatagaacatcttatagttgtaccagtctatttttaactgataacaacttaactactgtcacacaaaaaaattctacttttacttctccaaccactcacactttatgttatttatgtcacaatttacatcttttatgttgtgtatacattgaaaaaatttggtagtttttcttttatagttattcttaatacttttgtcttttaacatttatactacaggtgatttatataccacctgtacagtattataatattctgtatttatctatgtatttacttgtaccagtgggttttatactttcatatgctcttgtgatactgcttagcatcattttgttgcaatttaaagaattccctttagtatttcttgagatgcgagtttagtggagataaacttcagcttttgtttgtctgggaaagtctttccctctccttcatttctgaaatacagtttgctggttatagtattcttggttgatgttttgtcatttttttcccagcattattttctttattattatcctctcttctggcctgcaagccttcatctgagaagttcactgatggtctgatagaggatctcttgcatgggacaaatcacttttctcttgctgctttgaaaattccttgtctttgatgtttggcaatttgataataatgtattttggtgtagatttaatcctatttgggtcttttagacttaatgaaactgcagttccatatatctcccaagatttgggaagttttcaagattatttctttaaataaactttctacccctttctcgctctccttctaaaatttacatagtacataaactagtttgctagaaggtgtctcataggtccttagattttctttactatttttcctttttgtttctctaactagataatttcaaatgacccatatttttaaattacttcttctgtttaatcaagtctacaatttaatttgctgaatttttcagtttagatattaggtattgtattcttcagctctagaatttctatttggttcttttttatggttttatttctttgttgatagtctcattttgttcatgtataattttcctgattttatttagttgtctgtgctgtcctgtaacacactgagcttctttaagatgattaatttgaattctttgtcaggcaattcatatatctctatttctttatggtcagttgttacacatttattttgttccttgattgtgtcatattttgctaatttttggtgctttttgtagtttttgttgatgcctgcacatttgaagaaatagccacctcctctaatctttaaagactggcttcagtaggaaaagatcttcaccagtaaacctggttagagattctaggagcctcccaaaccttctctatagatgtgcattgcattctctacttctctctcttcctcctgagggataaattgtagtgttgtgcaccttctctcaattgcaaggagcgatgctggccatggtaagctgccaaccccttttccctagggcagtgcaataaaagaccagggcattggatgcatgcttcactcttctccctcatcttctgggagagaaatgttaggattgtatgccttctcccagtcttgcagaaccatgctggctgcagtaagctgtctaccccatgttttttgttcttagctgtccccaggtgttaaaactatgctgtggtttctttagcactctgagtgaggtagaacagaaacaggtctctcagcaccccaaaagactgagaatgttgggtgcatactcctttctttccctccaagagaggagtcatgggctgaagcaatctttcttgacactgaactgtgccygaggaaggaagtgatgtgagtaaagtgaaattgctcttttgcctagttcaatgtggtattttggttttatgtgaatctgagtgactgcaacttcttaagtgaattttgaacttctcataaagatatttgggttcatatatcaytgttaaattggtgtttctgtggcaggatgagggctaacaattcctattctgccatcttgttgacagcactccaaacctacattgtattttaaagttagcatataatttgctagtcagaaggcagctctttttgtactgtatgtttaacatatagtaatgacacagatactagtaagtgtgttttaagcaggaaacaataaatcagtgtttcttacatttatttttggaacacttcttccaagaggagaggaaatgattctctgtctaaataattgtggaaaacacttgaataaagttatgcaggttactttacagcaagtttattcagcccgtaatatactaataggccttggatatctccaaaggtgagtatgcagtgcagcattctccaaagtcatctcatcccagaaccatttttatgtggagcatcctatgaactaggcatttttagaacaaccttggaaaacaatagactagagagagaaagatgtaccagttctatcatttatattgaattttgctattgtaaagcatttatgttgaattttcttgttgactttttgcataagataatgaagatgacagcagaataaatcattctttctctacttctagtatattgaatgtcttctagaaaaactctcagtagtgataaccttaaatacctgtttgacaacaaagatatcatgaaggtaaaacaaagcaagaagaaaaaagagcacagtttcagaaagaataatggatgcattaaagtaagtcatttgctgaggggcagataagtcagtggtatgttacagtcagaaataatgtaccatgagaggactgaaaggacactcaaacacttgcttaatttgggtaatgatgattatttattcgaagaatgctctatgtctacattaactataaaactgtttttagttatgaaaaatatattcacaaaactaaattgaaactcaattttgttttgataacattaccagtttaattaacacattcacaaatgatgaaattatgggcagcatattttaaattaagattgctaacctaaatttcaagaaatagagacaatttatgcttgttcagaattcagaaaaagcatttaaaactagattatgttactgcatgaaactttttccccactcatggtgaacagagttcttccctagggttgggaataacaaggatgaatgaaatcttccgataattcaaaagcttaattttagttcacagttccaatttccttctctagtaaatcatatcaatactggtaaaaactagaaaacatgactaattttagtttagttatttttccaactcctgctcacacattaatttaatgagcaatgagagttcataaagcatagcacaggagagagaagaggagaaaaaaagaacatcaggaaaaaaatagtctactggctgggtaatcacttcttaaattaatgaagaaagcactggcaaaattggaattcaaaacaatgctgacagagtgaaaagcctcttttaatggtattgttaagatacctactgaaagagtgaccactttttatttacagacccaggctgtttggaaaacgtgcatatgcacactacttaaagtaagggaagcaaccagtgtacatgttgttagtaatgacattctgtggtaggatttttggactattccttatcttaaacaaaagggattaaaggattccagaagagcagtctggacccatattgccaagcaccaagtaagtctacagcaattgccactgaatggatgaaagaatgacaaaatgaagaaatggcagaaagaggggatgctgcctttgatattagttcttattttatgccctagttgttcatttgtgcctaatttctttttaattttgtgaactgcctaatatgttatttcccctaggcctagtatcttttcccctgtcccctattttgccttgctcttgccccctactgatggacttccctgatgccaactgccttcccaaatttccaagttttgcttactcttggatcctcttttatactgtgtcttctctcatctccctgactaccatatgtagggccaatgaaatctgtagctactgatttcctgcacactcatctgttttcttgtccacttccttcctgttgggtctggctccacggtctatctccctgtctccagtttatctgccctaccactatggagttacctgagggcgtacatggttgcctcatggtatctccatggatgtgaacctatttaaacaactagatatttttaagtaaatattaattgcatcaatactatcagtccaagtttgtggacatactcataatccatgaaaagactcctcacatatggccaggcgaggactataactgttgggggagctctatgtgattccaagttcccagaggttctagcttcaactatctggtgtgaagattctcacacacagtcaggctcaggaaccacaggctgtgtgtcatatttttttacactgaactggcttctgaacaccagctgtgattcatctgactaaagcagcttggatagatagcagtgctgtgctgtagtttctgttatttcttacttcagatattctcttacatgttagacttttggaagattttttaaaagaatccaacttttttttttttttttttttttttgagacggagtctgactctgtcacccaggctagagtacagtggtgcaatcttggctcactgcaacctctgcctcccaggttcaagcaattctctgccccagcctcctgagtagctgggattacaggtgcatgccaccacgcccggctaatatttttgtatttttagtagagacaagggtttcaccatcttggccaggctggtcttgaactcctgacctcgtgatccacccgccttggcttcccaaagtgctgagattacagacataagccaccatgcccagcctagaatccaactttttaatgtagaattgtagaaaacagcatggagatccctttaaaaaattaaaaatacagttaccatatgatccattccacttttgtgtgtttacccaagagaattaaaagcaggatctcaaagagagatttttacacccatgttcacagtgacattatttacaatagccaaaaatggaagcaaggcaagtgtccacttatggataaatggataactaaaacrtgatatgtgtgtgtgtgtgtgtgtgtgagagagagagatggaatattacatatataatatatatacaaaatattctctctatataatcactattcagcctttaaaaagaaggaaatcctgacacatgttataatattaatgaaccttgaagtcattatgctaagtgaaataagccagcacaaaaagacaaatactgtatgatttcacttatatgtggtgcttataatagtcagattcatagaatttgatattagaattatggttcccaggggctgggaggaaaggggaatggggagttattgtttaatggstatagagtttcagttttgcagaatgaaaaaagttctgaagatggatagtagtgataattacagaacaatatgaatgtacttaataccactgaactttacgtgtaaagttggttaagatggtcagttttggtcctgagaacgtgagtccacgcgtctggttgcccgtgagtccagccttagcccacgcagctttcagtcatggcctccgtaatcgcgcgcatggcatagcccgcccctgacttcaaggccaccgccgtggtggatggatagcgctttcaaagaagtgaagctgtaggactacaaagagaaatacgtggtcctctttttctaccctctgcacttcacttttgtgtgccccacggagatcatcgcgttcagcgaccatgccgaggacttccgcaagctgggctgcgaagtgctgggcatctcagtggactctcagttcacccacctggcttggatcaacaacccccagagggagggagacttgggccccytgaacatccccctgcttgctgaggtggccagtggcttgtctgaggattacgccgtgctgaaaacagatgcgggcattgcctacaggggccgctttrtcagtgatggcaagggtgtcctttccagatcactgttaatgatttgcctgtgggacgctccgtggatgaggctctgcggctggtccaggccttccagtacgcagaagagcacgcggaagtttgtcccgctggctggaagcctggcactgacacgattaagctcaacgtgggtgacagcaaggaaaatttatccaaacacaattaggctggctgacggatagtgagcttgtgcccttacctaggtgcctgtgctggctgcccaccagtgccgccacctgggtgccctgtgctgacccaggaaaggccagacctgcccctccaaagtccacagtctgggacactggaaggctagaccaaggccgtctcatgcctccacctgggaactagtaaatagtgatgccctcctacaagcccacccagccgcacacaggcctagagttgaccaataaagtataagcgacagaaaaaaaaaaaaggtcgatattctgttatgtatgttttagtataattttaaatatctttcttggtctttggtttctaattccaagatgccatgatgcaatagatacagtgatacagtttgaaaagtcaaaatgaactttttttcttttcctttttttttttttttttttttgagacagagtctcactctgttgtccaggctggagcgcagtggcgggatctcagctcactgcaagctctgcctcccaggttcatgccattctcctgcctcagcctcccgagtagctgggactacaggcgcccgccaccacaccagctaattttttgtatttttagtagagacggggtttcatcttgttagccaggatggtctcgatctcctgacctcgtgatctgcccgcctcggcctcccaaagtgctgggattacaggcgtgagccactgtgctcggctccaaaatgaactttctaacctagagtaaaactattgttgtcagaccttgatcaaatagtataacattcaattaatatcactgaacatcaattatattcaaggcactatgttagatactgttgggagggactgcagggtagaagactgtatgggacagaatctaaggcataggaaaattttaaatctacttgaaaggataaaatatatacactaataactacactttcacatggtatataaaagaggaattacacatcatgggaaaatacagaaggaagagtttgggacctaagtgatggcttcatggaagaggtgacgtctcatctgagtcttaaaggctggggtgcccattgagaggcagagattttggatggccattccaaatggaagaagcagtaagtggaaaaatatgggcagtattccaagaacagggaactgtcagtttaggctagagaataagagagacatagtagccttttggagataggcaggcaaggtgggttgtatctactttgacctcatttgaggcaacaagaagccttagttaaaataaccacaaaaagcacttttaaatacatttttaacatgtaatctgcagtggttatcttagaagagatttgtgcatgcaggtgggatatgagccaggaagctattacaaagctgtgtgaaactcaacaactacttggaatacaaaatcgactatagaaataaaagtaaggggagaggggaagatgttgtaggaggcattagagaggatacggagtggtggaaggagcactaggttgggagtcgaggcaggttctaatctgatttttttagccccttctttgtacaatcttggaaagtcatttgccatttcagagcttcagttttcttaactttaacatttggaagttagacaggacaatttcagtggcaacttttagcactaaagttccaggattccatattgaactgatggtttgggagagtcatcccaagagaagtagtggtgaaagcctaaatcatccaggaggagaaagtcaaagagaagatataagctatcataaaagactcttatctctcttttctgggtatggcaaacaggctatatctcatcaccattgggttgatgaagggaattgacagataaaaatataagaagaagacaaagagaacagtcacgtgcattagggagtcccacatgtgcccctctctaacactcaggctacactttttctcccacaggaagttaatgaagctgagtccaacctgaccaaatttacttgtgcctccccagagaatctgtctgtctcctgcaatggtctgcacagttgtgcgacaacctggactggccataggtttggcaggacggcagcaccagggaggggagcagctgagcttgtgagggcatgtgtctgtttttatggtcctttcctcttggcctgaatgacggcaccatcatcactctggcaggcctggcagcaggtgcaggaccattgtttgtgattcccagctctgcaacaataaaagtagggccagggaaatggcagctgctcagttgagcaaggctgtggtttgtttctagatggctttgcagctgacatcagacacagatcattattgtttatgaagatgcattctcctgtcatttagcattccactgctgaacaaaaagattaaaggaccgaatgaacccagtatttggtttggtactgttcttacctttagtctagaacttcaagaaagcacagtccaaagctgcctaatttgttctatgcacggctgcttttaagctctgctattaatgaactagacttaacagctgctaaagagaatccaaatggccctcacattcatttcatcccaatggcagtaacaccctaccttataatagttttttcccactgttattatagtattaatatagaccctattacatttctcaattgagaattcgtatttattccagtttatgaaaaaaaaagtcattcttaccggatctcaataaaaagttagttatttctgctattttttttttttttttttgagatggaatctccctctgtcacccagactgaagtgcagtggcttgatcttggctcaatgcaaccttcgcctcctgggttccagcgattctcctgcctcagcctcccagagtaactgggactacaggcacgtgccaccacgccctggtaatttttttttttgtatttttagtagagatgaggtttcaccatgttggtcaggctggtcttgaactcttgacctcaggttaccagcccccctcagcctcccaaagtgctgggattacaggtgtgagccaccgtgtcccgcctttctgctattcttaacatcccttttggaacattagtcttaggaagctgtggatttcacagtctgggttgaaaaggatgtactgtaccgtaaattccatatgaacagaaaatcattttctattttgtttattgatgcctagaattggatttgatgcatagtaggtgccccataattatttgtcaggtgaataaaaatgatggctcatgatagtagccaggccttcattgcaatgattgcaggtcagaaacctgttaacatctgttaacaactcttggctaaatattctaattaggacctcttgactcacacagaagcaaagttctctattagcaactatagctgtggtccaataaaagtatgtttcaaaggaaacacccccagtagatcttaggactatttgatgataacaattatgtagaaaaactaagggaagcccagagagttcatgataacatttccatctgggacaattttgctggtggccttgcagacacaagatagaatggggcctggcatacttgtgtatactttgtgttcaatgataacaatatttatatatattcatatataaaataacacccaatgagttctaatgaccatgtgtcctaatgttggttagccacttacattctaaacagagctatatatgagatacaagctatagatatggtgattcattttgtcaaaaaataatttttattgtattgttttgatatttccttaatttaatattagtctattgatttgttttatttcctcccagtacccagcagttcatatccagaaggaatatttttattcgtgcatctttagcaactgattgaaaacaatttttccaacttcacttttgggtggattaatataggatgtatatatcaatttaaagaacagcttaaactttacattaagtggcatttacacaacacagaaaatattgaagtagataaaatgccttcaatgccgtagtttttagtggtgtatagggacacctaaaatctttagtggaagtacagagatctccagaaaagagataactgatatgggataaattagcataccagtctatgcatagatatttcaggcaggatagagaggatcatagttttagtggccaaaatatatgtgttctttactattgtggagaatcaaagcacaaggcattgcagactgtaacattacatagacagcaaggcaacccaagaaggaaacttgttgaaagctaatataattgataatcactaaagaatcaaatgtgactattggaaaagtatatggcgaacaaacagggtcctatcagtacaaccactccaggatgaggagggataaatatggaaatgaataaagtcaaagcactgggtagagcgttcatgcatctgaaagctagatctcggagaaaatgtgacatgaaagcgaacagatggggtaattgaggaccaaaaaaaaaaagaaaatgctgcagggctttctgtgatactaatatcttctgtttagctgagcagcacctgataaattagggcataatttcatctgtataaaatgatataaatccttggaagggaggcatgagaattatctagtaaatatgaagatttccaaaataaggagtacttattttgcaacaggtaatattaggcaagttctaggtcatcaaattgcccttttaaaatattttcttattttttctctgtgtgtgaaacttctaaggtttgacttaaatgctacatttggtattttacctttaccttactgcttgaaaaaaatgggaggactcttaaatttcgaggtaatgtacttcagtctaattaattactaattatatcagaaaacattggagatccagatacattaaagaatttaatgtaaaaataaataaacacatatataaatgaacatatagctgaatacttttgtggttttggaatataaaattacttcttatactgggttgaataatttgatattatttctaaaaatttatgtctacctgtacttgtgaatgcgacgtcatttggtctctgcagattacatctgcagagattaagatgaggttatattggatagatatgtgtcctaaatccaatatgactggtgtccttataagaagagggaaatttggacacagagtcgcagatatacaggggagaagaccgtgtaaaagtggaggcagaaactggagtgatgcatttacaagccaaggaatgtcaaggatggccgagagcaccaaaagctaggagagaagcatggaagagtttctcacagtccccagaaggaaccaatcctaccaagatcttgattttggacttctagctttaagaagcatgagagataaatttctgttattttaagtcacccagtttgtggtaatatgttatatcagccacagaaaaataatacacttcctaaataataaaaagaaaaaagaaaaaaaccctgtacatacaggttagttatttgatttaataacaaacttaaatgtctgtatgtaaaaaaaaaataaccaaaattaaatgacaaagaactgagggaaatatttaagacatttatgccagacacagggttaatacccttagtatatgaagagtacataaataataaccaaacactcattgggaagttgtgctaaagatataaacaggcaattcatgaaagaagaaataaaaatgtttaataaatatataaaaatacattccatattcttaataactaaaaacaaaataaaataaactgcttttacttaccatatttgcaaataataagagcaaaactgtgtgtgacattgccttaagtactttatatactactaacttatttaacacttgtaacaatcctgtgaggaaatagggttattgctaggtattattatcttcgttgtatgaatgaggaacccgaggtggtatattaatatcattaatataaggtaatattaccttcatgtaataaatgaggaaatgaggccataaaataacaa

SEQ ID NO: 93870 - DNA, 16725 bp, Homo sapiens
tgtcctcacaacaggtgcggtcacgccgtgcggccctgagccctcaagcctcctggtctgattcctgagccctgggcacaggtggcgactgcccaggatcctgcctgtgggggccctggctggagtgtgggggctcgcrtgcgtgcacgtaccttcgtctctccccttggagccaggtgggcccatttgcagctggcctgtcttggggacctgcagccaggtggcgctcagtaatacctccttgttggctctgaaatgagtctttggaggtgggcagagattctcgaatgcagcctcttcagctcccrtgagtcaccccattcctgagtcgagcagccccacagtctcccaaatgtgaggcagaaaagcaaactgtggccgggcatggtggctcacgcctgtaatcccagcactttgggaggcagaggtgggtggatcacgaggtcaggagttcaagaccagcctggccgagatgatgaaaccccatgtctactaaaaatacgaaaattagccgggagtagtggtggtgctcctgtaatcccagctactcgggaggctgaggcaggagagtcacttgatcccggggggcagaggtcgtagtgagccgagatcgtaccattgcactccagcctgggcggcagagtgagactccgtctcaaaaaaaaaagaaaagcagactgcctaagaggatggacagatggacactgggtgagcagagtggcctggccgctggcacacctccctgggcaggaccaggcagcctccagaggggcttcaggagtgaccgggcctggcctccccaccacgggctagggtggacatttggggccttctggggccaaagtgcagactgctggggatgcaggtggcttggatgttctctgactttgttgctgggatctccgctaaagagtgtctgcgctgtggcttctttgcaggagaagttttcaggttgctggaggaagagggcgtctccctccccgacctggaaccagcccctctggacagcctgtacgtatgtctgccaccaagaactgttattttagcttctaacgctgcctctgaggatagcatccccctgctctgggcttgcctccccgcagcccatcttggcgtccacagaagtggctggatagccaggcgcagtagctcacgcctgtcaccccagcactttgggaggccaaggtgggcagatcacctgaggtcaggagttcgagaccagctcggccaacatggtgaaacctcatctctactaaaaatacaaaatttagccagacatggtggtaatccatgccaggccctgtaatcccagctacttgggaggttgaggcatgagaattgcttgaacccaggaggcggagcttgcagtgagccaagatcacgccactgcactccagcctgggcgacagagcaagactccgtctcaaaaaaaaaaacaagaagtggctgggcccctgtgatggctggtgacacaggagctgttcctctgtgtctgtgacttgtctcccacctggaaatgcaaacgctcatgtgtgagggacagaggccctgctcgggaggttggcaggcagcagccccagctgtgctgaggcccctccctccttgccaggtgcagcggtgcctctgcagaggagcccaccagccatcggggagggggctcggggggctacctggagcaygtgttccggcacgcggcccgagagctctttggaatccatgtggctgaggttacctacaaacccctgaggtcagtgggatgggccagatctctgggcagagcggccacacagcccccagccttcctcgggctgctgcctcccctggggtcctcccacagaggtgggctgggtggagggcagcctgcagggtttggaggggaccctggggccaggcagggccctcctggcgggctcagggtgtgaaggcacctaagcactccaggcctcagtcggcccattgtgggggatggtgaccctgagcccgagaggccagcatgggcaaaggtgatgggtgcctggcgcaggcacgcgaccacatcccaggagggagggccagggcctcacagacatccctggggagggaggcctgtttcacagacagcccgaggctggaggtgaggtcccctgctggactcaaggaagtgagccttccaccctctctctccgttcttgtccttccctctgcccaggagagagggagagagccctgggaggtacccggtcatcccctgaagcccagcaggcctccccttccaggcaggcaggagcctggtgggtgtgccatgtagacaaaccccgcctgtgccccccaggaacaaagacttccaggaggtgacactggagaaggagggccaggtgctgctgcacttcgcaatggcgtacggcttccgcaacatccagaacctggtgcagaggctcaaacgagggcgctgcccctaccactacgtggaggtcatggcctgyccctcaggtagctcctgcaagggacaggacacgaggaccccttctgggagcagagctgtgggccaccatccaccaggctgggagtgggaggaagtggggcacagagggggcccsgtcacctccctgctccctggtggtcaggaagcttggctggggcgcaggctgtgacccctgtcccgtctgctctcccataggctgcctgaacggcgggggccagctccaggccccagacaggcccagcagagarctcctccagcacgtggagagactgtacggcatggtccgggctgaggcgcccgaggacgcgcctggggttcaggagctgtacacacrctggctrcagggcacggactcggagtgtgcaggtcgcttgctgcatacgcagtaccacgccgtggagaaggccagcactggcctgggcatccggtggtaggggctgcaggaccaggactcccaggaggccgtgtccatgtgtgacagcagaaccacatgccccaagaccccagggcttcccccaaaattctgagtgagctgcagggtgtgctgggacccgagtaggagctaggactagccaggacccgcagccgcctcgtcacctccagttgggtgcctctgggttcccactggctctgcccaggtggggtggggtggcccaggcagcagaaggttccctgaggtcccagagcctgttccgttggccctgggccgaggcccacaggtgctgcccttgctgctgctggtcgggcacccaagtgcgtgaggggcttcagcctgtcccggggttgcctgaggcagagcaagacgggttctcacccctgacttctggaggcttcccttgaagctctgtgcaaaaggtgggagacagagctggacctgcaggggtggtcccgccacaaccctgcgtgtggaccctggcaggggggggtgccaggcccctggaaagcaggggttaccgttacgaggctgtggtccggggcaagccaagtacgaagcagcagccatcgcgggctgcatcatcccccagccaggtccccaccaggcctgtctcccagcgtttgtctaataaacgcacccctcctaaaacacgcctacgaaaacagctcctctcctggcacatctgccaacactgacaacggcctttcaaagctttattcatagttcggaggccccgtgtgccccacttcccagacacccaggtctcggcgcccacacaggccccactgagtggtcctgtgtgtccacccgggaagcaccaggttgcccaccctccgaggctgggcagatggctggccagggcctcgaagaaggttccagaggtggccctcatgtgggtccagctggccgaggtcacgaggagggacgcaggccccagccctgtgagggtctgggtggctcagtcgtgtggggctgcactsaggagcccccactgcagcgcaaggagggcccgcgcctgtggctgccgcggctcgcccgcctgttcgaagcgcgcccgctccttgcatagcgcctccaggacgtcggcggggaccgccttgcccgtgaacttgcgcaccggctcctctctgcagggaggggtgcagtgaggcgcagggcccgctgcccacgcgggagcatggcgccgaggggtgggcgggcaggcaggcacttaatgagcagcctcccccaagccagagatgctcactcagcccaacacgcagtccccagatgccttcctaagggtccacgtaacggtggaggccccgggacaacagccatactcacgccacccgcaggaaggggttgtagaggcgctcctcgcccagagtcgacggcacagtgggcacgtcatcctcatccctcttctggagtgaccacaggccccggtcaccattaggccttgtctgagagccccccccaccccgaagcctgttccctccccccccaccctcttgccgcggcgggaaaggggccgtgccttagcccaggacagcttggctctcacgtggtcgttgcagggctccactttctgggcaaactccaggttgctaagcgtgtgctcgtggccgcagaacaccttctggaggaagagcgctcggtgagcgcgcacgcggccaggaagcggggaaagtgcttgcgccgggggcctggcctcccctgcccggtctgccctcaggtgggcattcactctgcacccctagcacagtgagggtgcggagcgtgggggctgtgcccacgggagaagaggggagggcccaggcccgctcaccgtctcggggggcagggtacccagctcggccaggctctggtacatctgctgggcgctgccctccaggcacgagccgcagccggccaccgacagcgcgtcgcctggcgggggagggcgggtcagagcagatggggcggggccggcgggaggcggggtgggcgcgctccgcgctgcgggtacccgagaacagggcgggtgggtccgggcaatcgtcctcccacaggaagtagctcatgtggccggcggtgtggccgggcgtcaggaggcaacgcacgtggatggccccgaactgcggcggaggagcaggcggacctgtgagggcgggtggacccggggcgccctccccgcccctcccgggagcgcgcgctcacccgcagctcctcgccgtgcgccagcctgcgcgtcagcgagaagatgcgctcgtccgcgcccagcaccgccagcccgggacgaagccgcgccagctccgggtttccccgcgcgtggtccctgcgggcgggcgggcgggggccgggttaggtcgggttgggacaaggcggcgtcctcgtgcctccccgcgccccgccggcgctcaccagtgrtggtgggtggtcagcacagcggtcagagacaccccctcccggcccacgatctccagcagctgaaagggacgggagtgacggtaacacagacggtcccggtggcccactccctccatatcgggatccgccgcgctcactgccccaggccggccagagccccggggagcgccggggagcggggacccagcgggcggtgactgcgcccagcgcgtgcagggaccgccaggcagcagcgaaagggcggaggccagaggtgccgtaacttcagggagccccaagataaacaaggaaccccagccgccaatgacttccggagagcagagcacgtgggggctcgctcctaccaggggggtcggggaggctctcgggggacacggccgggtccctgcggcccgcggcctgccctcaccctcttgggcacagccacgtccacggccaccgcctcgcgcgtgagctcctcgatgaccaggtacatgtagttgtcctcgagcacggggatgaccttgaccttcatggtcacggagctcggccaccggtgcctgctccaaaacaggccccccagcccacggtgccccttcagggcggggcccgctctccacaccctaggaagggctgtgcgaagcgggctcggtcaacacgctgggggccaaaagagaagcccggctccccaggaactccccggcactcgcgtggaattccacgcaccgggctccagcaggagcggaacccggccggtccccaaccagccccggctccgcccccagtccgagccccagtccccaaaggccacgccttcctcccaggccccgcccctcggccccccgccctgccgccgcaagacccctgacccgggacagccgcgttcccccgccgcccgcctcaccggcacggctgygctgaggrcccgaaggacagactgacggaggcggggcctcggccgccggtcacggggtccggactgagcgcggcgctgggctcgggagccgccaaccgcccccctccgcggacgcgccccgcccccgcccccgcccggcccggatcctgcgcgcgatgagaccacaaggcccgccggcggtgcgcgtgcccggtggggcgccacgcgcacgctccgaccccgccgcgcccggcgctggcacctcctccaggaagccctcccgacgccccggctgagccagtcgtttccgagttctccggcccctgatggggacgtctgcgcccctcttctcaggccagaggtgcagagatatacttcccccgtcccggggctcagccagcactgctaggtacacagaaggtgtccagcgagtgtagctcagggcatcctgcgggcgggctgccgctccgttccgcgtgctcgtccgctgcgcccaggctgggcgctttcasgcacctggttccatctgcacaggktatgtgcagggggcgckgggccgcattccccagatggggaaacggaggcatggagagaggaagagctatcctccctcctcagcaaccaccggtctggccggcccctgtgggcggtgccctgggagtcacctgggaccaacagaggccttggcaacgcacttagcagtgccagtggcagcagcagccatggggaagccgggcgtggaggcagcacygggctcggagctggccagggttccctagcctatggagcacgcagccaccacaggccccaggcctggacctccctctcggcgggtggagaatgtgagtcctctgggacttgccgctcctgccatggggttgaagtctgcccgttcccccaaaggccaggarggtgcaggttcctgcaccctgggcctaatttcagccaggagagggacttttacagctcagccaggcagggaggcgggactggtgactgcatgggagtggggccacagcccagcctgggacccacctggggaatgggtggcggtacctccccaggttgtgctacgagccaaggactggctgccaggagctcctgggggcaccgcagtgtgggccaccagcttggaagcagaggtcccaccagatctagcgctcaataaggagcagcagctgcaggtgggtgtggkkccccagsgtgctcgtgaggagggagggtgccagcagggcccacagacgccacctctcacctggccacccacagatctccaaggagctggtcgacattcagatcacaacccaccacctacatgagcagcatgaggctgaaatcttccagctgaagagtgaggtgagcagccgtgtgaaccagcctcagtgcatgggggacggggggtgcaggcccaggacacgtgccctgcatgggcatgcacacgcacatggcatctgtgggtctcagcctgcctctgagtgctgcgcgcccctgagcrtgcaccgggtgaatgttcacctaccccaggtggcccgcgggcaggtgcayctgctcatgccagttgtcccacagatccttcggctggagagccgggtactggagctggagctgcgaggagatggcaccagccagggctgtgcagtcccagtggagtctgaccccaggcatccccgggcagcagcccaagagctcagacacaaagcccaggtgcctggacactctgatgaccacagattccaggttaccatgagcatatggagagcctggctgggaaaggccagagggaagcctcagcaggggcctcagtgaaactggggctcacccaccccttagctttccctgccctcccttccattcaggtgcagcccaagaacaccatgaaccccgagaatgagcagcacaggctggggagcggcgtgagtgtgcagccacctagctcaggggagagggcagcaccagagaccccaagcctagggtctcatccagccagccctgtgtgccccacagctgcagggggaagtgaagtgggcgctggagcatcaggaggcccggcagcaggcactrgtgacgcgtgtgtgagtggccatctcacctggggccccatcctggagcagagagaacccctgatcgtgggcctgctgagcctcacccccgtgtcttcagggcaaccctgggccggcagctgcagggagcccgagaggaggccagggcagccgggcagcgactggccacacaggctgtggtgaggctctgccctgactgcttggagacctggagggtgggggccccagaagctcagccggggtccactctcagggcacaggtggagggctgcttccaccccaggtgctgtgcagctgccaaggccagctccgtcaggcagaggctgaaaatgcccggctgcagctgcagctcaagaaactgaaggatgagtacgtcctacggctgcaacactgcgccyggcaggcagtggtgagccctgcaggagcaccctgaggcctagggagcccaagcctggcctgggtgtgctggatagcttcagggagaccccagggccccggcactgctcagcctgctggggtggggggatggttggaaaagatggggggtgggccccatgcggacccagcccgccgcctccaggagcacgcagatggtgcaggccaagcgccagccaccacggccctccggacattcctggaggcgactctggaggacatccgggcagcgcaccgcagccgtgagcagcagctggcccgggctgccygcagctaccacaagaggctggtggatctgagccgcaggcatgaagagytactggttgcctacaggtgggccccgctgggatgggaggtgtcaggcatctgtgggtctctaagcctctgtgcctcaaaggcttggtgtgcagcaggagtggccccagacagacactagcctaccctgacagggcacctgggaacccccaagctatttttgacatagccagcttggacctggaaccattgcccgtgcccctggtcactgacttcagccatcgggaggaccaggtgaggctagagacccccagaagctccaggcccgggtgccccccacccacccactgccccacactggccccaggcctcatcctgggctcaacagagacctcagccccgggcctctgaggggcttgccttgttcagccaactgaaacgtccccaccacaaacctctgtagcacggcgggcctggggcactgctctcatccccaaaaaagagacccggtggagcctcccaggggggaacatcagagccacagtgagtgccctcatgggtgtgggggaggcctgtgggggatgagcagagagcacaacgcctgcaccctggggcccccagttgctccaccaagcccccgccagacagggtctggtcacagcaatgcactcagtggcacatccccaccctggggtccctccgtgggtcccggcgacactgataatcacaggaaagagaagaggggctgctgcaggtggagctggccttgaacacggaggatcagggagagcacacctgagggaggtttccgctgagacctggaggacgcgaggggtgggagyagggcgcctggtgaccgggccagcccttgcctctgggcctccatgttcccagctgtacaatgggcagggctccccaaggaccatttcctggggtttagggcacacccgtgtgggggtggcatccctgttgatgctggagtcactgtctgggctggccttgtggtttagccctcccccagcagccagcagaccccctgggcccgggctgtccctatacacggatggctccaaggcctggggggggcgccacaggagcacsgggggggcccatgcctccctcactcactcccaggtgtcccctcccggctctgggaacctgactcagcacggtcacgtctgtccctgtgtcaccatgccagctctcaaaaccactcctcctttcctctcccctcacaggggcctggacgctgcatcctgggcccagatccaccagaagctccgggacttctcccgcagcacccaggtaggaggcaagggctggcccaggcccatcctcacgccatgccccagctcatggcttacatccccatgccaggcagagctggaacgggagcgggcacagctgctggtccgggccacgatggctgaagagcaactttctgagctacaggagtacgtggaccagcacctgggcaggtgggcagagggagctgggtgtgaccccagggccctggtctggttggaatgaaggatgatggctgcctcaggcgctaaargcagacctgtccacagctgggcaagtcacttaagcatggttcctctgagcaggtacaagcacgaaatcctgaggctgaggaagctggcaggtgcaggggacccctggaaagtgggggctgtgcctccagccaagccccagcatccaaggaccggcagccactaggccgtctcccaaggagcagagcagagcagagctcctcagccagcacagaaccctcccacccagccccccataaaacatgagtcaggatagaacccacagagtctttatcgtgtctaatactcagctggcctgagaaataaggccccccgggatgggggcagaactaggtccgggggcagcctggatgggtatccgcgaggaggcggsctccccagcctgcccaccctcaggaacatcataagcccatactcggtccaggccctcgccaaccgcggtcacaggctgccaggtggggagtgggaagcgcccagacaccacgcgggccccagcaggcagctctgtccgcagcttgtcctccagcagcgggagctgagggagagaacagcagagtagagggggcgggggcggggccggtagaaaacagccgcgctcacccccctagccccaagcctagcacccaccaggcaggcccaggcctcagagcagcaaacaccctggggtgtggctggggcttcccagcggggctggcaaccccgsacctaccacgctaggggccaggaacacagacacgttgcggcagtccctcaggctcacctgccggaagagaagtcgccccggccggggagaggcctggtgggcaccgggtcatcgcagcttccgagtcccggcccccagccctcgcaggtgtcagccgcaccttgggctgtcagcgggtggccagggatccccaggttaccttccagagatccttgcggcgatagcagacgctgccggcacagccggccctccaggcgtgcagccgcgccagcgccaccagccaggggttcagctcgtagcccacggccgggcggaggccgcacctgtgggccgccagcacctgtgggcaccgagagtgtgggaaccaggatgtgggcaggggcgcccgccagcaggtgggcggtgtggggcggcgaagacccagacgcaggcacttacgatcctgccgtcgccagagcccagatccaccgtttttccggggcgtcctcgcagcagcgacaacacgtgctccacctgccgcgcgctcgcgccgacgtagggcacctggaccgggtggcggcgagagtccactggccgctcccgccccgcccgcagcccggcccgaactaccacacggcggggcggagctcaccccggccacgcccagaccttgagaccctgagcggcagccgagctcccctgcccggcctggccccgccccgcacctgcagccgcagcggcacgcgccggaagccgggctggagcagcagcgcccacaccgcgtaggctgccaagcccgagccggccgccgcctgcagcagctccagcgcgcccagccgccgctcgcgcagctccgtcagcgcctcgaccgggtcgtcctgctccatggctgcgggacgcgcggctcgtccgcccaaggtccttcccggctcgggtccgcggccctcgcagcctggcctggggctggcggtgtgccctctgcctcctgccgggagccgccgcgcgacaccggaagtggccggcagagcctgcgcggtcggtccgtggcgctgtgcgctccgcccagcccggctgccctcccgcgggttccggcgagctgcagcctcgggggctctgccccgccgcgtccggctccaagcctgcgagggtcggctccgttggtccgctctgcggaccgccgtttgcggcctgtgctggctgctggcgacccgcggaaggggacaggcaggccctgccctgggggagcgcacgtgccggcgggagtcgggatacacccggcgatctcacgggctagagccccagggaaacggggctgcgcgtctttgtcgtggaatgaagggaagtctgccttggagaggggcggtcctggccccagaaccagccgggggctcgcgtggggcggctggagcccagggagccggtgggaaagcggctccccgggatgagacagcgtccaggcgccagcacccccatgactctgcctcggggagactgctgggggcgctccgctgactcggacacccagcgccagccagagcccgggaggacatccttccatttccctcctacagcctgagcgatgagccccagtgggcggtgaagggatggggggtggggtctgagggagaagggcatggaggaggggctgacacggaggagagcttgagcaggcccaagaagacagatgctggctctcaggcgagtgtggtgggaggaaagccggatgtcacaggcgggggcctctggcacctgccagctacagggaaggcagacagccccgggagtggggagatcaccttccttctccagaaaacaacacacaaaaagactgagttcctggaggtgaccttgtgaagctgggggtgggaagcgcaagtggaagagccgagctctgggtcaggcagctgggccacgacctccacacccagggtagggctgaacacccgtgaatgtcgggggttgtctatgcgtgccctggcctagctcctccttagccatccgtggctggggtctagagcccctgcagggacagaggctgcttccagacatgggtatgccgcagaccacagcccccagctcccaagtgcagagtctcacaggcctgcccacgttggccccagccccacccagctcagcgtgtcctgtctcctgggggcctggaacggccctcccaggaaaggaagggtgtatgtacactgagctctagggggagctgacagcgcccattcctgtcctgctgcctgcattattccctgcacctagagcagttacctaggaggcttactggatgaatgcacctaattggactctagcgtgcactctccactcttcttttttttttttttttttttttttttttttttttgagacttgagtctcgctctttcgcccaggttggagtgcagtggcgcagtcttggctcactgcaacctctgccttccaggttcaagtgattcctctgcctcagccttttgagtagctgggattacagatgcatgccaccatgtctggctaattttttgtgttttattagagacggtttcaccatgttggccaggatggtctccatctcctgacctcatgatctgcttgcctgggcctcccaaagtgttgggattacaggcgtgagccactgcgcccaacctccccactcctctcccgtccacaccaggcactctgctgcttggcctttgggcactctgcagccacctgtacctgtgtgaactggcacttgcctggcggtgtctgtgatccacaggccccaggctcctgtagctcctgcccacctgctcacccacactgtctccctatctcccatgccactttggccacctgtccccagggcaggcatgaagcccctggtctaatgctccaagacccatttgggcaccgtggtgctcctgtggccctgtgtctcatgagaagacagctggttgcaaagccagggctttctctgggagggtctgtaggtgcaaggctcaggcacttcctgagacaggtaggtagaagccagggttcggccagggcccagcccagggtgtttgtgaacaggtggacttgggtgtggctgaaaaggagaggttgtaggaagctggccagagaatcagggcaagtgccaaaggtaagggggttgctcggcccacgggaaagcctctccaagacaggagtggaggaggcggtgcaggagggcacacgggctacctccttttctagtgtttgcagaagtgtttgggctgggggcagatggatgtaaggctatgggccccagggagtggtcagggctgaagatgaaaaagtggaggttgtccaagggttattggaggctgccccagaggagcggtcctgtgcctgagccctcagcgtgccacagttgggagaggagagaagcagcaaggaacctgaggaggggcagaaggtgggagaacccccacagtgcatgacacccagtggctgcgctcctcacccatcctcatcagccctgcggcaggcaggtgatctgtgtgaaagggtaagtctcttgcacgtgcagtggaagtcccagggcggcgctggaggtgaccccccymcccaggtgtccacagagggcatggcactcatcaggcatctgcatccgctaacctagagaaaggaccgtgtttgtgggccctgcacagctgtgtccctcacacagcctcagtttcccccttgaaagctgggggcttcatctgcctgggcagggcctctggcctccacccccaccccggcccaggcgagaatggaaagccatttctggggctcagcccaggggtccctggcccttgagccatggctgtctctttcccaggatccgaggggttggggtgagaggaggcagctcacacagggccaggtgtcctggaacacccccaccsaggggcttttagcctcggagccttgggctgtggctgtcccaaacctcactggccctttatgcggctgaaaggccgaggaggaaggcggagacagtgacaatggggccagtggcgggaaacggtccttagagaccccattgtgcaccccgcccgccggaaacaggcaacaagcaggaccctgcagaggggaccccacacccttcgggctcctcgccacgtctggatgctcagcacgtcgaaggggcctgaggacagaggggcccattcttccccaagggcgggacggggccaaggatgactctgcgggctcacagcagccatgggggaagtcggcaccctgccagcctgcagccccttccctcacaggcctggctcagagccggagcgctgtgcgcccgcctgcccccaccgtacccgagggaccctatgcccctctgcccctttcctctcctgctgagccccagaagcacctggcacgggaggcaagtgggagccagccagggaagcaggcaagggtgcgggcaaggacggggctggtgggtgcagcagagcagaagcttgcatgagtgcaggtccccacgtgccccccacccagcagcggcccctccccggaatgtgggtgtagctcctcctgacatctgctctccctctcagttgccaaatggtcttgaacaagataccattcccctgagcctcagtctcccgccaggaggcaggaattggagccatcctcacagctgcgaggcaggcccaaggctgggctggacacaggagaccaggtccacagcagcttgcgtgaacagagttcttattgatagtcccatcacctccaaagcagtgggcccaccctccctcctaccagcccctccccagcacccagcccctcagtgcagcgccacctcgcaggggtggaggtgggcagcacgggcagcctcgtaggcacggcggaactcctggaatcgtggggcacagcccagccgggcctccccaaagcggctccagcccatgaagaggaaggtgcctgggcccgggtggacgccacagcgcagtggggtacgaatggaggtcagcccctggtccccggatcgccccgcctggaacagcggcggtgtctggcggaggacacgggcggccaccacagtgatgacagactcctgcagctccacgtcatgggtgaccccatggatgatcccgtgaattactgtggggaggcatgtggctgcggtaggcattcaggggaaggcaggctccaggctccccccatggcggggacactcaccgaagtcgctggtgcatgcggccaggagcagctcagcgtcrctgcagggcctgcaggcacctggcatgcagagggggtggtgaggagaggccctgccctctcccggcatcaccccaggccccgtcccttgtccgcacaagcggcaggaggcagcaggcaaatgagcagagcccacgctcagggcctgatggcacctgggggtcccagagagctacacagcagatgtgcacgccctcggcgacacctgtactcaggaaacacacttgcaggcgcgtacctccaaggcaggaatgcacacagacgtgggcctgggggccatgcctagcgatcagctgtcctgggccgccctcctgcactcccatctgacatatgcaccccagcatctgggacccctctagtttcccgg

SEQ ID NO: 93871 - DNA, 24355 bp, Homo sapiens
agatcacttgaggtcaggagttcaagaccagcctggccaacatagtgaaaccctgtctctactaaaaatacaaaaattagccgggcatgctggcacatgcctataatcccagctactggggaggctgaggcgggagaattgcttgaaccctggaagcggaggttgcagtgagccaagattgtgccattacactccagcctgggtaaagaagcgagactccatctcaaaaaaaaaaaaaatccctacaatcaaagcgagtagcatagctgagaccccaggcagagttatatgtcatagggcatggatacaaagatgggagaatggaggtcatcatggcaatctgccatgagctctgaacacacagaccagggcacctaactcagcctagggacataaggaatggtttcccagagaaggtgatgctgacttgagttgaatcttgaaagagaagacgcaagttaaccaggcaataaagcagagagggcgctttaagcagagcaacccacatgaaccaagagctttggagactgaagtgcttccacgtctttactttatgtgatgcatatgccctgcagctattaacctttctgcagtttcctgtctggaatgtagatgtgagccctagatgtgcacagctgtctcctggccatgaggcaataagcatgaagttgatggtctgtagaaataagtcacccaatggcattcttgagccactgtatccaccccaactgtatgactacatgacttcatgtcacacaggtcagcacccaggaactcctgtgatatcccctggagaactacctagtccctcagtgctccgtgatctatctcttctttctccctcagtcaagactctttctctctctctctctctctctctctctctctctctctctctctctctctctctctctctctcactctctgagatggaatttcactcttgttgcccaggctggagtgcaatggcatgacctcagctcaccacagcctccgcctcccaggttcaagcgattctcctgccccagcctcccgagtggctgggattacaggcatgagccaccacacccagctaattttgtatttttagtagagatggagtttctccatgttggtcaggctggtctcgaactcccgacctcaggtgatccgcccgccttggcctcccaaagtgccgggattacaggcataagccaccatgcccagcccaaaaatcttgttccttcaaccaagctgactccagatgctttgcattgtttggagaagtggtgatgcagtttctcaatgtctagagtttcaacaacacccctaccctggcctccacgtcaccattgccaagagtaaagagagagcaccccagcctcttccagcaggtacttcacactgcccttccccaagttttcagtttggccaccactatcttcctggaggccatcattatctgttattatttcctttatcctggtttatgccagtcacacaagtagcccaggatcctcagttgttccttatcccttgtgtttcatcccaaatggctccaaatgtctcattttctgaccccatttcccaccctccccatcccgacacccttgttgggatccacaaaatccatcttttctcgaagtgtcttaatttcctcttcactttcttgctctaaaggaaactaggtctcccttgaagacactgctttctctgcagtcctctcaagtggtggctgtttcttacactccacaatggaataagttttcttgttcctcattgctgcttccagattattctggctccctccttcctaaacatttccagctttcactctgatattaaccagactatatggccctcattacagtcatatgacccctgccactctccaactctactcctgggacaattctacatgaactcaatatccttagagatgatactttcaaagccctgatgtctcaaatccttgacctcctcactcccaaaaaacttgccctccaacttagttcagctataatctttctgtccttctttctcctcttaaccagcttagattccatggttcattatcataattacacctttgaatatcccctaggctcccttgcctctctaatacttcattgtactcttccagaaaagcagaggtcttacttaaatctaactctccacttatccccacacaagtagtagtagccgaacagggctggaaaaactacacacctctgctatctgctttcattttaagtttatgaccactcaccttcggcttcactcatctatcttacctcattaccctagcatagtcactaacgtatcctcacaggtggccactccatatcttcctctctcttcaggcttccattaactccttccccatcctcagactcagctgacaaccttatcccctcactcactaggaaaataaaagcaataagaagggagtttccacaaattcccagcacatcatctacccacctacctgcaacctccactccctgagttcaagctattctcctgcctcggcctctcgagtagctgggattacaggtctatgccaccacacctggtggatttttgtatttttagtagagacacggtttcgccatgttggccaggctggtctcgaactcctgacctctggcgattcacccaccttggcctcccaaagtgctgggattacaggcgtgagccaccacacctggccgagagacaccaactcttaaaaggtgcctaactaagcatctcgaggaatttgtactgtgtctctaatgagctcttttgtagcattttcatcagggaaatgctggggatcagatccatcctaggaaagatcattctagctgcagcatagagtgggaaggctggagggcataagattggggatatgggaaaaagtgagagactgttggcagaaattcaagcaaaaaaaaaattgaaaggcagactgaagacaggggctgttgacatataaaggagggcaaatttgacagctatttaaggttattttacctttagacagacattggtgatcaatgtgatacatgaggtgacagtccaccggaagacacactgatagtctccccagatttcatccccagaaactccctgactaaatcatcacgggtcacctgaagcagtctctgacagtttttggaagaccagaggtagaatttcaggagcctgattccagataaagccacaattatgcagcaatgttatgttcctgaaccatcaaagacatataagggatgcctgagttttactaggagctcctggctcattatttcctattttcccatcccctctgcccttcaagggagcaacaaaaaagcaagaaccagtgaaaaacttaaaactgtgttcgttttttccctaatctattctagtccaacttattctcccactgttgaaacaaatatttctaacacagataagggacatcgtattgctgggggattccctacacagatgtccaccaccagggcccagctcaaggaagcaagttctactgaaagcaattacccatttgataataggatttacagcaaccaagatttccttcctggcttgcagacacttcttccgaaggcgctggctccctgtgatgctaagatccagtctctatagacttcagaaacttagccaaactacaaagccctccagaatctattctctaaactcagccacttagccagtgacctactcaggccagacactggctttggtaagcaaaacagggctggtgaccaatgtagggagtgacatgttcctcaacagtttcaggcctggacatctgcattgcaggctgatgcttagcgtaaaaaaatgaggaatgctagagcccccataagaaaagaaactcaaggaagcatcactgtcctttcagtgtcactagggacagaaaagatatgtaggtaagtgtggaagtgaagaaactgcaatctcatttggagtgatggtcagggtaaggtagcaggagtaggtagtataaccagcagaaagatccttttgacccctgagaaaatcagagtctaggtcagtagctgaccccaggtctcttcaccactcaggtgggtccccagacagtaaagatggtaaacttccaagggcaaagatgagatcagcgactccgctgaatagtggtccccaggagacaattgtctaaatcacttcaagtacacacagccttttgtacggattttaaacttgggattccttggcattgcacatgattttgtgtttgtatatgagcaattgtacatttttctacagaggtctatatctgttatcagattttggagactcaaaaagaaaaagattagatctcttacttgactgcacgatccaatatggttgcactagcacgtttcaggtggacagtggctactgtatagtgcagatatggaacatttccatcatcacagagactgttattggacagtgctgccttagagacgtgggctgcaggacttccacaagaaggcctggatatcagacaccagcattcaaatttcttcccagtgctgtggaatgtggtagacccttggaagtccagtatctgaacatgctggtcaccaccgtatactagtgaccagaggatgcctttcttcagctgcttggcattctgccagcatgaattcctagcacgggaaagatggcaggtgatctgaattacttggggttatggtgtatttgagtgacctcactatatttgggaaggcgctggaaaaacacgaaaagaatgttagaaagggctggaataaaactacaggagtcccctctttatccacggttttgtttcccagttttaactactcatcatcaaccacgatttgaaaatattaaatgggaaaattacagaaataaacagttcatttattacatactattctgagtagcatgatgaagccttgtgccatctcgctgtgtcgtgccagcacctgaatcatctctttgtgcataaaagcaaaactaccgactgcccagttctagtgcttccagttacacctctgcccaaagtccttcactggaggaagagaaatttctcttctctctgccagagagaaacaggaagggaggaagagccacacaattgaaatcaagtcaaggcaagcaccacaggttcttgtcatttgtgcttagcggacttagctgatggaaatcggcaaagatcatcccaaagctcacacaactccctgcctgctctctctctcttccaaggtctggaaaaggaagtggcagctgagttgcgggggtgggtggcggtgggaaggtattattattcaaccactttttaactcttatattgtcatattattgtgttaggagcttcatacgcattaatcctaacattcacaacaatactgtaaaatagatattgttacccttatttaacaccgatgatattctagggctcaaagaggtggtatgacttgcccggcaagatcttggacttgaaagtctgaggcttccattctccaccacaatttacgtttattcacgggcatccattgtttcagactcatgacaaccgtgtaaagtagcacggagtaggtaagtgatttgcccaagggcacacagcaagggagaggttgtaatctttaatgataatttgtttctttttttcttaaaggggacttttttttctcctgtaccaccaagccagtacatctatgtcctcccagaaaatatttattacctcttgtagcaagggtgaagatattgaatacaacacagaggctgagaaatgttacctccctagacccagggtggagtgagcaggcaggtgtaatgcaagaaataactttcacattttctccttggagataagaacaaggtctaaaaatcaggtttgagattttgtagcctttcggcttgtaagtgtcatgaaatttccctatcagcctcatctactagctccctgggtctctctctctctctttctctttttccccacctccccactctgcccatagggagttgaccttcacagttgcctttcagtagtcaacatgccaggatgcctccagtctgggggaaaatgcttcctcatttgcttctcccagcccacctcaagcagtctccccaccccttgagtctcagcagygttaaagctgttactttcacagcttcctgggagcgagtgctttctcaagcccgtcttgcaaggtgggtccttttttgtttttggcagaagggagggacagtgaaatgtgctctgagtagggacggttatgcaaaagcaagtaggaggaggaagccaagaggggagttggtgagtcagaggagaaaagcgcatggcccggctagcagtgagcctctcaaaagcagcagggaagcccaagccacaaggtaagaagagaatttctgtgtacgactccaatgcagagccattacccagagctgctggagcaagagtatcagataacctctggcagctaagctagagattacagtggcgaaggcggtttgcgcagaggggataaatcagatcacctggggaattttctgggtaaaataaaacacaagctgcttaccagcagcccccaagccccactagctctatccctaaatgggtccaaaagagcccagagagcagatcaggctgttctgatgtatattttgtagatggtcccctggtgccaactgactcgttcagatcctggctttggagctcaaatttctgtacttcctgcagcttctcctctgttttctgctggggagtggaagacaggaggtgcaaggagctgtaggttttctctagctcaggagagggacagtgtgatcattgaaaattctcagccctgggatccccaaaacctgggttctgatccagaaaaggctatttataccggatgagccagtcaattaaagtttagtttatttattctgaaaaatgaagaaatgtctcatcactgtctaaaatatctaaccgatcagtatcataattgcagctaaaagggctttaaaaatgtggaacaccacgcacatgtgcaatatgattaagttatggtgccaacatatcagctatggtagaagatacgtctatcttgcatggccttggacaagtatgaaacttctaattggaattgaaatacttttctatgtgtaaaataaatgtaatattgtcgatgaaaagagtcagactctgtgacatatttgaagagatttattctgagccaaatatgagtgaccatggccggtgacacagccctcaggaggtcctgagaacatgtgtctaaggtggtcggggtgcagcttggttttatacactttagggagacatgagacttcaatcaaatacatttaagaaatacatctagccaggcgcgatggctcgcgcctgtaatcccagcactttgggaagctgaggcaggtggatcacctgaggccaggagttcaagaccagcccggccaacatggcgaaaccctgtctgtactaaaaataccaaaaaaattagctgggcatggtggcaggcacctgtaatcccagctactcaggaggctgaggcaggagaatcgcttgaaaccgggaggctgcagtgagccgagatcctgccattgcactctagcctgggcaacaagagcaaaactccatctcaaaaaagaaaaaagaaaagaaaaaagtacgggtctgtcgcccaggctggagtgcagtggtgcgatctcggctcactgcaactgagaggaagccttcagatagcaggcttcagagagaataggttgtaaaatgtttcttatcagacttaaggtctgtgttggtgttaatgctggagaggtatgatgaggcatgttagatccccacttcttgtcatggcctgaaacagtctctcaggttaaattttaaaaagacccctggctgggcacagtggctcatgggtgtaatcacagcactattaggagactgaggtcacttgaggtcaggagttcgagacctgcctggccaacatggcaaaaccatgtctgtactaaaaatacaaaaaattagccaggtcactcgggaggctgaggcaggagaagcgcttgaacctgaggagtcgaggttgcagtgagctgagatcgtgccactgcactccagcctggacaacagagcaagacttcatttcaaaaaaaaaaaaaaaaaaaagagtcctggctgaggaggaagtcctttcagatggttggggggccttagaattttatttttggtttataatatcttgctcaatcttcctttctgggtctcatatagtaaaaaaaaaaacactgtacaaatatatgttcacttgtcatttgttgaaagatgttccttgagcacctactatgtgccatgcactgtccttggcactagtgacacagccctggcgggacccaggtccaatcctcctgacactgtctaggaagagtttgttatatggacaccctttacccaggtgcctagcttcagaggttttccaggtcttcaggctgcttgtgaggatgccagtttccccaatccaaccccattctctctctctttgctcaaggtatcttctgctgtatctaatttctacttgtaaggggcataatctcatgggaagtgtaagttaggaatgcatccagtggctggaacccagacttcttaaattagtatctatctggtttttttccccctcagaatttcccattttgtctctacgaggctacatggtaccgatttgggggacatctataattcagcccwctctaatcagctgctgcttgaggtcacccatctggcaccttcgtggttcctgtgccaaacatagattctcccttctcaccaccctttggtggcgttttcaagttcctaaggttctcttgactcctcagaaatggctgtcctttgtgttttaagatgataccgttcacccatcgttggggcaacatttttttaaattaattttttggggtggtgatgatggaatgtgctgagtttgggttttttgttttgtttttgttttttgtttttttttttttgcttttgctttgttagcctagtaactgagctgattcaagcaaggtagcctatcacccagcaatgaggcttttattttttaaatgttttctaaaactaattttcatacaggaagagaaaaataatttccctcctggttttaattaatgcatgcttggtatagtaactgttttttggaccaagggttactgtgccatactgcatctaacccatgcctctgactttattagtagcttggtccaagtaactgagacggcatgggtaatgtgctcactgttccatgcaatcacctaaattttagtcactgatgctgaagagtgtccgtgtgcatttcagaaaaggatacttatgtttcattctcttgaaggagctcctttagttttctgctttctagcaattactgtgcctcttcccatgctcatctatttttttttttttttttttttttttttttttgagaccaagtttcgctctgttgaccaggctggagtgcagcggtgtgatcttgatcaggagatcaagcccacactcatctatttactcacttactcatttatttagcaagtgtttaatgagccgagccctgatcatttgtagaattgttatgtacgtgtaagtaagataagatacagcctttcccttaagctatagtggcccagagaaaagagaggcacccatacaggcttttactgtcaaaagggatggctgctaacagaaggtctgggaaacaaattaatctcaagagggggctgggcgcggtgcttcacacctgtgatcccagcactttggcaggccgaggcgggagaatcacctgaggtcaggggttcgagaccagcctgaccaacatggcgaatccccatttccactagaaatacaaaaattagctgggcgtggctgtaatcccagctcctggggaggctgaggcaggagaatcgcttgaatctaggaggcagaggttgcggtgagctgagatcatgccactgcactccagcctgggcgacagagcaagactctgtctaaaaaataaaattaaaaaaaaaaagtctcaggagaaagagacagaacttctttcagggagaaggcaggctctccctttcagggagaaggcaggttagattcttgaaggaatagtagctgtcctgcaaaaatctcagggcttttaaataacagggcaagtttggaagaactgaaagtcgggagcctaaggcactaaaacagaagggagtgacaggaaatcaagaccaggccatgaaggaccccaggtgcgaggtgtggggatgtttatttaatcccatatacactggaaatttattgaaggatttttaagcaggaagttgatagacttatgctttaaaaagatattttggccaggtgcggtggctcacacctgtaatcccagcactttgggaggccaaggctggaaggtggcttgaggtcaggagtttgacaccagcctgggcaatatagtgagggccagtctctagtaaaaaatgaaaaaattatctgggtgtgattggacacacctgtgatcccagctactggggaggctgagacaggaggatcgaaaatcacttgagcccaggagttcaaggctgcagtgagctatgatcatgccactgtactccaccctgggcaacagagtgagacccccgactctaaaaaaggaaaaaaaagattttgggccaggcgtggtggctcacacctgtaatcccagcactttgggaggccgaggcaggtggatcacttgaggttaggagtttgagaccagcctggccaacatggcgaaaccctgtctctactaaaaacacaaaaattagctgggcacggtggtgggcacctgtaatcccagccacctgggaggctgaggcacaggaatcacttgaacccaggaggcagaagttgcagtgagctgagatcactgacagagtgagactctgtcccaaaagaataaatagtaatttaaaaaaaatgaaaaaggtagtttttggcagcagtgggtcatggggagatgctgagagacagaagagaaaggtcgatgtcaaaggccaccctagacacaaacagctgggaattctggcaatgggagagtgggattcgaggacactattgaagagtctccttccatgaagcgccctggtgactcgcatcacctcgcttctgccagggcccaggagcatctgcctctgctgctcattacagtcttcagaaatgagttttgcccaagacacatcctaaagtatcccctggctctctggtcagcccattgtgtgtcgtctagatccagatgtgtcttggggctcagtgacaagggatgggacttgcttcacaaaagctacgctttctacccagggcaagtgctcacagaaagaaaaagaagtcagaggatttccatgggagttcctgagaaccgtggacaactaacacctgggaacaactgggggcagttaggaggcccagctccagcttggggaggaaacgggcttcaggccagcagcagttggcaggcaaggagggtccagagtcaccaagccccgcacaggacacagaactggccccaagcrggatggagggagggagggtgtcactttgaaaggtctattctcctaatccctaggaaatgttagctttttcctaattataagccctgcttataaaattctatcaccatttccttataactgtatacaggataagttcttctcattttcctctctttttggttttgctccattgcttcctatttttgttccaaactttttctcatactcacattgcccttaggagaagctcttttgctaaagtcacctcttcagtctttgcggggagggaggacatccttgggccaagatcagtaatagcttagtttctaatcattttcctcttgcactcaagttttaagaactagcagcacatcttagctggtcctgttgttttttttttttttttttgagatggagtctcgctctgtcgcccaggctggagtgcagtggcgcgatctcggctcactgcaagctctgcctcctgggttcacgccgttctcctgcttcagcctcccgagtagctgggactataggtgcccgccaccacgcctggctaattttttgtatttttagtagagacggggtttcaccgtgttagccaggatggtctcgatctcctgacctcgtgatccacccaccttggcctcccaaagtgctgggattacagacgtgagccaccatgcccggcctagctggtcctgttctaatctgcagggctaagactacagggcaggaattaccagtcattgacattttctgccgtacagcaagtgattttcagccatgatgatgagatgatcctcattggatctttttggcacatccagaggaaaagcactgttattatgaatggaagataaggggtttttctgctattgccacccaaggtttggcttgagtcattacatacttcccagaaggttcaggggacttccaaggaaaacccacgagctggcaaagcatgctttcccttcaggaagaaagctataaatgccaagagtctcctttgtggctacccaatttctctcctaaaatctactctcacaggtctctggagccctggacgtagagaatagtttctgatcagtatgaaggctaccttcatacatgtgtgatcttacatacatgtgtgacggtgtgtgaacataaaggtcatcactgaagcacttgaaatggcaaaagattggaaacaactcataagcccatccatcaatgaggaaactgattaaataaactgtggttaatccatataatacttcttcgaagcaacaatgaatgaggaactactttacgaactgccctggaatgctccctaagacatattgacaactaaaaataaagggcagcacagaacagataacttgaaatttttttttgatttttttttgcattttaaagaggaaaaaaattaagaacacatacacatttgaatgttcttgtgtacacataaagcaactgaaaagacacattaaaaatgaactcaggccaggcacagtggctcatgcctatataatcccagcactttgggaggctgaggcgggcagacaacttgaggtcaggagttcgagaccagcctggctaacatggtgaaacctcgtttctactaaaaatacaaaaattagccgggcgtggtggtgtgcgcctgtagtctcacctactcagggggctgaggcaggagaatcacttgaacccgggaggcagaggtttcagtcaaccgagatygcgccagtgtgtactgcagcctgggcaacagagcaagactctgtctcaaaaaaaaaaaaaacaaaaaaaaaaacgtagttgctatgtgcggcaagttgagaaatgggcaggtgaggtcaggtgctggaagtagacttttcactgtacattgatgacaaaacaccagctagcagataaatagcagctgtcagtacgtaaaaaagaggggactgatttgtcagctagtaaaattcttaggttttctttcctctggaaaaatactatgacccctttaaagatatgtcattacccatgtttacaaatagctctagaagtttcctaatttctgactacaggcctccctcacaggcacaagcgcttgtcataagatttcccctccaggctgggcatgggggctcacacttgtaatccctgcatttttgggaggctgaggcaggcggatcacaaggtcaggagatcaagaccatcccagtcaacatggtgaagccccrtctctactaaaatacaaaaaattagctgagcctggtggcacgtgcctatagtcccagctactcaggaggctgaggcaggggaatcacttgaacctgggaggaggaggttgcagtgagctgagatcaggccactgcacttcagcctggtgacagagcaagaccccatctcaaaaaaaaaaaaaaaaagatttcccctccccagtgacatatgttaaaagcctggggtgtgtcaggctggctgcaggctggcaggcactcctttccctcctgcatacagaatctgagaaaacgcttgttttaaattctgagtctgtagaaacttttcaaaataatttgaatcatgtgactattacctattaaaaactttttaggctgagcacggtggctcatgcctgtaatcctagcactttgggaggctgaggcaggaagattgtttgaggccaagagttcaagatctgactgggcaacatttctttctttttttttttttttttttcttttttgagatggagttttgctcttgttgcccaggctagagtgcaatggcacaatctcggctcactgcaatctctgcctttctgattcaagtgattctcctacctcagcctcccacrtagctgggattacaggcaccagccaacacgtccagctaatttttgtatttttagcagaggcaggcattcaccatgttggccaggctggtctcaaactcctgacctcatatgatccacccgcctcggcctccmaaagtgttgggactacaggcatgagccactgtgctcagccatgagcaacatttcaagaccttgtctctgcaaaaataaataaataaataataaaaacttttaaataattggtataagacctgccaccacaaaaacagctgacccccaaatccagccccacttaccatctggaaatctagcctctattttttactaaagctggaagggagaatttcttgtgtacatggtgatatacaaatgaacaccttactactactatgaatattttacaatgtgcaatagctattctctctcccaatagttatttatgtcagaaggtcacccagaatgacaaagtcatgtgggaaggaggttaaaatatcctttggaataacattctagcataccactgggaaccgtggtcctttcacacgaagcaagccctgattgcaaaatgttgccatcagtcagtatgagacagtacgaatcacaaagtgagaccctttctctagatatttactgtctatcaactggaaaaccatcttaatatacttattttttgttttattttgttatatttgtgggtttttttggagatggagtctcagcctttcacccaggctggagtgcagtggcgcgatctcggcttactacaacctctgtctcccaggttcagacgattcccctgcctcagcctcccaagtagctgggactataggcgtgtgccaacacactcagctaatttttgcatttttagtagagacagggttttgccatgttggccaggctggtctcaaattcctgacctcaagtgatctgcccagctcagtctcccaaagtgctgggattacaggcatgagccactgcacctggccttaatatacttaytttgttggaccaagatactttactatcacctacaaaaaacattttgaaaataaatatctaaattcttgatgggatggcactccctagggttgtgtgatacacacttgcccaactgcactgagctgccttgagtaggttgtcccacgtaatcaagtatgcctcaagcagcagtgtgggagtcatgggccacaagtgtccccagtgagagtgatacagttctgagatctgtagcacttaggttggcttgccacactttcttagagttggcaggtaaggagacactaatagctcaaataactctaattcagctcaaatagattcagatagtttattacctacacagatacaaggtcgacattggatcaactccccatggccttggtcccatgggatgacaccaaatcagaaggatttgctatctagggcaaggtgagaaatgggcaggtgaggtcaggtgctagacgtagacttttcactctacactgatggcaaaacaccagctagcagataaatagatgacaggcaccatgagcacctggctctgcctttgaggagacaattccaactaaagccaagcagttgcacagcctgcagccctatcttttgagggactggagtggaaagtcctgtgcttaactgcagtgagggagggagatgagacacagtcttggttgcagtctcccttatgatggagggatggctaagcagtggcttcgaggcagttcttcactaggtagcttatctccctctgtctctgcaggaatcacaagccattcctccaagacttgagtcagactgaggtgacgcctcccctgggtggcctgtctgaagacatccttgtcatcagggcaccatgatggagacatttccttatgttgattaaatatggttgagttcagatatttttggtaaaccaatgggcaacgtggcttggtttagaaagaccaggaaggaggaattaaagaccctgaaggagaacatatcaacacactaagtgtaagggacaggaaatgatttggagaaggactggtgccattgttggcacgaatcctctggctttccatgttgctccttggtagggggtcagagagcaggtggctttggccagaaggggaatagaaggcaaacaataaaacagcagcccaactccaccctttctgtttgttccttaaaggtcttccacttcagcacaatgctactgcctaaaaaaatgaagctcctgctgtttctggtttcccagatggccatcttggctctattcttccacatgtacagccacaacatcagctccctgtctatgaaggcacagcccgagcgcatgcacgtgctggttctgtcttcctggcgctctggctcttcttttgtggggcagctttttgggcagcacccagatgttttctacctgatggagcccgcctggcacgtgtggatgaccttcaagcagagcaccgcctggatgctgcacatggctgtgcgggatctgatacgggccgtcttcttgtgcgacatgagcgtctttgatgcctacatggaacctggtccccggagacagtccagcctctttcagtgggagaacagccgggccctgtgttctgcacctgcctgtgacatcatcccacaagatgaaatcatcccccgggctcactgcaggctcctgtgcagtcaacagccctttgaggtggtggagaaggcctgccgctcctacagccacgtggtgctcaaggaggtgcgcttcttcaacctgcagtccctctacccgctgctgaaagacccctccctcaacctgcatatcgtgcacctggtccgggacccccgggccgtgttccgttcccgagaacgcacaaagggagatctcatgattgacagtcgcattgtgatggggcagcatgagcaaaaactcaagaaggaggaccaaccctactatgtgatgcaggtcatctgccaaagccagctggagatctacaagaccatccagtccttgcccaaggccctgcaggaacgctacctgcttgtgcgctatgaggacctggctcgagcccctgtggcccagacttcccgaatgtatgaattcgtgggattggaattcttgccccatcttcagacctgggtgcataacatcacccgaggcaagggcatgggtgaccacgctttccacacaaatgccagggatgcccttaatgtctcccaggcttggcgctggtctttgccctatgaaaaggtttctcgacttcagaaagcctgtggcgatgccatgaatttgctgggctaccgccamgtcagatctgaacaagaacagagaaacctgttgctggatcttctgtctacctggactgtccctgagcaaatccactaagagggttgagaaggctttgctgccacctggtgtcagcctcagtcactttctctgaatgcttctgagccttgcctacatctctgagccttaactacatgtctgtgggtatcacactgagtgtgagttgtgtccacacgtgctcaagcagaaggacttttgtgtccatgcttgtgtctagaaaacagactggggaaccttatgtgagcagcacatcccaccagtgaaacagggtattgctcttcttcttttcttgatcttcctgtctgggcagacttcagagactttgtggcctggaggcctattaagcacgacacagtatcagtggaattgatccataaacctccctgtccacatcttgcccaatggggaatggatctttcaccaaagagctcaccagcattttccacagagatgcaaattctgagcccttggagttcccagtggattcaaggaaggaagtgggaacaaggttggatgcctacttatgagcttgaccatcacagctatcggtaatcagaaatatgaaacaaaatctctgcacaaaagagcaagctcttaagttcacagggtgcctgggctgcatttgaatatcacttcccctctgcattttcccatcacatagaagactttgacctgtgaagctgccatctgttaatactaaaattcccaaataaggttctgtttagaatgtccctttttatgcttcttaattattagcagtaaatgttcatttttatgggatcctaagctaagaatagatgtaatcatctttattggttttttaaaacacctttgctattatctatcacccatttatacagaaaattgctaagataatatttggtttcagatgatgaactaagtctataccctcttaagaattggtggaaaatagacaattagcagctaagccctttctttcttgtgtgaggtataagttgtgataacgccatatgtgtcaccctagggtctgggaagagagttcttttactctgatccctcagccagaggacctcagttctagtatgactggtgctatttagctcctcctggccacttctcctaataagaaaagttgttactcccgatctcggcaggagcccccagatctagttttacaatagaatttcacctgttaaaaaatgcagattgccaggcactaccacaaatctgctagaatcagaatcccccagtatgggggctggagttctggtgactcttccatggctagcctggcactagcgcaccttgcaccaggcagcaacactgttcgccttcttgctctaagaaaggtgattcttccacaaatgcagagtatgtatgccacttgctcttgccactggtgctgtccttgggttggaaagaatagaaagaagctccctatatgtctggaattccatggacctctgagtcctgacttttaaatgtttcactttgtccaagtctgagagattgtgtcattttctctttctttttgtttccaccttttgacgagcttcataaagcttcctggatgtcaggtcagaactctcgcactccattcggccgagtagtgattgagcttctccactgcctgagatacttgagtagctacttttcctagctcggtctgttgaagttaatttatatttggcttcaaagaagctaatttattctaatgtccaaatctttaaaaactcctaagagcctaggatctcccaggcaaatgcttgcctctacaaggcaaatgtttacctcctaaacagtgtcagagtaaaatttcccagcattgaaaataagaccagaacagcagatgacagtgtgaacagagtgaagagggccattgagggaacagacagtggtagactcaaccacctctgatttcccttctgaaagtccagtgtctgtctggattgttttaaagttagcaacctctttatgagccatccctgtgtgatgcctgcttgtccttctccaaaaaaatcaccccatcctgatacaagaaaagagactagccacacagaagtctcagagtcttattcaagatccactttagaacagctttaaatttcctgcattccaagtctgagatatccaatgaggtccagaatctaagagccacacccttgaagaaaatatctgtgctctctgatagagtagccactagccaccagtagttgtttagatttaagttaattaaaatttaataaatttttagctcctcagtcacactagccacatttcaaggacccaatagctgcgtgaggctagtggctactgtattggacagcatagatataatgtccaccattgcaaaagtttgattggacaattctggtctaaattcatttttatatgtgtatcatctaatccctaattcagccccatcctcctaggccaaaaagtttaaagaatatataatatcatggcatttttatatagcatagagtgcataatataaaatcatgctatataggctgggtgtggtggctcatgcctgtaatcccagcactttgggaggccaaggtgggcagatcacttgaagtcaggaatctgagaccagcctggccaacatggacaagccatgtctctactaaaaatacaaaaattagccgggtgtggtggtgcacacctgtaatcccagctactcggaaggcagaggcaggagaattgcttcaacccgggaggcagaggttgcagtgagccgagacagtgcctctgcactccagcctgggtgacagagcaagactctgtcttaaaaaaaaaaaaaatgctatataatcttaaaagcctgacccagtgttgaacaaggctgcagtgaacaatggcacagtctcttgttgaagtgttcaggaggctggagctgggattcagtggtgagaatggcaacactcaattgagatatgaggcatttggggacatgagaactggtgacaagcatagaggatggtgttctgcaagacatccttcctaattcagaggcatctgttccatccccaacccccagcaacagaaaggtgtttctttccaccttagcctgtctagctgcatagggtctgtgcatgagtttaaacctagattaggggtgaattgatcatatttctcaaagctgatttttagggtttagggaatgagcttctctcaagtctaatgtaaccataacagcctgaattgcctaattgcaatacagcaatagatttctttacaaaatgccaaactaggcaactgctccaagtcctatgtttgcaactgggagtcggggggtggaggtctcaaactttataaataattatctggatggtgagaagggaatgtgtttgaggcaaaagggtgccaacagtaacttaactacttttctatctatagttactatgtggctccattttatttgtttttttgtttgtttgtttgtttgtttgttgagatgcgttctcactctgtcacccagactagagtcctgtggcacgatctctgctcactgcaacttctgcctcctgggctcaagcaattccccctgcctcagcctctcgagtagctgagattacacgcgtctgccactacgcccggctaatttttgtatgttttagtacagacgggctttcgccatgttggtcagactggtcttgaactcctgacctcaggtgatctgcctgccttgtcctcccaaaatgctgggattacaggcatgagccactgtgcccagccgtggcttcattttctatagaatgagagcagttgctaagtttttaatacattttcattaaaactacattttttcaacttatgaatagtggttatggagaaagatagaatcaacttctgttaatttttatgcaaaaatctgccattgaattgtccataatatgtttctcaaaatatcatttataatttattatgtgatttagacccaagctaaatataaattaacttcattaactatgtacattatcatgacactgttgaattactttcacagactgacaaagcaaaattaaaaataaactctgtaagtgacctagtccagttaacaataaacctctgacaggcattagtcgaggatccccaatccattgccccttgtgtcaagggttatgccccacttctggataaaggtgcctggtcattcagagaaaggtttttttgtgttttttgttttgttttgtttttttcaatgcagtgatgaggaaaagtagtaaccaataaccagagtaaggaaatttgaatatagcacttggctaagggatgtattcattttttccacacacttaatgggcatctactatatgcctaggaatgttctaggtgctgtggatacagcagcaaacacaacaggcaaagcctctcctttcatacaacagacattttagtctgttgggggcaagagaacaaaaaatatatgtcagatgctaagtactataaagaaaaataaggggaaggggcttggcagtgaaggagggtgctattctacagaggcaataggagacttcttcgcagagaacgtgggattgcagcagagaccacctccaagtaaaggaggttgccatgcagagatctaggggcagagtgccccagtagatgccaatgtcagtatggacagaatcaatgagtctaatgagaacctattgtgtgcttggtactgtgctgcgtgcgccccctggaggataaggaagtagaaccgtgacggtaagacagagaggttatgcactcccgagcgctggggcactggaaccgggctgcctgggtgactccactattaccagctacgtgacctcaggcaagttcctcaacatccccatgtcttaaatccctcaagtatagagtgggtggaaacagcaggacgactccttggagttactggaagggctaatgagtcagtgtgtggaacgtccttagcgagcactcactcagcattagctgtgaatatcatgattacaatgcttttctcccatttctgatctgaacccttctatggcatttctgatcatgctgaaatgatgagatttatacttcctgatcttctaggttctctacatgagtggttctcaactggaggcaattttgtcccacagggaacacttgacaatgtctggagactttttttattttagtattattattattattattattattattattattattattattatttatttttgagatggagtctcactctgtcacccaggctggaatgcagtgatgtgatctcacctcactgcaacctccgcctctcaggttcaagcaattcccctgcctcagcctcctgagttgctgggactacaggtgcgcaccaccatgcctggctagtttttgtatttttagtagagacggggtctcaccatattggccaggctggtctcgaactcctgtcctcaagcgatccaccctcctcactctcccaaagtgctgggattacaggtgtgagccaccatgcccaactatattttatttttaattgacaataattttatctatttatctgtagacatttttgattgtcacaactggagagcgggggattcagtgttactggcatctaccatgtaggggcctgggatgctgttaaataacatcctacaaagcacaggacagtttcctataacaaagaattatttggtccaaaatgtcaatcgtgcagctgttgaaaacccccactctacaccaaccagggataaggataaagagctgatgactcaaatggatttccctttcatctcatccaacctcattcaaacgcatgtgccaccagcccaaatgtcctgactggggagatataaccagggctttttgatacccactccattagtaaccatctcaaaaggatagttggtagagtagctgttacaaaactacagagctgcgtcacacgaggtgaaccaagaaaagactcaggagaggaagtgaggtgcagccagccttcctgggaccagtcactcgctgtgccttaactagtcatggctcatgtccaccctaattcaggcacctgtggccagaagaggaaagggtttaaagaggcaaaacatgatcatttagggcctcgggtaaaacgggcaggatgaatgaagcctgaagcaaatgtgctggacaaacatgtgtgactggaaacagagacaccattcacgaatgccaaaaagctctgtaggcactgcaagattgagatcagtgtttctcaacctttttttattttttttcctcattatcatccccaaccactactccagcgagccttgtagacattgttttcctaatcgccacctaatcgccacccccatacaaaattttaatatcacaaatatactgttgggcccagctttggctcacgcctataatcccagcactttggaaggctgaggcaggtgggtcgcttgagctcaggagttcaagaccagcctgggcaacatggtgaaaccctgtctctacaaaaaaaatacaaaaattagctagcagtgttagtgcacactgtagtcccagctactcaggagaccgaggagggaggatctcttgagcctgggaggtcgaggctgcagtgatccgtgattgtgtcactgcattccagcctgggcaacagagtgagaccctgtctcaatacaaaacaaaacaaaacaaatatactgtcgatttgtttatgtattgtagccctttgaaggactacaaaccattgtaatatctaagggttcttgccccctgcccaa

SEQ ID NO: 93872 - DNA, 25501 bp, Homo sapiens
  misc_feature (1)...(25501): n = A,T,C or G
caggggttccaatgagtgtatctcctacaattggtttactacatgctatactaggtatttaagatgtattgctttaattcttgtaaaaaagcaagagaacatacttgcagaggatcagatcttaggctctggaatcagaaaaatatgaatcagaaacctggctctgccactactattgactgattagttctgtgtccttggacaagtttggtgagggctaaattggatagtgcatgtcatgtatttcatatcttatgtggcaatattcttttccccaaatgatactaaagattagacagcttaaatactttgcctcaagacacagaactagaaagaggcagaagagggctagcatactgccaagcacatagaaagtattcagtaaatgtctgctgaatgaacaaaccacagtcagtatatactcaacatttacttcaaataccactatattctctgttgtttcctttaacttatgcaacaaacttaaaatattttttatttccataggtttttggggaacaggtagtatttggtttcacaggtaagttctttagtggtgatttgtgagattttggtctacccatcacccaagcagtatacactgaacccaatttgtagtcttttatcccttaccctcttcccaccctttccccgagtccccaaattctatcatgtcattcttatgcctttgcattttcatagcttagctcccacttatgagaacatatgatatttggttttccattcctgagttacttcacctagaataatagtctcctatctcattcaggtcgctgcgaatgccattaattcattcctttttatggctgagtagtattctgtcatatatttataccacagtttctttatccactcattgattgataggcatttgggttggttccacatttttgcaattacgaagtgtgctgctataaacatgcatgtccaagtatctttttcatgtaatgacttcttttcctctgggtagataacccagtagtgggaatcctggatcaaatggtaattctagttttagttctttaaggagtctccacactgttttccatagtggttgtactagtttacattcccacttctacatacacagcagtgtagaagtagcaaaaacaaactcttactatttatttggcatctacaaaaccagaaaattcaaatagaattttgatgggcacatctgaatttactttaatgagaagagaaaaaccataaagtaatttaggataagagatcaattgcagtaattcccagggtctgagaaaaagttatggcatatattttcaccatcaatcctacttgctttggttggaatgtgtcccccaaattgcatgcattggaaacttaatccccaatatggcagtactgaaaggtggggcctttaagaagtgattgggtcatgagggctggtgatccattcatggactaatgggttgatagattaatgggttactataagagtgggattggtggctttttttttttttttttttttttgagacagactcttgctctgttgcccaggctggagtgcagtggtgtgatctcggcttactgcaacctctgcctccctggttcaagcgattctcctgcctcagcctcccaccacgccaggctaattttttgtatttttagtagagatggggtttcaccacgttggccaggcttgtctcaaactcctgaccttaggtgatccacccacctcggcctcccaaagtgctgggattacaggcgtgagccaccgtgcctggcctgggactggtggcttcataaaaagaggaagaaaggcctgagtgggcatgctcagcccccctgatccctgcagtccccaccagcaacaagattctccccagatgtggtccctccaccttgaaattctcagcctcctccctaactgccagaaatgaattccttttctttataaattacccagtttcaggcattctgttataaaccacagaatacagactaggacactacccttcctaccagtatccctatcttccacttgaagaaaatacatattagtagaagtggggagtgaaggggttaaatccaagtgcatgtttcctactgcctcctcccactacagaagctagggtgcagatacatgatccaataagcttgaccaattggatggtgatgtaatttggatctcccctgcaaatctcatgttgagatgtaattcccagttagaggtagggcctggtggtgtttgggtcatggggactgatccctgatggcttggtgttgtcctcaccatagtgagttctcatgagatctgattgtttaaaagtgtgtgacacctatccccaccccctcgctcctgtttttgccatgtgaagtgcctgatcctacttcaccttccaccatgagcaaaagcttcctgaggcctccccagaagcagatgcaggcactaggtttcctgtacagcctgtagaaccgtgagccaattaaacttcttttcttataaattactcagcctcaggtacttatagcaatgcaagaatggcctaatataggtggtctctcctgggacttgaaatcttgaggaataatgaaaataaccccttaataaattccctttttgcttaagataacccagaagaatcagtttctgttgtaggaaacaaagacttcattaatgcatatgtcaagagaaaattcaaactagtttttacacatcctacctgtaaaagttttgaaagctactaaaaggctttctgagctgttaaatctgaaggatttataacagattgttattttcaaacacgagtattctatgatcggtttggggggnnnnnnnnnnnnnnnnnnnncacacacactcatgaaccacactgtgcagactcaatataaatgtacacctgagttgtgcaacattcaaatcaatgcagaaatcaagcaaagattagattcagtgaattgtagctatttcttggaaacattaccttttttttgagacagggtctcactctgtcacccaggctagagtacagtggcgtgatcttggctcactgcaacctctgctacccaggctcaaggcaggctcaagtgatcctcccacctcagcctcctgagcagctggtaccacaggcctatgccaccatgcccagctatttttttttcccccaagacagagtctcactctgtcacccaggctgcagtgcagtggcgccatcctggctcactgcaacctccgcctctcgggtttaagcaattctcctgcctcagcctcccaagtagttgggattacaggtgcccaccatcacacccggctaatttttgtatatttaatagacatgggggttttaccatgtcggccaggctgatctcgaactcctgaccttgtgatccgcccgcctcggcctctcaaagtgctggaattacaggtgtgagccaccgcgcccagcccacatccagctatttttacaatttttttgtaaagatatagttttgccttgttggacaggctcgtcttgaacttctggctcaagcaatccaccctccttggcctcccaaagtgccgggatttcaggcataagccaccacacccagctggaaacatcttttatcttaaaaattcctaagcatcctataaattacctcattactataaatttaattttaacgtagtattttaacacagttgccaggacctcattcaaaccttcattttatagatggagaaagagagctcacacaggggtgtccaagggagataatacagtcatgggttcttagtttccgcttctggttgggtcagtaaatacctcctcatctctcttttccgcttatcactagaaacagaaactaaaaaccatggcttcaggctgttaacagcctaaaacaaaacagaacaacaacagtaacaaaataaggtgggttggacaagtttggcagagagcctgcttggagaagctgtgtgaaaaaaaaaaaagactgccaccgctcctgaaagttctcggcccaagatggaatttagtcaaagaaactcttacactaataaaatttgtacatcaaattaagatcagggacagttaaaacattaataaagactgaagcatttgttcatttaaaaaattttatttaatatttacatttatttttaaaataaaaattagaggaawkcccatgaactcattttccatgaacataatataatagtactcacctatctcctctacccaacttgtgttttagatgagtccttttggatctttttccccataatggcctctctccttttgctttacagtgcaatcagggcagaataacagatatgttgagtagctaatttatatttctgaagatctccatagaactcttaagttctaagtcttcatagtctttgcaccttgccaagtttgctttcctttgggaattctgtcataaccacaaggttattccccagacatgcagtttggggaaattaacccggcagtagtaaacagactggattagaaaaggtggcagtcgtaataaggatattccaataaccggggaaagctacagaaggatcttgagttaggatgatgacagttacaatagaaaggagaccagtacaagagacggtgaaaacagaatggatacaatttagttgaagaattggctgtgggtgaaaagaagaaatcaaagatgcctgaagttgtgagtttcaggtagccctgagtttataatcctagttctgactcgtactatctttggatatactagctgctgactactaactgaacaaggtagtaaccttgtcatcttgtaacttacctaagtctgtttcctcctctataaaacaaactatcaaaataaagccgatgaaaagattgaagtaaaacataaaacccttagcacagtgcctagtatccattaagcagtagataaatgatggcggtcattattagggagtagggtaaagaacagaaggttaaaaacatgagtagcagtaaggacttttgggtggggattcggtctttctactacacattacacatacctctaagcagagaaaggggttggaggggagtttgataatgtgactaataatcctcctccccctgggggggatcttgataaaggatagccacccacatggaggcctaatataaactggattgcagaatgcacttgagctgggagcccaagcgggccaggcttcttgattcctattttatcccctttaacctaggatagctaggtctatagtgcagactcagacctaacttacactttcatttgcagctgaagtttcggaacaaagacaaagatagccagatcatattaattacacggataggcaagaaagcatgagccctgaggaggaaggaagggactgtccaggtgtacttacctcaaagatgagaaatatcaaagacaggaaaccctaggttcttgcccttcagtcgctatctccttgccattagtaaaatgcggccgatgaatgtcctcacttctgtccatctgggcaggaggtgggaagggtgacgtgcaaatggatgggaggaacccttttttcggcagcacccaccacacccagcctagtgccacgcaccgcaagcgctccataaacgcacacagcgtcgcctctaccaggatcccgggcggccttcgcgggatttctcctggcgtcggctttcagactcccgagggtgggataaatcgagagggtggcatcctttggcttttcttctcccaggcagctctgaaccatgtttatgcaacgtttaatgggctctaataaaacggctaataattttgatccgcggaagcaccgactcgctcgctaagccgagtctgcgagggtgaagctgcaactccaacgccggaaagcgcggctaccgaaaagcgcatgcgccacggggtggcacgaagctagagtaagctgaggaggtgggcggaaaccatggcaaccatgggtgatgacgacatggggagcgtctctagcgctggattatgacgctggattatgacgcaggcagtgggcgcggactctgcggttcgcttgactgacggcgcagcctccgggcctagccacagcagcaacggcagaggccagcgggcgaggtcaagatggtggctccgcgggcgggggaggcagtggagggaggaggagtcagaccttagccagccggaaacaccgaaacccagagacctcctggggagccgccgccgccgccctctcggccatcgctgcctccgccgcctgctccacctcgagggacgcgagcgggcggcggggctggccgtgagagagacaggagaggaaggagggcaggggcggagttgcccgccttagcccccgcccccggccgcggccccgggccctgccccgcgcggccctgcccggcccaccgagccctggtgtggcagcggctcatggcggccgtggggcccccgcagcagcaggtgcggatggcccatcagcaggtctgggcggcgctcgaagtggcgctccgggtgccctgcctttacatcatcgacgccatcttcaactcctacccggattccagccaaagccggttctgcatcgtgctccagatcttcctccggctctttggtaagggaacagggtaccgtacgtcccgggacggctatgcgggccgagacgttccccggggagcgggcaggcgcgcagaggccatgggtcgagtatgtgtctttgggaactacagtttcatccctcaaagggtcgtctttacgggttgggagggggaaggakatgatacttgtctgagttgacagcggagcagtccccctagcgaggattcagtgttgtacctgagtgaggtggsgagaaagtaaggatgtgtgagcatgcagctctttgcccgtttgccttgggaaatgagtactggcttaccgcgtcctatgcgacagccttcgaaaaacaactctgctatcccagtctcgtcgtgtgtgaccttggacttctgccaaggcgtgggcctcagtttccctttattaccaaatgccgagtacttgtatgttgtcacttctgctgcacccgagggtccacaggatcgtgaagtgtctgcagtaaatgacatccaagcgaaggagacagggttttgaatgtcagaccttgaaaccattaccaaaaattctcatgaaagcggcgatgcttaaatcgagtcctaaaattttccatgaataaacgagaaggtattgaaagtgactgtaaaaagtgatgagacatttgccaaagagacttctgaaaatcattgtctttgtttcgtatggatggagtgttaaaagtatcttatatttcatttcttcctttccatcttcacttacatcatcagagggagatgcatttatgcgtaaaataattttttaagtaattgtaacttggmaaattttgttgatgaggtaattctggtgatcggtcttaagtaggctagtgcttttgaagtgttgctgagggcagactgatggtgaggtctttaccaagcctttctgaattacaagccatctgttgctttattccttcaaaagaggagtggcaataaaggccgaattttgttcttagcaataaatagccatattttacatttatctggtattttccttttgcaaagcattttcactggtaggtattatctaacctaaccttcaaacatcccccagaggtgggtggtggtattgtcattttacaaaccaggaaacagggtcatagaggttaagtgttttgctcttggtaggctgccgctaagtggttgccagagcctgagcttaaaaatcttttgacattaaatatggtttactttcctccctaacagctgcaatccagatacagaatgcagtagtaatgatcatatgctagatcttaaaactaaagatgtaaacgtgatgttcagcccaagctgcttcagtaacccacctgctacctaattccagcctttcctacttgccactgctaacgtataccaccaycataatttgtgttaaaaactgggctctgtttgagaggattctgcatgttcatcccagaaacagtgtagtgactgctttgaatattcttacagcatgataactgcagattctgtgagaatccctttgggacctggtgctttaatgcagtagtctgttgagcttcaggttaggcagcttcaaggaaaagaagtattttctttaattaaataatttgtagtgtaagaacattgaacaaagcaatctgatattttccttgtactaggcatgtttcttttgtaataaatcttggaagtttgtgtttgacaaagaacaacatgacttaaggcaactgctcagtgctttggtttcttatttttaccttttaaaagatggagagtgaggttatctgtttcatagggtgttaaagacaataaatctattttaatgcttcatttaataccatattttgttagatattttggtcttttgaaatcatcggcaaaatattggtgttgtttatttgaaaattttgatccctggaatctctggatcagactttgagaaatacgaaatactcttcaaatctatcatccgactcttcttactgtgtcatgtaattatgctaatttttcacatttgtaaggatgataagaatgaaaaaaactgatttcggtgctaaaaaattatgttactaaaagacacaggtttgtgtgtaaatatgccaatggatagttgaaattaatcgttctgccttgttagtttttttgtagttgtagacttctcagtactactgtgtataagtcttaccacttgtcaacctcacttttttctttaaaattaatgtgtaaaaatggaaatctctaagtaaaaagcattaccagttttatgtgtggtggtagaagtatttactcccctctacctacaaaatggtgctacaactgtaccttcatttgatatcaaactaatttgagatttcaaccggttagaaaataaagcaactcattttggagatccaaataaaattctatgacaatatatggaatattgaagaacataaagctgtgttttaagggatgttaaatactaaacgaaactcaacccagagcagcataatgctgagttagcaaatttaaatccaaggcagaaaatgcaagcctaggagtttgttttaatagtattactaatatggtgataattcattgaggtgggaaaargctttaaacataacagaagacccagaagttccaaggaaaaatctgaaaaatttcagtacataaaaataaaaagcttttttatggcaaagcttaaaaaagaatccttaaatgacaaactgagataaaatacttctatcataagtgattcacgttccagtaagagttttaccctgccagggaagctgaggcaggagaatcgcttgaaccagggagttgcaggttgcagtgagccgagatcgctccactgcactccagcctggggatagagtgagactctgtctaaaaaaaaaaacaaaacaaaacaagaaaaaacttatactcccttaggaaaatgcctaagacaagcaattcacaataaacaaaatgcagatgttcaataagcaagagaaaaagtatttagcccttcctgcagtagcttgattttatgggggaaaaaaaaaagtacctagccttgtttataattaaatannnnnnnnnnnnnnnnnnnnnnnnnnnnnnnnnnnnnnnnnnnnnnnnnnnnnnnnnnnnnnnnnnnnnnnnnnnnnnnnnnnnnnnnnnnnnnnnnnnnnnnnnnnnnnnnnnnnnnnnnnnnnnnnnnnnnnnnnnnnnnnnnnnnnnnnnnnnnnnnnnnnnnnnnnnnnnnnnnnnnnnnnnnnnnnnnnnnnnnnnnnnnnnnnnnnnnnnnnnnnnnnnctcaaaaaaaaaaaaaaagtcaaaaaaaatttatcagattggtgaagagttcaaagttttattagttttgcaaaggtatttacctttttgaaataggtaaatttatacaattttggaagacttttttttttttttgagacggagtttgctcttgttgcccaggccggagtgcaatggcgtgatctcggctcaccacaacttccacctcccaggttcgggcgattctccggcctcagcctcccgagtagctaggatgattacaggcaagcgccaccacccccggcaaatttttttctatttttagtagagacaggttttctccatgttggtcaggctgttctccaactcccgacctcaggtgatctgcccacatcgtcctcccagagtgctgggattacaggcgtgagccaccgtgcctggcccggaagactcttaatttcagtgtaaaaccatttggcagtatcaactgtcatttacaactgacttctcagtgttttgttttgtttttgagacagtctcactctgtcaccaaggctggagtgcagtggcgtgatctcagcacactgcaacctccacctcccaggttcaagcgattctcctgcctcagcctcccaagtagctgggatgcctggctcgtacaacttttgactcacaatttcaattctagggaattggcctagagagatagtttgcttaaggactatgggcaagcattactggaaataacaaagcaacaaacttaatctaaatatgtattgatacaaatctgttcattgtattaggtctagccatgcaataaagttcttgaaagaaatgagatagctatttttggtgccgaaaaagacttcagaaaacctctgaagtgaaaaaacaaagccgaagtaattatcactggcagaggaatagacagagatttctcaacagtggcagtattgacattttggacaggataattctttgtttgcggatgggagctctcctgtgcactgtaagatttttagcagcatcactatcccctgcccattagatgccagtagcaccttgcacccccacaccccagtgtgacagccaaaactgtccctggatattgccaaatcatggttgagaaccattgggatagacaaatagattagtacttagccttatttataattacatagcccagaaacagacaccaatgtatatatagaaataatgtgtttcagagatagaattgaagtacattgaggtaaatatggactgttgaattaatgatcattttgttacacctttggaaataaattatactagatgtctaccttatgtcaatatatagacagtcacttctaggttgagcagtgtagtgagaccctgtctctgcaaaaataaatatttaaaataatagccatacttggtggtgggtgcctgtagtcctatcttactcaggaggctggggtgagaagatcgcttgggcctaggagttcaaggctgcaagtgagctatgattgcataactgcactccagcctggctgggtgacagagcaagaccctgtctcttaaaaaaaaaaaatagtcatttctaagtgtattcttacctagatgtatatgtaaatatgaaatgcagaactttaaatttttagaaaaaaatatggaatattttatttttccaatcttagattaaggaagaaatccttaaaaatatataaaagcaaatacataatgaagattgataaaccgaatgatattgaggttaaaaacctatgttaatcaaaagatcgcaccactgcactccagcctgggcaacagagcgagactccatcactaaaaaaaaaaaaaaaaaaaaaaggaagtcaaatcttgggtaagggggaactactgtacttacatttacccatttattataaaggcaattacaaaggacacagatgaattaacccgatggaaggagatgtacaaggtgagacaaagaaggagagaagaggagaaggggcgtggagcttcagtgttcagctatctgagagctcacagaactcagtccttttgggcttctatggaagttcattaaataggcaagattgattagatcactagtcattggtttatggactcaagtttcagcttctttcttcccagaagtggcggctgggggtaggaatcaaagttataacccttaatcactgggctgattcccctggctacctagcccccatcctgaagctatctaggggcccccaggcaccagtcatctgattattgtacaaaacagtcatcactccagagattccaaggattttagaagctatgtcagaaaatgggacaaagaccaaatattaatattttttttatgatatcacagatgggaaagacaaactagaaaaacttgctttaactcttcatttaacacctctctgtagggtttggctttttaaaatccatgttcatatatttttgataaaagcatacttattataagtttagtttaaaagcaaaagtttaattttgtgttaatacttagaataccaggttttttttcaacctaaaatgagaatccaatagaaatgttttctttataatttatcaagtataccaacagattaacaacatttcaagacactttgttgtaaacttcattgcggaaggctcccttgggagtaaggtagtagtaacatttatttctgtgcttttccatatttattctgtcaggtattgaaatgtttttccacaggttgctttttgttttagaggtatttcgggtacttggagaattgtaaatattatgttttgtaccctgatttttagtcataagtttccaaaagagggtaagggtatgaatagactttacacataaaagagtgaaacactttgttatgtaacatgtatagtaagtttttattttttcttttgtttttatttgcctgtttttggtaatccaaattgaaaaggcctgaactctttcatgagttgagttcatatatagtttcaaagttcctgaattgatttggatacctgcctctttttggctaccttgaaaactctagtgaactctcttaatcactggagaattggactgagatctctgagttgtgatttcagtaaattctgttctcaaaattttttatraagcagcatttatatacagtcttgattacttgtgcaagtcacttccaaatcctaatgagaaactgtctctggacttttatattttcttagacctacagtttaaataccaagaaaggctttcatgtctaatgtaaaaatgcagtgaaactttgatattattctgcaaaggccatgagaaagatgattactttggagacttgttacttaggatattggtttttaaaatgagagcagattcttcccaaattccataggtaggaacgtgactataaaaggaaaatctatgaaccccatatacctacaaactttgggtaggaattaaaacaaacatatactattcttgaaatgttaactcactattacatcttggggggtgtgattttaatcaggatagagtattgtcagattgttacttgctgggatacatccaaattttgaggttgtagtcttactacattatttgtctatctgatgccttcccctttttttctttgatacatttgcataaagcaaaatggcactttttcactagaaatgtttctaaaacccaaataatttcttcatttgtgtgtagtaaaaacaagcttcaggaaaaaagttattagaattttaaaaattagttataaaattatggcaaagctcatgaatagttactgaagattaatttactactttgtgaatagcaagttgacaaaaataatttacagttcctgcttgactttctcccctctaagtggcataaagtagaactagagttattttgttttggttttgacccaacttagaagatttgttttaaagtttctgaagttttgtctcaggaaaataaggtggttttccatgtagagaatgtaagattacatatggcatctggtaggctgaattaattccattttcttgttaccttccatggaagaagtttctaataaaaaaatcttttcagggccgagcgcagtggctcacgcctataatcgcagtagtttgggaggccgaagcgggtggatcacctgaggtcaggagtttgagaccagcctgaccaacgtggaaaaaccctgtctctactgaaaatgcaaaattagctgggagtggtggtacatacctgtaatcccagcttcttgggaggctgaagcagaagaatcgcttgaacctgggaggcagaggttgcagtgagccaagatcacgccattgcactccagcctgggcaacaggagcgaaactccattaaaaaaaatataaaaaaaaatatatatatatataatatatatatattatttaaatatatatatatttaaaaatatatatattaaaaatatatatatatatttaaatatatatatatttaaaaatatatctattaaaaatatatatatattatttaaatatatatatatttaaaaatatatatattaaaaatatatatatttaaaagagcctgttctgagctcacaactctttgggggattattagtggcccattttcttggggaatcaggtggtttgtatttagaggtttatatgtcttctactttattgtgtccttttgttttccttttcacagatgacttgacattttggcacagaatacattttaaatccctggacagagtcatcacttaaatgaactagcccttgcttatatgtgcagtggattgtgaaatgcgtctactgtaataatatgcaatgtcttgattacctgctgaaataaggtggatagatggatttttattttatttaatatttatttatttatgtattttgagacagggtctcactgtcacccaggctggcatgcagtggtgcgatctcagctaactgcaatgcctcccgggttcaagcgattctcccacctcaaccccctgagtagctgggagtacaggcacgtgctaccaccctggcatatttttatatttttggtagagacagggtttcaccatgttgacatggtcttgaactcctggcctcaagtgatccacccgcctcagcctcccaaagtgctgggattaccattgtgagccaccacacccagccaagatggatttttaatttggagtttgtcactttttctgtactccagggtatggtttctcattgtctgaaacatagattttatttttcaagcaggctatattttgtggttgcctttaaaaacatccagatgtgacagacatttcctaatgaatactaattgtacttattttgtacaaaatattgtagaatccatagatggacagggtaggatctttgctttctgttatagatacatgtgtaatagggtagattatacttagataactgcagactacaatatcaggtgatatatgagtgttaaatgtttcactaagttctgcaggtatgctgaaagaacagtttctatcaaagaaagtaggtttctaggataggtaggatttgaatagtcagggattgggaggttggggacatcattccaagcaaaaagaatgtaaacactgctgtagctatagtggagaaaggaatgtgtttggggaatccaagtctggagcactgatgtgtgtgtgttaggaggaatattactgtaaagcaaattgggttcttgaatgccaggagcaagaatgtagattttagttgatagtaatttcagagccgctgaagtattttgagcagggaatgaagaaaggcaatttggtgatggcttgtaaatggatttggacaagatgagggttttttgagacagactgattgattggtgtcacagaaaagggagatagaggtgttagaagaatttggcaactaattggcaaagtttgagcatgtggggctgggttgggagtatctctaaaagaacaataatggtaccttcaactgaaatagcaaatcacaaggaaaagctgattctagtttaaggcaagtcgagtttcagaactttggagatttgcagttgtaggagtgaaagtaggtgagtattcagatgtcattcccattgttgaaaccttggataataatgtgtttattgtaatcctacttaaaatatgcatttctgtcagagtacaaagaaagatggtgtctatggagtgggggaaggagaattaccattttctaaaaacatgtcttggttttctgagtgttacttttgtaatgtgaagaacaataaaaagagttgactattttaagaaacagattcagcattatacaggaaaaagggaacttggaagatgtttctaagtccgaaggaaactaggaggaaaaaaaatggaattttggaccctttggagaatgctcagagttaaggagtaggaaataagagctggcatgagttcacagtttgaagaaaaggaggaattaagtggaagtataaaacttgaacttgatttcctaaagaatcctttaaaaaaaaatctaaaacttggctgggtgcggtggctcacgcctgtaatcccagcactttgggaggcaaggcgggcggatcacttgacgtcaggagttagagaccagtctggccaacatggtgaaaccccgtctctactaaaaatacaaaaattagctgggcatggtggcaggtgcctgtaatcccagttacttgggaggctggggcaggagaattgcttgagcctgggaggcagaatttgcagtgagctgagattgcaccagtgcactccatcctgggcaacagagtgagactcttgtctcagtcagtcaataataaatgaatctaaaacttaataggaataaatgttttccatttgggttatttttaacccaatttttaaaattaattttaatgattatgaaatgataaaagacatattcttttgagttttaaaacttgttaaaatgtatgtaccactacaaattcatcttgaaaataatttagtaatttggtgccttggacagctacagtgttacttgaaatactttggaaattagaaagtaaggaatgaaattttaaagaataatttagtatgtttggtctgttctcctgaactctgactttacaaaacctttattaccctttaagccttagttgtcttgaggcttaatgttcataactgaaaatattcatatttcctaattaaaggaagaatatmataactcttagtggggaaacattcttacaaatacttcattcaaatgactttttctttctttcttttaggtgtatttgcatccagtattgttctgatcttgtcacaacgatcacttttcaagttttacacgtacagctcagcctttctgttagctgcaacttcagtgttggtgaattattatgcttctttgcacattgacttctatggtgcctacaacacgtcagcytttggaattgagctgcttcctcgaaaaggtccctcgctgtggatggcacttatcgttctacagctaacatttggaattggatacgttacactactccagattcattccatctattcacaattaattattttggatctcttggttcctgtaataggcttaatcacagagctaccattacacatcagagagactttactgtttacttcttccttgattctcacattaaatacagtgtttgtcctggcagtgaaactgaagtggttttattattccacacgatatgtttatcttttggtgaggcacatgtatcgaatttayggattacagttattgatggaggacaratggaagaggattcgtttcccagacatactacgagtcttttggctaacaagagttacagctcaggctacagtgttaatgtacatcttaaggatggcaaatgaaactgattccttctttatttcttgggatgatttttgggacctcatttgcaatcttataattagtgggtgcgattctacactaactgtactgggcatgagtgctgtaatttcctcagtagcccattatttggggcttggaatattggcctttattggatcaactgaggaagatgacaggcgtcttggctttgttgcacctgttttattttttattttggctcttcagactgggttaagtgggctaagaccagaagagagacttattcgcttaagtagaaacatgtgccttttattaactgcagtcctgcattttatccatggaatgacagaccctgtattaatgtctctcagtgcctctcatgtgtcatcttttcgtagacattttcctgtgctgtttgtctctgcttgcctgtttattcttcctgtcttactcagttatgttctttggcatcactatgcactaaamacatggttgtttgcagttacagcattttgtgtggaactgtgcttaaaagtaattgtttctctcactgtttatacrttattcatgattgatggctactataatgtcctctgggaaaagcttgacgattatgtctactacgttcgttcaacaggcagtattattgaatttatatttggagttgtaatgtttggaaatggggcttacactatgatgtttgagtcrggaagtaaaattcgggcttttatgatgtgcctacatgcatattttaacatctacttacaagccaaaaatggctggaagacatttatgaatcgtaggactgctgtgaagaaaattaattcacttcctgaaataaaagggagccgcttacaagaaataaatgatgtatgtgcaatctgctatcatgagtttacaacatctgctcgtattacaccgtgtaatcattatttccatgcactttgccttcggaaatggctgtacattcaagatacttgtccaatgtgccatcagaaagtatacatcgaagatgatatcaaggataattcaaatgtatctaacaacaatggatttattccacccaatgaaactccagaggaagctgtaagagaagctgctgctgaatctgacagggaattgaacgaagatgacagtacagattgtgatgatgatgttcaaagagaaagaaatggagtgattcagcacacaggcgcagcagctgaagaatttaatgatgatactgactgatgaaaatagcatttattaatgattgaggtatttgtttaaaattcagttcatccaaaatggagtaatatccttcaccttcagtgtgtaaccaagcacaaaaacagtatcaatgttgaatctgtgaatggttttccgtttactgtgatgtgctactgtaaatatacctctttaattayttctggtctctttggtgacctgtttaaatttgtgtacattattgtacatagaataaaatgttttcacatttttatgacaaaatttgaacaaatagctttttaatagatgtaatgatcatatggtgcgtcacctgtgccaaatattcttcaatgaaattatataatgtaactttggacctcagtttttctttagaaatgggtgggagaatgaaaatgcaaatcaggaaaccacattaaagtcaaggaaataaaataatttgaccagaggataaaggacatgagagagtattttaaaactaaagaaaaaattagctgccagaagcaactgaggaccttttttgaaacttgagtagcagtgtaattgagctgagtttgaaagtcctgattcagagagagactgagggttgacaaataaactgtatcaactaaactttgatataaaccagaatgtgctaaatgttttttatgtaaaattgtatatttgttagccattctgtgtctgcagtattgtcataaaattgtcctttcattcttttgaagatattacaaaacaaaaatagttttttttaaattgttttaaactaagatactcaatgatataaaaacatcctgatctgattttacgagaaaaagaaggggaatggtggggaatggtgtgtaccgatatatagtatttctttagacaacttgcagataatttctttattgaaactatcaggaagttttactatgaaattttacatacatgatggaaagtggaagacatataccaattatattccaggaaaaaatactttaatagtattgttatatagtgtattggctaattccagtggatcctcatctctcactgctgacattatctccaatatttgactaaaacaaaacaaaaacaaaaatggttaaatctccaagtatacatttagttctaaagctatataatatttttccacacaaaggaaaatattggcacacctttaatataataaagcttaacagttattaagtttttcagcaatatcaatagaaaaacttactgccagtaactggaaacagatttatggactgtcttgcatataactagagctaagaaccaggttcaagtaaattattaaagcagccatctgtattatgttcaccaattatagcattaactgagtggaaatgaagagtccttttcaattgtgagtcatagcatgttcattagtgggtcatgatgagcattttaaacattgacaagtacattgtactcaataagggtaagtactgttccattttttgttaggttttattatgtatgtgtgtcctaagtcacaacgtaatttgtactgtgggacagcagccacagttggaaatctactgctagagaactagtccttgagagacagcaaatgaaggtattaggttgctgcaaaagtaatatttacttggaaaaatgtgtggttattgagggcgagggctttctgtacctctacccttgcgagagaaataagcccaggtgtccatccttcagtttctttctttctctgtctctctcttccttcccttccctcccttcctttcctttctttttctttcctttcttttttttttcttttttctttcttttttgagacggcgtcttactctgttgctcaggctggagtgcagtggcacgatctcggctcactgcaacctctgccgcctgggttcaagtgattctcctgcctcagcctcctgagtagctgggattacaggcacctgccatcacacccagctaatttttgtatttttagtagagacggggtttcactatgttggctggccgtggtcttgaactcctgaccttgtgatccaccccacctgggcctcccaaagtgctgggattacaggtgtgagccaccgcgcctggccgcatctttcagtttctgtgcttacagtaatgatgatccgtagtgtctccatacttattatatataagtggaagatttttaatacatgaattagaaagttccaaagtccaaattgaacatttaaatattctttgcctaagctttttgttcccttagtatcttaaatgttaacacctaaaggaattaaggatggagatctaagattaatgggaatttaaaaaattgttttgtaatgtgacacaaaagccttgcttgatgtttatactaagcaaacactacactaaaattttatctgacagtcaagatacactaaaagcaaatctattaacatttaaattaagacagtgaaaatccatttttcttaggaaactactgaatgtccctctgtatgcacttctcagaattggaactcttgattaatgctgctgatgacacagttttgaaggtcacagcagctttgctaagattatattgcatagcaaattcattttattgaaatcgcttataagaaatctattgggctgggcccagtggctcatgcctgtaatcacagcactttgggaggctgaggcaggcagattgaactcaagagttcgagaccagtgtgggcaatatggtgaaaccctatttctagtaaaacaaaaaaaattagccaggcatggtggtggacgcctgtagtcccagctactcgggaggctgaggcaggagaattgcttgaacctgggaggtggaggttgcagtgagctgagattgtgccactgcgctccagcctgggcaacagagcgagactctctctccaaaaaaaagaaaaaagaaaaaaaaatctattggagcttaggacatcctattttactgtttgataatgcagtttatggaaatctttcttcgaataacccttctgtagccaagccatgctatttccatacatcttcagtggtcaaagctgcagttattccaaaatgaatataaagttgtttaatgtccctgagaatttagtggcttttgtttaatgtggcacttttacagtaagcacaggtttttgtttttttttttgagagagtcttacactgtggcccaagctggagtgcagtggtgtgatcttggctcactgtgtgtgatcacacagtggtgtgatcttggctcactacaacctctgcctctcagattcaagtgattctcctgcctcagcctcccaagtagctgggattacaggcgcccaccaccatgcccggctatttttttgtatttttagtagagacagggtttctccacgttggccaggctggttttgaactcctgacctcaactgatctgcctgcctcggcctcccaaaatggtaggattacaggtgtgagccactgtgcccagccaggcaaaggtttttaaagtcttgcaagatctacatgattcctaccctatctcctttccagcccttccccatactgatacaagttatagctttaaaaaaaataattgccactctcctgcttaaaatcctttgggtagtgataaaatctaagcaaaatgctggcatataagagccctcacaatctgggctcactctaccttcccagacttgacttctgcttacactgtgcatcctactttctgccacacttgttcctctggattagccaggcccttctgcagtctgcctttgcttaaggtgtttgtttgtctttctctggcctaactcccagtcatgggtaaacaactgaaatgtcaccttggtataactctctcctgtttcccctcaaagcagacagttgatgtgccctatggtcctggtcatagattcctacttgtataacagcactactatcttggactctgtctgcttatgtgctccaggagggcaggggtcctcgcctgactcactgaatgccttatctaaagtgccaggcacagtgtacctattcatctggtggatggataaagacagggactgtcttggttcttcctgtgtagccttagtaacttgtacctttcctgacatggcaggggctccaaaacatctgttgcaaacaatgtatatctaaaagacctctataaaaataattagaatgtaaaactgttaacagaatggaggttgagaaaatgactttgcaagtagcaattaacttgccaactcataattagcagtagattagaggattgtgtattttttaaatgtggtttaaatcttttcagcttgcagatgctagattttcctaagctctgcaactaactgaagaacaagtattgatgaagccttcacagttcttttttttttttttttgagatgtattttcacttttgtctcccaggctagagtgcaatggtgtggtctctgctcactgcaacctccgcctcccaggttcaagcgattctcctgcctcagcctcctgagtagctggcattacgggcatccgccatgacgcctggctaatttttgtatttttagtagagacaggatttcaccatgttggccaggctggtctcgagcacctgacctcaggtgatccgcctgccttggcctcccaaagtgctgggattacagatgtgagccaccatgcctggccagcctttatagttcttaaacagtctacatttaaaaacaccttgaaattttgtcttgcaaatatatagctaaagtcaacagctataatcttacataagattaaggaaatataaaaaacttacttggatacactgttggcaactacttcctgtaagctggctgctgtcaaaataccagtttcttttctctagtgtccttttagttccccaaaaaattggctgggtgtggtagctcacgcctgtaatcctagcactttgggaggctgaggtcaggagtttgagaccagcctggccaacatggcaaaaccccatctctactaaaaatacaaaaattaactgagtgtggtggcatgtgcctatagttccagctacttgggaggctgaggcaggagaattgcttgaacccaggaggcggagattgcagtgagccaagatcactccactgcactccagcctgggcaacagagcaagatggtctcaaaaaaaaaaaaaaaaaaaaaagatttagaaatactgtctcatcactgaatttgcaagtacttacatttctttattttttaaaattttctttatttctttagagacaggggtctccctatgttgcctgagctgatcttgaactcctgagctcaagcagtcttcccaagtagctggaatacaggcgcaggccaccatgcctggctgcttcagttttaaagactttgtcagctcaagcatgttaataaaggaaaagaacctttcaaacatatttttatagaataattcttcactgttcttatctggcttatcttctaatactcttttcctgttaaaaactactgaaaaaaaagatggtgcatatgcaatgaatagtcttaaaagcaacaacctattttgttttcttttttacccctcatgaagacacagtaccaattagtttttgtgaatgtgttataagtatgcccaattgtctgaattggtaaatcatataagactgatataatctagattaatttaaattatctgtttgtgcaaacaaaagaaattggattatgtacccattaaaatgatataaccaccttctcctgtttgttacctttacagctctttgacagatgggtaatagcccctcttttcacttgtgctatatatatatcaccatttaaaagatgattctgatctgctgcttttttaggaaataaaacgtgctaaagtcccaccccctttgattggaaaaagggggtaggaaaaaaggggtttgtccttaagatcacttatccttttgttctgaggcttaaagaaatgtgttatttcttagatttatagaggctgtcaaatcatttaaatccaaaatattctgctaaggctttcttgttaccaaagagtagcaggaagctgcagtgagaatggaacttaaaccaggtatgcaaattcctccaaatcactgcattaatatggtggtcttgaacctgaacttcacttggattttgcaaaattttaattctgtcccttgcgttaattttataagtggcatctggtggttaactaatgattttgaagaccatgaaagcaaaatactcacattatatggcagggttcatttctgtcttttaagcagtgcccactttcccacttctttttggtaggaaatgcagttcttatatattttgatccagcatgtgtacttttgactccacaccaaggtgcatctagttaagcaaagaaagtgtctcgtaaggggtttacatttttaaaaattttttatgaccattatctaatatataacctctaaatgataaaccgtgattcagcttccaaaatggcacagttatttcaacagaaaacagttctaagaaaagcacaagataaaatcttgaattgcatcttaaataccttctaagactcacttctattccttttttctgctaacattgttggtgtgcagcatgctttaaaaaaaagacctaaaccttaaatacaattgtataacaacatgaaaacatttaagttaaacagtttt

SEQ ID NO: 93873 - DNA, 63358 bp, Homo sapiens
gagattacagcaattcagtcatattctcaggatcagcttctattctggctctcttgctatttccacaacttctgcagttacttcttctgctgaagtcttgagcccttcaaaatcacccacaagggttggaatcaacttcttccaaccccgttaaagctgatattttgatctcttcccatgaatcataaatatcctcaatggcatttagaatggtgaattctttccagaaaattttactttgcccaaatccatcagaggaatcactatctatggcaactataactatgcaaaatatatttcttaaataataaaacttgcaagtggaaattactccttgatccatgggctgcagaatggatgttgtgttagcagacatggtagcaggtctcaacaatgggcttaaaagattcagtaaaccatgttgtatacagatttgctgtaattcaggctttgttattccatttctagggcacaggcagagtaggtttagcataattcttaagggcctcaggattttcagaatggcaaatgaacaatggcttcaacttaaaaccaccaactgcattagtccctaacaagagagtcagcctatccttgaagttttgaagccaagcattgatttctctcaaggtatgaaagttctacatggtatcttattccaaaaaaaggctacttcatctccactgaaaatctgttgttaagtatagccaccttcatcaactatcttagccagattttgtgtaataatttgctgcagcttttccatcagcacttgttgcttcaccttgcacatctgtgttacagagatggcttttttccttaaacctcatggaccaacctctattagcttccaactttttttctgcagcttcctcatctctctcagccttcatagaaatgaagagttaaagacttgctttggattaggctttggcttaagggaatgtcgtggctggtttgatcttttgtcccaaccactaaaactttctccatatcagcaataagacagtttcacttatcatttgtgtgtttagtggagcagcacttttaatttccttaaaaaaacctttaatttcctttgcattcacaacttggctaaccagcggaaaaggccttgctttctacccaccttggctttcaacatgccttcctcactaagcttaatcatttctagcttttgatttaaaggaagagacgtgtaacggatttaaagtgagagacatgtaactcttcctttcacttgaacacttagaggctatggtatggtcgttaattgtcctaatttcactgttgctgcgtcttagggaatagggaaccctgaggagagggatagaggcggaggaactattggtcggtgaaacagtcagcacacgcacatttatcgattaagtctgctgtcttatgtgggcatggtttttttgtgccccaaaacaatgacaatagtaacatcaaaggtgactgatcacagttcaccacaactgtgtgtagatagagtaataataaaaaaaagtttgaaatattgcaagaattgccaaactgagaaacagagacagggagtgagcacatgctgttggaaaaatggtgcccacagacttgctcagcacggggttgccacaaactttcaatctgtgaaaatacaatatctgccaagcacaataaaacaaaatgcaataaaatgaggtaggcctgcatctgacaactgtcaggaaataagtctcctagctaccccttgaagggcaagtgatttctgaggctgaggtgtgggactgaagaaacaaagtctatttctcagaaggcagtcatcataattctcacctaccttgtagcaatcgtatctctcataggaggtgcccccaggagagtcagggaagatgtatggctgtggatgctgacggtaccagaattcttcctcggcctccttcagcagctgggtggccttcgccatatccttttcattcttatgttcttcaaaccgggctctcatcaaacaagcaaagtatcggtatttgtctcttaaaccaaaatgattttgaagattagaaatgttacctactcacgtggtcagtgttgctgtctgacaggaggctgcacttctgataccttctggatgggcagtggacctaccccaaccctcccaatggagcagccgtatcatcatggctgcttcctctacagcccaccaaacagcagcagcaaaaaaatactgtattaaatatataccctaaccatttttctcctcttacatccaacaatggaatgaggatttaaacaaaaaaaaaaaaaaaaaaagaaaagagcattcgcaagagaaaagctataacctctgcaggatcattcaacattcattgaatgacaacttccatttccttctatcttgtgctagtcactatgctaaattctggagatacaaagatgaataagaaaggtgttacttggcagaaacagtattgcttagctcatacagagctaggtttgtatcctgactctgacactagctgcataaacttaggcaagttaaagtcaagttctaaagaaactgggcaaagatcagttaggaggttttgacaataatctaggacacagctgacgagggcctgaaagtacggagctgtgatggtgacaggagacaggggagacattgagacttccaagttatgagaataggctctccagtcagactgtatgggcctgaatcttagctctgccactactagctgtgtaacttggggtaagttactgtcttctggtcaggtgcggtggctcacacctgtaatcccagcacgttgggaggccaaggcgtgtggatcacctgaggtctggagttcaagacaagcctgatcaacatggagaaaccccgtctctactaaaaatacaaaaatgaggccgggcatggtggctcacgcctgtaatcccagcactttgggaggccaaggcagggggatcatctgaggtgaggagttctacaccagcctggccaacatggtgaaatcccgtctcagctaaaaatacaaaaactagccgggcgtggtggcaggcacctgtaatcccagctactctgggggccaaggcaggagaatagcttgaacccgggaggcagaggttgcagtgagtcgagattgtgccatttgcactccagcctgggggacaagagcgagacttcatctcaaaaaaaaacaacaacaacaacaacaaaaaggccaggcacggtggctcacgcctgtaatcccagcactttgggaggctgaggtggaggtcacctgaggtcaggagttcaagaccagcctggccaacatggcaaaaccccgtctctactaaaaatacaaaaattagccaggcgtggtggcgcatgcctgtaatcccagctactcgggagactgaggcaggagaattgcttgaacccgggagacggaacttgcggtgagccaagatcgcgccactgcactccagcctgggcaacataagcgaaactccgtctaacaaaaaaacaaacaaaaaaagtcttctaggccacgggttcctcctctgtaaaacagtggcaataacagtgtgtatatcttaaggttgtcataaacagtcaataagataaacacactttaaaaagtgcctggtacatcccaagtgttaaataatgtcagttactaatatcatactggaaagagaatttataaaaaccagtgtctaattatacatggtgtatgagtatgtgtgttattggcaaaggaataaggagcaaatacttgagaacaattctgagacttaaagctcagtaactgaattactaataataccattagcggaggcagggaatttgggaaaagagtcagaatggggagtgacaggaaaacaagtttgatttcaaagaatttagataaatggagattgagagaacggttggtgatcttttcaattttttttttattattattttttgagacaaagtttcactcttgtcgcccaggctggagtgcaatggggctatctcggctcactgcagcctctgcctcccaggttcaagcggttcttctgcctcagcctcatgagtagctgggattacaggcacccaccaccacgcctggctaatttttgtatttttagtagagacgcggtttcacatgtaggccaggctgttgaactcctggcctcaggtgatccactcacctcagcctcccaaagtactgggattataggcgtgagccatcatgcccagccaacagtcgtgatctaacaagcaattcgaactacagctctagagacaaatgagcgcaggtggtgacagcactaaatgaggctgcccgagtacatacaacaacacagtatgcctaggatggaaccacagagaacagcacaatgagggcaaatggaggaagaaattaaggcaaggattgagaaagaatgtcagatctaaaaaatgctgagccataactgtcatagtagctagtttatatcattttcctctagaactatggactttagtattcccagctatagttcagtattgcttgaattctttttttcatgtttaactttttttgacacataattattgtacctatttatggggtacatgtgatattttaatacatccatataatgtataatgatcaaatcagggtaatttggatattcatcacctcaaacatttaccatttgtgttgggatacctgaatccctgatggctcaacttccttcatcatcgatttgtttacatgtccattttccccactaatccgtgagctgctgctgctcaaaaatggatttactaacatttatatatttagcatagagcatagaatctgaattgcaaattctgtcaaatcaataaataaataaggaaaactcaaggaagaaactaacaatcccatcacattgtacttggccatcttcctgccaaatcaagagaagtatgtcagtgattttctaatagtcacatatatgcaatctgggcttcgagggtaccctctgtaattcttccaggcctactccattttccatagagtttttttcccagaaggccttcttataaaactacgtttggagagtcgtaagactggagtggaggcgaggcactcacacatcttgggttgttagcccaccctgcaatgaatttaggtgattaaaatctacacattttaacactatgttctcagactagtctcagacggatagaggtcgaaagagaattatgtaagaggtgaaaaagatgtaaaggtaatgaaaaggactagatgaagctaaaaagagaaaagctaatgggaggggtgggagaatgatgatgctttggagaaagacctaaattttaaccctggctcagacacttagaaactctatcaccttgcgcaagttaccagctgtgctcatcttcttatctgtaaaataagcttaagataattcctaactcctagagttttgcagactgaagaaaataatgcatagtttattgctgttaatattggaaaggagaagatcgtgaagaaaacgattgagcgagcgctggacccatgacaattacaattttaggcactttcctttatttcacttaattttcctgcgaccctctgcgctggtcgtgcgtccgttttactaaacaaaaagctgacgcccagacccgacaagcaactctacaaggtctcccggccataagtggcgaagcctggatttgaacccgggtctaccataggattctgtgaagcgagaggccaccttccaattccgttcccgaagtccttgaacctccaggtacccaggggcctctccacctccatggggccccragggtcacctccccgagtcctgggtccccatcccttacctctggacgcaccacgactcgaggtggcgtagcgcccgcttataaagccgcaacaccttttgctgatgggtcaggtagggtcccgacgccaagaacgccattacggcgctgaccttccccggccgcgcggagagccgggaaactgcacgcctgctgcgggtgactgagcggggccagccggaagggcggagttgccggcggccrcttccgcttccgytggggaggtcctccatgcgcagtcatgagtcgcttcargtttatcggtaagaggagcgttttccacgcccttgggtctttctgacttgtcccgggcgtcggtcaccaaggtcacaggacccaggaattgcgccctccggcattgtaagggttgaaagggccgctcagtggaggagggcgcggggaggtttctgggtgctggtaatgctctggttcttgatctaggttctggattcacgagggtgtatttatttgtaaaaattaacaagccgtacagttatgatttttgtgctgttttcaacatctgtaatgtattcagttttttaagaagaaaactccaaaaaggccaatcactatgtttccattcatcccacgtgcacctcccggcccttcccctctgccttggcggagaggctgaccgcttctggggaccaattcactcaascattcattcgttcatatcatagttagtgagcgcctcaagtgggcctggcactggcctaggaacacagggcacaaagctcccagttgtactgtcatcaccatctggtggagaaactagaaaacacaagtaatggggagaaaaacaaactgtacttggcaagtacaatgatccagtcggcatcagtagaacgagagggagaatgctgcgggatttaaatgggcatgatcctcgttttgtggggtttccagctacctgaaggtgggaaatgacagtgatcacacctctgctttagcaaggtaatcctgatagctattatgtaggttttgtgggaaatagggagaggtagggaagcatttcaagagcttaaactagggtaatggaaaagagagagaaatggaagagatgtgtgcagcatttagcagctgagtgttcatggccggtagtagagagtgaacaaagatgactcagggtttggaaaagtacttaaatatgaaatggaagcatgactagtttggcggtgaagagaggtacccaggtccatttggattaggttaagtttgagataattataggacatccaggtagagatatctgggcaattgggaatgtggtctggcaatcaagagattaggattatacatttagatctgagagttatttaagcagtatttttttttttcaaagacgttgtgctaagtcctgtggaactgtaaaatctagtggtgcagttttcagactggagacctaagacctatgtactgtacagtcaaaagcaaatgcaggggagaatatgttaagtgccaggaaaaaggttttgaaattgctgtgggaaagcctggagtaggggtttggggaggggttgtcaaataagacattgccgtgtcttagcctttccatcctaacctttgatataattgatgagggagatggaataaagagccatgaagtactccgtaaagaaaggccacataactttttaaaagtgtgtttatgttatacaaccaaattcctgcctcaagttaatgtcttaaatccatcctccatgtagactccattttggtgtatctaaaaatcaaatcagctaaatgtttcttttgcttcaaatctttcatttacgctcctcaggatagcctaaatgcttwcacaccatacaaagcccttctgtggtccagtcctgcccacttttctagcccatccctgggctgctctataaacacttgtgcatgctgtttgttacctctgacaaggttttagagtggcagtttggggccaaaatattcctctgcctaccaactaccctgttgcctgtctgcctactcactccttaaaacttataccacattatttataattaaatatgagtatgcctttcccactagatcaaactcttaaggcagatactggtatggtatttatatttttttcctaggggcgtagtacaatgactgtttgggaaagtatgaatgagtggctttagtgctaaggtgataagaaaattagtaaagggattagcatcagataaaataagcaagaaaagacttcttaaagaaggtgactttattggaataaataattgaaataaatttttttctgtatggtttcctttagccccactctcctaaagtaaccatattaaaagtttgaagtatagccttccctaattttttaatagattgttatacagattcataaaaatacaacatatcaaggtttttttttttccttttgaaacagaaatgagatcatattatgcattctatccttggtatatgacttactctgatatttaatctttcagtttgtgtcatttaaaaaattctgcccatgaatcgctagactaatttcttagcctaataatgagttctgaacaatattttgaaaaacatcatattaaatccctggaacaagcttcacatgggacaattgcatgaaaaattgamcccattttatgaaaattaccttagattttggtttaagacagctgaccattgtaattctttctacatttctctcttttctacttgcataacaagtggctgccccttagaactataccccaacagtgggggtttttgtttgttttgagacagggtcttgctctgtcacctaggctggagtacagtggcttagatcatggctccagcattgacctcctaggctcaagtgatcttcctgcctcatcctcccaagtagctgagactagaggtgctcaccaccataccaggctaatttttttttgtagaccactgtgtcctgctatgttgctcaggctggtcttgaattgctggccttaagcagtccttccacctccgcctcccaaagttctgggattacacgtggagccactggccagcatgagaatttctttagcccagcttatactctcttttctgtctccacaagtggaattctattccctgggtgttatttacaaactcttccactctcaaaaatacttctacctgtaactattatatgccagaatctctactgcattgatcttagactacatagtacaccaaaaaatgagaaatatctgtgcaagaagaaaatgcaaaatacaaacaacagtgaaaataaaaacatcatattccattcctgatatagtttagatatttgtcccctccaaatctcatgttaaaatttgctctccaatgttgaggtggtccagtgggaggtgtttgggtcacttcccaacatccatctcatgggggtggatccctcatgaaaggcttgatggcctccctgtggtaatgagttcacactggctccccttccctttccaccaggattggaagcttactgagatcctcccaaaagcagatgttggtgtcatgcatcttgtacaacctgcagaaccatgagccaaatacacctcttttctttataaatcacccagtctcaggtattcctttatagcaatgcaaaagcagattaatacagttcctccaaatcacacataacaccaccatgtctatctttccagatcttctgtaggcataccaaacaaaataagatcatactgaggctactcttttgtrctctgcttttttcaatcacagtctccacctttccatttcaggaaatgttcatcttaactagtaccaaaatcatactcaaatttttcctgttgttccaaaaatgtcccttggtggtcatgtccaaaatggtatcccatttagagccacacatttggttgttccttaaatttttraatcaagtgcagaggtttgcaaactttttccttaaagggccatatagtaaatattttagactttgagggccacgtgatctctattgcagctattcaactctgcccttttgtgtactgtgatgtaatagtaaatacgtgtgtgttctctgctcccatttctttgtgcacaactcctgaaacccttggaatctcctaagtgctaagtgtctttttgtatgctgctaagatgactgatggctgggggctcctggatagcctcaggatgggggtttgcctaggaaaacccatcatgtgattagagagttggaagtttcagtccctcccacccactcccacttstggggaaggggagagaaactgaaggttgagttgttcactaatggccagtgatttaatcaatcatacctacatggtgaagcctctataaaaacccatacatgtctctatgtgtctcttccacctggccgtttttgaatggcatctttttacaatgaatgggtaataagtaaagtgctttcctgagttccgtgagctgctctagcaaatgatcaaacctgagaagggggttgtgggaacctcttattgtagccaagttagacaagttgtgggtaacctgggaacctactgcttgtaattggtatctgaaatggggagagtcttgtgggactgagcccttgacctctgcggtctgatgttatatccaggtagatagtgtgagaattgagttaaattataggtcacccagctggtgtcagagaattggttgttgggagaggaaaccccacacatacctgacgtcagaagtgaatcctcacgcctgtaatccaagcactttgggaggccaaggtgggaggactgcttgagcccgggagttcaagaccagcctgggcaacaaagtgagaccccatctctacttaaaacaaacaaacaaaaaattcagagtattgtgagtatgagaatactgtaggagaaagcagtttgcattttttcctatctcacaccttgtcattcaaaagcaggtgatagacagtatgtaaataggtgtggctatgttccagtaaaacttacggtcactgaaacttgaagttcttataattttgatgtgtcacaaaatattcttttgattttcttcaactatttaaaaatgtaaagtcattcttagcttagaggcaaacaaaagtaggcagtggcttgtgggccttagtttaccaatcccttgctctagcgcatttcttttttttttttttttttttttttttttttttttgagacggagtctcgctctgttgcccaggctggagtgtagtggtgcagtctgggctcactgcaagctccgcctcccaggttcacgccattctcctgcctcagcctcccgagtagctgggactacaggcgcccactaccacgcccggctaattttttgtatttttagtagagacggggtttcactgtgttagccaggatggtctcgatctcctgacctcgtgatcctcctgcctcagcctcccaaagtgctgggattataggcgtgagccatcgcgccctgccacacatttctttttttaatgtcactgacttaccaaagcagctgkgctggttgtgcctgtgaaataaaaataaaattctaagccccctaaactggctgaacagaacccccctcgaccaagtagaccccagaaaaacatgaaaaactaagattcccaaacatgacaagatgaggggttggtcctggtctccttccttactaaccaataccagacttttttcctacaagttgaacagaaaccagccctggaaaaacaaagattggaagacttgctcctctgctgacttcagccaactgcctgacattgggaccagctcccctccttttttgcagtttcaccatgacagctgaccagtttcacaaggcattccttcctgtactgagggcagttgccaccccctcaggcctcatcaaggctaccaaaaaattactcctgggatcccctctcgttgtatatgtttctcattcaatttaggccctttgcacctgtcccctcactcagcatctttaagccagttgattgacctcctatgagatacttttctcctcttctaacctaaccataatttactgtaacctccttaatgtagctaccattttgcgttttttttttttgagacagagtctcactctgtcgcccaggctgtagtgcagtggcgccatcttggctcactgcaagctccacctcccggattcacaccattctcctgcctcagcctcctgagtagctgggactacaggcgcctgccaccacgcccggctaatgttttgtatttttagtagagacggggttttaccgtgttagccaggacggtctcgatctcctgacctcgtcatctgcccacctcggcctcctaaagtgctgggattacaggcatgagccactacacctggccccgttttgcctttaataagagattaacgcacccaaagactgtgttgtctttacagacacttttctctcacctcatatagacttaagggagacccccttacccactaatggatcctttctcaaaaattctgctggcttccattatgcagcctatgtggtggtctctgtgatgggaatcattgaatcaggcccccagccaactgcccgatctgcccaacgagcagaattagcatcccctcacttgggcctgcctactggcctggggtgaaacggttaatatttatgcagacagcacgtatgtctttggagttgcccatgattttggcatgctctagaaacaaagaggattttttacttcctctggacaacctattaagaacaaagactaggccaggtgcagtggctcacgcctgtaatcctagcactttgggaagccgaggcaggtggatcacttgaggtcaggagtttgagaccagcctgaccaacatggtgaaacctcgtctctataaaaaacacaaaaattagccagacgtggtggcatgcacctgtaatcccagctatgtgggaggctgaggcaggagaatcacttgagcctgggaggtggaggctgcagtgagctgagattgcaccactgcactccagcccgggcgacagagtgagactctgtctcagaaaaaaacaaaaacaaagactgttttgtttctcttagatgccattcaggctcattgagccctagctgttatcatagtcgaaggacatttctctgacaagacagaagacagcgaaggcaaccacctagtggatgcagcagctaaagctgccacccagcatgtggctccttcccgagttgtactcaacccactcctcctcctcctcctcctcctcccccccttgctcttccttcttccttgctcccctccccatctgaagacctttccagacttattttcacaaaagacagtcttggagtctggaagagggaaatggatgaaacaaaattgcgcttgcaatccccagacaaaattacaggaaggtccaaatggacatccagtcctacccagcaccctgcaaagacaaacaaccttcatacataatctaacccattrgaatccagacaaaatgattcagyggggtagacagtactactgtatggtggctctctccagctcttgccccaccgctatgtaaactttgcaatatctaccctcagtataacccaggtgaactcctgaagctccctccaggacaatttcctctcccctagggtcccttaaccwtgtgacaacttgatttcatttagttaccaccatcccacagattaaattttgttcttctaatggttgacgatgtattctcattgaggtaggtctttcacctgtaaacaagcaacagctatggtggtggccaaaatgctgcttgagaaaaaccattcctatctagggtgttcccactgaattccacagcgacagaggcactcattttacctgccaaatactagaacaagttttttaaatctgcccttttacagcactttcactgtgcctattacccccagtcctctgggctagttgaacagtctaatgggatcattgaaagcgagctggcgaaagttacagaaacttaacctgtccttgcctaaagctctcccattagcattactgattctgcagtccattcccaccagtaaatgtcagctctccccttttgaaattgttactggttggtttgtgcacttagaccaggaaatattttctcctgccaaatgacaggagggaactttaggcttattgccaggggcttgttaaagctataaagatcagtcactgcaagttgtagaatctttttacagcttcccaacaggccataaactccagtattaccacctccagcttggtgatgacaagtagtggaagagacatcagttaaaatacttcatccagcctactggatgggtgctattaattaatccttgtgctgctaagttatagagattgactcctggtcgcacatgtctcatctgaaaacaacaacccttgctgaatcttggaagttggtgccagtctctacacgagacttcagttaaccagagcctcatctttagacccagaaaaaggcaatagtcaacataaactgctttcatgagacccagggccaggactgtattcaaagacactgggtctcatttaataatttgcctctatctaaactaatagaatttgttccatgcctttctgctagataacttcgatgtttagctacctgtgtgcttcctcttcttgtctttatcagaactgagcagggcttatgacccccactcctgaggacatcattgctttgttcctgtagtgagatgttctcttacttaaggacagtcccttaagtttgtcagataatccccttggatttgtatgggatttatggtttttcccttggttcagttttctgaattgttaaatggctgttccctccattccttttactcatacctgcactgtcacctttccctctctttgcaattgtccctctgtcttgtctcaatgcagagaatggcatgataacactttagttaagctgtcccacatgttgctagtagaaggaaacctattggattgctggatttgccaacaacttccttgatccattcataatagatatgtgccattggtaatatctgtcactgactgctcagatgtccctaatgtcaccacttacccagaccaacccctttccctgttgattttccaggtccaattccttcaaagcccagatattgtcaccccttgttttgatgtgtcctgtgtttttaacattggaaacccattctttaccatgggaccttctttgttgttgttgttctttgggttttttatggtttttttttgagactgagtcttggcctgttacccaggctggagtgcagtggtgagatctcagctcactataacctccgcctcccgggttcaagcgattctcctgcctcagcatcccaagagctgggattacaggcacctgccaccatgcccaactaatttttgtatttttagtagagactggatttcactgtgttggccaggctggtcttaaactcctgacctcaagtaatccacctgccttggcctcccagagtgctgggattacagacatgagccactgcacccggcctaccatgggaccttcttgacctatgaactactggatagacaagtgtcatctacatcagataaataaagttaaaaatatatccctacagtgcccacaatatttacatttaaaataagtgagtggattctggaaagcttgcaagagaaatggcccatagtttagtttggtgatgtcagcactccgcatgaatacatctgctaattaagacatcctcaggagtatcacttgtgccccccattcaggctgtgtgtttgtatgtggcataaggtctgatccacctgcacagctttgggcacactgttgcctcggcagcctacagttagaaggttcatgcttgctgagatattttgtaaccccccgtatccttacacaaacttacagaaggaccccctttctctccattattaaactaaaaggtctgtgttggyagggtgtgaaggtgatacagatcaaagcatcctgggaatattaattccgagtgttgggatttatgtcaataaggatatgatttgaaaagtctttgccactattagtcacattgttgcgggatttaggagtatgagagacctcgggttgaaacaggagaatcttttattgagtgcactcaggcccagcagactcaggtccaaagactgagcccgaaacaaagacagcacttgacttttatacacacttcacaaaagggtgtgggctagcttgaagcaagcttacagtggtgtgaaagcagggatacagaggcaggacagactcaggattgctcatgaccattgccaagcaacccaggtgtccgttatctaggtttgcctaggcacgggcttatcccataaccttcactgtggggcccaggcagctgtagttcaggcctactcaggcttctcgtgacctttgttgtacttcttagataaaacagaatacttgaagttactagttacagagaacaagaatctataaactcataccataaagcaaaggaaaatttgtttttcttctccttatgttgagggagtgctgggagagtctccacagcacattagataccattatcaagacttttcctgggtctgggttgtgcctgttgccgcctctgggacaagtcagtctaatacaggaaaacttatttctctatctttttaattttatttttctttaatttcccacctcaagatagctgcagacactgcaaaaagccttgtagctcaacaaaagtctctaaactccttggctcaagtagtactagataataaagttgccgtagattttctcctagccaaacaaggagttgtttggcccatacctcctgttacataagtacttcaggtgaaatagaaactgttagaggccgggcgcagtggctcacccctgtgatcccagcactctgggaggccgaggcgggaggatcacaaggtcaggagatcgagaccatcctggctaacatggtgaaaccccgtctctactaaaaatacaaaaaattagccgggtgtggcggcaggcgcctgtagtctcagctacttgggaggccgaggcaggggaatggcgtgaacctgggaggtggagcttgcagtgagccgagatggcaccactgtactccagcctgggtgacagagcgagactccatctcaaaaaaaaaagacactgttagagaaagactatccaaacaaccttaaatggttacaagagctatgaactactaatcctctcaatgatctatttagttggcttccaactggcctgggaaatccctttcaaactgctaagtgtttgtcatattcatagtctccatcatactttctttcttaacatttaaattacttataataggactgcaagaagtcccctgttaaaaccagaattatgatggctcagtgygtagaacttacaggcaagttaattttgtagccattccttttggctcttatatctcttataccttacgggttagtgagggcctgccatctctctattcctggttgatctaggatgtccaattggctatcgtagggatggatctgggacagatagccacaccaccctggcaatgacatgggacaaaataaagatttggctattggtgctgcttgcagcagatcgtggctaaaatggggaaacatgaaataaaagtaaatttctaagcacccccctgccccacccgactgactgaatggacactaccttggccaaggagaccccagaaaaactctgaaagctaagttttccagccatgattagatgagagtttggtcacacctcagtacacccccttcctcactaaccgataccagactttttttgtaagcgttaaatagaaaccagccctggaacagaaacaagactcactcctctgctgacttcagccaaccacctgacaccacagccagactcccctccttttttgtggttttgacatgacagctgaccagtttcaccgcgcattccttcctgacaagtgaccaccagtcacagactagttctggctggtttactcaggctgtgcaccttttgacatataaagcttaattttactgcattttaatgttaagtctccaccccaaagtgaacatggggtttgtgtaacatgtatgtttgcttatcatacacgcatgaatccacctttcatgaatatacatagctcytcctataacctgttaaatatgtacgttagccagcccatttagtgtaaaactcctgttccccacttcttcctttgaaatggttgcttttgttctcagccaaaggctctgcttcccagcctgcaggttgcacgtcaataaaagaaataaagttcttccctaatgtatagatctcgtgattttaagtcaacaccctacagaaagtctgtctcctggctttgtctgtttgctaaatagtagtgtcattgagcttgttctctaatcccccgtatttgctataaactcggggttatatctaaagactagcaatatctaaaaaacaaattgtgccttatttgctgtccctttgtattcctagatcataggtgacagtgatgtgacacrattcagtgagcccaataactgaggcttcaacttaagagttgtggttttctcctggttacaaacagtgccgttttctactcttactttgttttgaaaacgaaaagtcaatatttgaagaactcttaaataataaagtaggtgctgcttttcaagccagctatttgaagaaaattaatgaaaaagaaacattactgatctatatagggtgacatgctactgaatgtatgaatccttcagttttctcccctaatgagaagtagcaattttccactttgccttgtttttsttcctatcattccctcccacccgtatctcttactttcttagcttttcaagctacttactatctttagctggatctggctagacattggttttcatacagtatttgtctagtttgtttgagtttacatgccaataggcttatgtctaatagagacttttaatttaaaagatactattgtcaacctcaaataaccaaaaaggtcagaatctagtttacagagtttattcaagcacaacagttgaggactgcagcccaggacacacttccaagttgccttggggagtgctccagagaacaaaagagaggctcaaatttttaaaggacaaatcaaaaggtggggcgcggttacaaaaatggttaatcagggattctcattggtttacagaaataacattggttagtgattggctatgtattgttgaactatagggtgtatggcattttagggccacttggcgtcagtctagagcccacatagcaagcggcttcaagaagtaattatgtagctcaaaggggagtgagcttggactgctgtgaacattttaaatgcctttctgggcctgatcatttaaaggtgcttgcatttctcagatccaaggtttttgtttctcactatcccttaacatagataagaacattttgaacaaattaaataaataggattttgagtggctttgttttcatgattacatcatgagtcttaatgttcaaaacatattgactcacatttggctatttgataatgcattcttggatcgggagccttaaccacttaaggtggtatgacagtatggctaaagctgattcaaattccatttgttgttggcatgttacagtgtttgtaataacagtgttcccaataattacatgctaataagacttttaatttgcaaaatgctttcatatttgtttttggttttgagccacattttgttgctggaaggagaaagtttatgtccaccctactagtgagaaaactgaggctcagaaagactcacttatttgttgcgggtgagctgtgactatctgggccagcagtgcgagggtacaagaatttactaagactggctgggcgtggtgcctcatgcctgtaatcccagcattttgggaggccaaggtgggtggagctcctgaggtcaggagttcgagaccagcctgtccaacatggcaaaaccctgtctctactaaaaatacaaaaaattagctgggtgtggtggtgggcgcctataatcccagctacttgggaggctgagacaggagaattgcttgaacccgggaggtggaggttgcagtgagctgagattgtgccactgcactgtagcctgggcgatagggtgagactctgtcttaaaaagaaaaataaaaaaaagattaggatgatgctaaagtgtggaaggatggtgggtggtcagctgtgattaccactgtctacatctgcatggcctttaagtgcttctcactgcacttgggtcaagggacttttgaaggagtcttcctgcatttctgtctgcccagataaacccagagactatactgggacgtaggacctgctttcctcatcagccaggacctatagacctttctcatccctcatttcccccatcccagatctcaaatcctcaagcagaatatcctgacactctggcctgccttcagcaaaaatccatcaagttgagtaaacccagaatcttccctcacctttgatgtttcctcttagtaatttttcatctgttgatccccattctacttggtggcaataaatcctcacttgtccttgtattcaaaattgagcccagtccctcccccttctgcaaaaccttcccttctgtcagtagtctctcttgaataaaggcttcctcagagtctttgacaagtgttatgaataattgtttgcttaacactgcacaaaggggaaatggtctagaagagatacagaccatttctgttttcctaatgatcagtgatgatcggtgaccctagactaaacctctctgaaggattattttaggcagaaaggcctctcccctcttccctgggtttcctttctcagtctgccccatttatctaatttcctgtacttacttataaagaaactagatagtaattctttggattgggccattccaccaaacttctatattgtatgtatagtattagatgatgtttatatgttaatagcccttttaaagggtaccacatcccacccatctttgttgacatgttagtgcccaaatatctttgtagttttctgcattttactttttcccctattgtttcaaatgcctggaatactctcttcactgtctcttaaattttctaaactcccattcactttcaaggtgtgtcttattggtggagcagacactcctggggaccaacttggcagaaattagaatgagaacataccaagaagctgaaacttggcagaaataatgtagggagtctgttggtaatcagctgcctaccaccaccgcaaattttgagattctcctcctgctaaaagctaaattatgtgtattttcaataagggaggcatttttttttcttgcctgtgaccagtcacagtctgacttcatatcttgttgttccccatgttcccttatattctacagcagaacagagctttctgttgcatccagtattttaaaaacaagtgtctgtaccataactgagtctggtgtcttctgacctctcccttccttacactgtcttccctcagtatcggcaggagactggttccagaacctcctgcagataccaaaacccttacataaaatggcttggtgtttgcctgtaacctgtgcatatcctcatgtatgctttaaatcatgtctagattacttaaaatacctaatttgatgtaaatgctatgtaaatggtttttataccttactgtgcttttatttatattattttttattgttgtgttgttatttttattttctaatattttcaatcgacctgtggttggctgaatctgcagatccagatcccagagatacagagggccaattgttcttctctccagcagccagaacagcctgtagctctttacaagcactgtgctctttcccatcttgaaggctttgctcccgctgcttcctctttgtgcagttacctctcttccactggataacagtcactcatcctttaagattcagttcaatgatgacttctttctggaagcctcttctgagccagccaccagactaggttgggtrttcctcttctgtgtcccatagtaccagtgtttacttctaatatttcataattgtctgataatggatctgccttaccagttctgcggtgagtttcttgaaagcaggagttatatcctattcatctttgtatcccatgtttctagcacagtagttgacaagtggtaggcacttggatattgtttgagtagatgagtgtgtgaacaaaaagtttagtaacagaagctttttatttaagtacaagtttcatgtagagactcaataattaatcagtgacttttgctttctacagatattggtatcaacttgactgaccctatgttcagaggaatttataggggggttcaaaagcatcaaggtaaatatttcctttattaaggcgaatagtttcctatgaagayaaattttctgcctcaggagatcttgaaaagcataattcaagctgagtcttgtggctcacacctgtaatctcagcactttgggagtctgaggcaggaggattgcctgagctcaggagttcaagagcagcctgggcaacataatccgctcttaaaattgaaataataaagaactcctggctgggcgcagtggctcatgcctgtaatcccagcactttgggaggctgaggcaagtggatcacctgaggtcaggagttcgagaccagcctggccaacatggtgaaaccccatctctactaaaaatacaataaaattagctgggcatggtgacatgcacctgtaatcccagctacttgggaggctaaggcacgagaatcacttgaacccaggaggtggaagttgcagtgagccgagaccacaccattgcactccagcctgggcaacaagaacgaaactccgtctcaaaaaaaaagaactcattatgcattttggataaacctgtaaacaaagtgaaacacatttattgataaaccatgatcatgaacatttataataaagtttaattaaggtcttcttacctgtagaagtttataatttcaaatataaaacttcaaatagccatttgcacagaagctaaaaaaaaaagtcaaatttttgtctgccaggttttcataatacagagtttatcttttacagatgacttacaggatgtaatagggagagctgtcgagattggtgttaaaaaggtaacatccattttgttatttttgagatttttaaaattcattttttaactaaattttagttaaaattttgcagaatagaaaggaacaaaccaatgccacagttggggtacatattgtctacttgtgatattagaaagttaattgaaacaaaatatcaaaatactctgttcatagcaatttaagttacacaaatctcatgtattgtttttatatatgataaatggcaaaagctccttgaaaaaaaattttttaaacctatgtgaattaccaggcttaagaggcaacttttaatcaattttataatataatttagcatttgtcagaattaagcaataatcaaaaatacatgtacctgacaccaagtgtagctatttatagtttgggcataccatttaaataatggagtaaaactttcatttttacagtaataaaatgcctacggctttttagagagttctactaagcaaatgaatagatatttctttaaattagctttaaaacagagagctagcccacacatacactaagaaataaggttaaattccatactatgctaccaggacacttggtagctgctacctccaagatgaataacttgttttggaaagtgacactgctgactaaatgagtttgcagactccaactctaaacttttatttgttattattcacaaataatatgaaaagataaaagttacattaatttctcattatagtcactctgcttggtaaatcactttaaacaatgcttttctgcagactctgaaatactaggctcctaaattttcatgtgttagccatgagtaatcttaatgtttattcacacacacacacttaggaatgacagaactgaagtgatttttacttggacatggttccaaactgaaatttaattcaataccttgcatttatagtgtagtagttaaaagcatagttagggcataacaaacgtggtatccagcccctacttcatttttcatagctttataacctggagtcttttatctcactagacttcagttttctcatctgtaaaatgagaatgataatagtacttaattaatagagttgttatgaaggctaaataaaatattgagtgtaaagcatttggtattatacctggcataaacaaccttcattatgtgtatgatggaagccaccaccatgagatcatcatcatcgttatcttttttttttttttttttttttgagacggagtctcgctctgtcacccagactggagtgcagtggcatgatctcggctcactgcaagctctgcctcccgggttcacgccattctcctgcctcagcctcccgagtagctgggactacaggcgcccgccaccacacccggctaatttttttgtatttttagtagagacggggtttcaccacgttggccaggatgggctcgatctcctgacttcgtgatctgccagccttggcttcccaaagtgctgggattacaggcttgagccaccgcgccaggcccatcatcgttattttatacactgggagaggagatgatgccctcttgtcttgccgtttttttcaactatttagtaaagttgtaggtaaaataaaaagtatacttggttagtattttacgtaatttaaatactggatgtaggcatctgttctagtattaaagttttaggtatgttagtaacaagaaagttttcccaatatttttattagtctttttttttttttctggaggcgagtctcgctctgtcccccaggctggagtgcagtggcacgatctcggctcactgcaacctctgcctcccgggttcaagtgattctcctgcctcagcctcccaagtagctgggactacaggggcctgccaccacgcctggctaatttttgtattttcagtagagacggggtttcgccatgttggccaggatggtctcaaactcctgaccacgggtgatccatctgcctcagcctcccaaagtgctgggattataggcgtgagccactgcgccctgccttacatcttctgctttacagatagtcaaggatttaattatggctatgtttccggaatggatatgcaatagctaatcatattaaagatttaaatagctatatgaaaatatctatttatcatttgcaattctaccttcgttttgtgttttctccctaagttgtacctagaatgaattcattttagtgagacttttgaagtatgctttacaaaaatatacatcattatacttgaatcacgtcttcagaagaaggcgccccttacgcagcactgcttcagtgctctcactatcaacacataactctttagtgacattttcattttaacagattaggaaagatggcattctaattactgagcggactctaatgggtctatgcagaagtatgcttatttgccaaaagccatacgttttcctacagagaattcattagcatgcattaactcactgattctcaaaccttttgctctcaaaaccacttcacattctttattattgaggacccccaaagagcttttgtttgtgtgagtcttacctactgatacatactatattaaaaattaaaacaaaatattttaaatattccttttaaaataagaaactactggataacataaatagcatatttttatgaaaaataagtatattccagaacaaaaaaattagcaacatgagtacagttgtatgttttttcaaatctctaatgactgtgttactagaagcctgctgaattttcatatctttttctgtagtcagtctctggtggtgtcaaacatcgtgtagcttcttgaataccttgtggacacttgcagtagagtgagagtgaaaaagacagaaagtgtcttattattgttaggaaaatagttttgacttcacatacctactgggagttaccagactacacctggagaactgttgaatcaatcaacactattgaatcattgatttcgttattcacgctttcataacacctgatctctgtcctcaaggaatgcattgtctaataggaaaggtgggtatataaatacattttaacagagtctagtgatgaattctgcacctctacatgcacacacacatacatacatccctgaggtgtagtcaggcactactctgcataggaggtaatctcccagctgaattttaaagggtaggtgtgtggcagtcacagaggaaagagcattctggaataaggaagtggtaggaaggcatgtttaggaaactgttattgctgccctattaaagtcagcttattttattttctttctatttcagtttatgattacaggtggaaatctacaagacagtaaagatgcactgcatttggcacaaacaaatggtatcctcatatttcttttaccaaaaaaaaaatgaattaagtaattttgaagaagtctttctgaaaactgcttcaggtacaatacaatggatcatgactggaaacaataggaaaatggactgatttaaatgggacatgattaagatgacaaaattcaaagtactcattggtatatcagatgtttataaaactgtttcatactgctcaatgaagattattttaagatttcagctaatgagaataaagttctccaggtacacagtttaacctcaggtgtgttttttttttttttttgagacggagtctcactctgttacccaggctgaagtgcagtggtgcgatctcggctcactgcaaactccacctcccaggttcacaccattctcctgcctcagcctcccgggtagctgggactacaggcgcccgccaccacgccaggctaattttttgtatttttagtagagacggggtttcaccatgttagccaggatggtctcgatctcctgacctcgtgatccacccgcctcagcctcccaaagtgctgggattacaggcgtgagccactgcacccggccttttttttttttttttttttttttttttttgagatagagtctcactctgtcgcccaggctagagtgcagtggcgcaatctcggctcactgcgcgcgccacctccctggttcatgccattctcctgcctcagcctcccatgtagctgggactacaggtgcctgccaccatgcccagctaattttttgtatttttagtagagaaggggtttcactgtgttagccaagatgggtcttgatctcctgacctcgtgatccgcctgcctcggcctcccaaagcgctggsattacaggcgtgagccaccgtgcccagccaacctcaggtgtttttgatgtggaattcatgtgtgtgttttaacgtgtttaagatacgagttgctttttatttactcttttttaacttaagctgtgaagggccattttattaaatttttactagatggaccagatactgtgcaaggtaccaggaatgcaaataataacactatataatctctcatatccttgctttatgttcatacattttgcatttgtttaaaatcttaaaagttttaagactgattattaaaggaatcctagttaggtaaaacctcatttatctggcattcacgaatttcacttttttttgcattatcttacgtgctagacactgaggaattaaacattccacataatttttaaattttgtattttaaaatactgatgtgtttcctttatgtatgaaaacttactaaaagctatatttttatggaaatctctctaaaatccacacttgtcttttaggatccattcacactttttctttttttttttttttttgagacagtcttgttctatcacccaggctggagtgcaatggcacgatctcggctcacggcaacctctgcctcctgggtacaagtgattctcctgcctcagcctcctgagtagctgggattacaggcgtgtgccaccacacccagctaatttttgtatctttagtagagacggggtttcaccatgttggtcaggctggtcttgaactcctgacctcgtgatctgcccggcttgccctcccaaagtgctgggattacaggcgtaagccacctcacccaccccattgacactttttgttagtgattaaagatagactatcttccagggagtttttgaaatatataagaacattttatccttacttttcatccccaaacagctatgctttttaaagttctcccacctccattaccagccctcttccactcctctccatgtaacttctgttcttacagctttaaaagtgctgcttcctttttttctaaacatctacatgagagcctgaggaaagcttgatacctttcccatggttcgggctcagctaagccattcaaaaagtgtttttgacttctcatttgtattctatgcaagtcaagctgtcagagtctcctccgaataagtgaacctcatttacttgctagaaaaacaaatccccctttccaccactttaaatcgcccccactattaacctgtttaagggaatacatttttattgctatattaaatacatgaatcaataatggaggaataggtgttaaacaaacaaaaatataccaatcaagatagtcacatgaatggtgaatataaaagataaaatcagtgctggtcatggtggctcaggcctgtaatcccagcactttgggaggccaggcaggtggatcgcttgagctcaggagttcgagaccagcctgggcaacgtagcgaaaccctgtctctaccaaaaaaaaaaaaattaaaaattagccaggtgtggtggcatgcgtatgtagccccagttacgtgggaggctgaggtgggaggatcgcttgagcccaggaggtcaaggctgcagtaagctgtgatagcaccactgcactccagcctgggtgacacagtggcaccctgtctcaaaaaaaaaaaaaaatttcactttgcattctacagccctaaatgccaagctttagaaaaagttgaattattttattaatacattaaagcaattttcatattcatctcctactttgtttaggtattctaaaaattgtcatatgattaacataatgcagttcttataatttgagtaatttattgccattgttgaaaaccagttgaaattacttgatatcctctaaatatcataataaatataaatatgagaaaatactttgaaaataatcctaagacattattttctgttaggtatgtttttcagtacagttggatgtcatcctacaagatgtggtgaatttgaaaagaataaccctgatctttacttaaaggagttgctaaatcttgctgaaaacaataaagggaaagttgtggcaataggagaatgyggacttggtgagtgccagcctcgcctcttagartgacattgtttgaaaataagtaatttgttctgtataagttaggagtaattattcttctttatctttttaaagattttgaccgactgcagttttgtcccaaagatactcaactcaagtaaggaaatttgttggctttacaaattattgtaaaatcatgagtgatttttaaaatatcttgtatcaggtgrgagtatagttggattaagcatgaggatatttttgtttttccctttgtatatcaaaagtaagtgaaacaaattccatgcatacttgcatgtaattcataagggatggaagcacatagttccctggttgattaaccatttaattttattgtaatggtagaaattagggatgagttttacatgatagagattttacattttctgtttgcttgtttaacagacgcattcatacgtgaacagttccaatggaatgaattaaattattttggggaatgtgattgttttgttttgttttttgagacagagtctctctgtcgcccaggctggagtgcagaggcgtgatctcagctcaccgcaacctccacctcctgggttcaaatgagtctcctgcctcagcctcccgagtagctgggattacaggcatgtgccaccatgcccggctaatttttatgtttttagtaaaaattgggtttcaccatattggtcaagctggtctcaaactcctgacctcaaatgatccacccgcctcggcctcccaaattgggagatataatttaagagcaaaggatattaaaagtgtattacaagccaggcacagcagcctgcgtctgtagtcgcagctgtttgagaggcagaggcaggagaattgcttgagctcaagagttccagaccagcctgagcaacataaggagactccgtctctaaaaaaaaccagcaagaaaaaacccacaaaagtattataggatcaatcaccaaagctagaaaagcttattttactcttgctgggcattgaatattgctagtttggaactgtgagattcctttaataggagccatgttgaatggtggcttctgagaaaactccaaagctcacgaccctgcaggacttcctgtaacccattgcctggagctaaatttggagctcctgtcatcatactggtgggtgagtgttatagattgaaaagaaaatttaggtcacagtctgaatttaaaacgtaagcattttgttgaatttcaaaaacatcttaattatgaaaatgataaaacattagactgagcttctaaagggggttaatttattcatccattgaacaaatatttatggagtactgtgtgccagccactgctgagagctcatagtatgcagaaatatgaataaggtagaatatctgtccctagagacctttaagaataaacaatcctctgtcctccttagtttcttatacacaaagaagaattaggatcagattctctcttaagataccatccagctatatcataatgtttaacaattaataattttgtcatatggtgatatgatcatatgattaagccagtgacttgatggcctgaagggatttttttaaattacgcatgaggaaagtgtacttcctcccgcttccctccctgctccccacaaatgggattctgatatgtaccccctggttgaaaatcactttggggaggagcagatctgctagtggagtctgtcataccctagacctcaagctccaaagttctgaagtgtgaagatctataaccaagtagaataggatgggttaacgtaatgctctgtggatacctactctctcttttaggtcgctcatttgtacatcccttgtagaactgtttagtttgtggtatattatttgctgatttgctgtgcctttcagggacattcatgtggttactagcagggttactgaagccctatacctctgtcgaatattatgtaggccagctcacttaaccttaaaagttctcgtgttcacattgaaatagaaaaacagttctctttaatagttctttaggttaagcccagatatcatattcctcaactttcatgtctggttttggtcaggataagccttgtaagtctaatagactgtgttatgacaagcaagggcaatggcagagtccccgtgtttttttgcccatatgacttttcatccaaaatgagttagaactgattctaaaatgcaacctcaatactttaaactcacttttgggattaatcgaaaacattgacagtatcagtttaatttaactgttctgaagattcttcaccatcatcagaatagcgtctgatcttagaatatgcatatcacagcttgtgcttgaactcacatgccaagcgttaattgctaatagagaggttcaaactacattcagtaaatgattaccaagtgcctcctcagcatgatacaaagaagaataagactttttccaagagaggacataaataattaaaataggttggaagtgcttactaaagtatgtgaacagcagagggaaggactgactttctgggggatgctctaaggtgacagcatatgacactggcttcttccagagtggataagctaatgacaaagtaggaggaaattttgataagataggcagttctacttgagatttttaaaattttaataataaaacatcaaatgacttggttaaaaaaacagccgggtgcggtggttcatgcctataattccagcactttgggaggccaaggcaggccgatcacctgagatcaggagttcaagaccagccttaccaacatggtgaaaccccgtctctactaaaaacaaaaactagccaggcgtggtggcgagcacctgtaatcccagctacttgggaggctgaggcaggagaattgcttgaactggggaggaggaggttgcagtgagccaagatcgtgacattggactccagcccgggcaacagagaaagattccgctcaaaagaaaaaaaaaagacacactagtaacaatcacattttgattattgttaaggaaacaaatacccacattctctgcccctcactccttttcccctcgcatatactcacagcatgcaatctgttttgtatacacagcactctacttgtttcagcacttaccatgttgtacagaaatgggttttcattatcccttcctccccgcaacagacaggtgtctttgagttcctcaaaggcacacaccaagtcttactcatgtgacagttccatagcacttagcacagtactctcagcacatggtaggcacttagtaaatgtctgttgaatatttaatacagagggaaggttcttttcttttttattccctttgagcagcatggataaaaagcctataattcagctttcactattgggtttatttttggaagacttcagattttggtctgcacttttctaccatctggaacaaccagtgtatgattgtgtttgtttgtttgtttgtttgttttttgagatggagtctcactctgtcccccaggctggagtgcagtggtgcaatctcagatcactgcaacctccacctcccaggttcaagcaattctcctgcctcagcctcccaagtagctgggattacaggtgcccatcagcatgcctggctaatttttttgtatttttagtagagacagagtttcaccatgttggccaggctggtttcgaactccagacctcaagtgatccgcccaccacggcctcccaaagtgctagggttacaggcatgagccactgcacccggccatgatttgtttttaagtaaatatgtagtcaggaaaaaggagatgtatgagaaaagaaaaatagaaaattagggggcaagacagaaaaattaatatacaatagatgtagtgtctgaaaaataatggtaagtgaaggcggtgtatgaccatgttaaaaggatgagctttggaatcagcagatctttgggtgagatttacaactgcctttggtgtcacttcatccctttgtgcatcccctttaaaatggggagattgctgcctacctttcttaacataaggcacataaagcccatagtgacatgagtcatgcagagtatgtgcacaatcatggctgttgttacattcctcatactagaaataattaccaccctaaaggaagatgctagctattgtttttgtttggaacttttaaaagtttttttttttaatacttttttcttgttttagtacctagaccttttctggaaaaagtattttttaaagactaagaaagagaagcaaagagtgaaaacaaggaaaggcctgatctacttatggaaagtttatcctttaagccataccctgtattttcaatttcctggccttatgctacactcctttccttgttgcaatttagagctctgttctcttgggtaggaggaatttgctttgggcatttttcttggggctttaaaatgttaacactgtgcaggtcttaaaaactacaacaagaagattttaaaacaatcctttggggatttaggggaccctagagatgagcaattgaggccatgttgccatcaagcagcttacagaggagggattactacttgtgttgaggtatacccatgaaactcactgggctttttggatttgccttgatcctaattaataacaactgctcctgaagctgaacttttccagctcttgtcgttagatagttaaacctcaactgtaagaagcagtaataaaatcagaagcttcactaagatgagcaaataactcaagtggaaaattattttcatttatgaactttaaaaaaataataagtgagtaaaacaggcagagaagtctcttaatagatgccaattcctaccctgtaacttatacagttatttctagttaccatggcgggtttttcttctctaaagataatagtcgtttgatgttcagtactagttatcctcaatttgtatcattaggaataattttttttaccacatggcttctttatgatacgtagctagcatgacttcagggacctttcttttcttgaattatgtaaaattctgtgggcccattgcttgggcttctgttattttctttttcttttttctttgagacagggtctcactctgtcatccaagctggagtgcagtggtgtgatcatggctcaccgcagccttgacctcgccaggctcaagcaatcctcccacctcagcctcccaagaactgagactgtaggcatatgctaccacacctggctaattcttgtattttttgtagagatggggtttcaccatgttgcccaggttggtctcgaactcctgagctcaagcaatccacccacctcagcctcccaaagtgctgggattacaggcctgaaccacacacccagctggcctctgttattttcataaactgtacttttgcctacattcctataggaagctaattttccatccgaccattagatactgtgaatttgtagcttggtcatgtggtttggtccatggaattgtgtgtggaaaaaataaccagtacagcgtggagcagtgcacacaatgaagagtaccgcctgctgtgtgtagtcagagccaaatatattagtaaagttgacataatgactagtgcacacttaactgctgacatttggtttactttagaggttatggaaatagtgactggttatattatcaaaatctctttttgtccaagttgtcgttaatatttcctacactgcaaaatttcagcactttgttaatgaaaggaaaatatttttgcttattctaacccagcagaatctgaaaaggagattttaaaacccaaacatttggtaatacagacatagacgacctattttaggaagactatttctatttttttaatttttaatttttttttttttttttgagacagaatgttgctctctcacccaggctggagtgcagtggtacaatctcagctcactgcaacctctgaccctgggttcaagagattctcatgcctgccgaatagctgggattacaggcatgtgccaacatgccggctaatttttgtatatttagtagagacgaggtttcaccatgctggccaggctggtcttgaactcctgcccttgagtgatccacccgccttggcctcccaaagtgctggcattacaggtgtgagccaccacgcccggcctgaagactgcttcttaagaagtacatttctatttctaattttaaaatttagcattttcaagagagcaaagggggtaaaatagtcctgcacatcaggaaatatgatatagaaaaatatagcaagagaggcttaagttaaacagagaaattgtttccccaaattaaagtgcttagaagaggtaagcacatttaagaaaataataagccacctgttatcctgattcagttgaacctaccatttgtgagaacaagggggagcactgtgttgaagtgaaaagacaaacagaatgaacattcgttgtatcctctgaatattgtcattatactccgggaccagaaggaagcttcttgaaaacgtaacaggtttttgtcgtttaggctgggacttggaattagagcagtgaagttctgttccaagttggccatgccaggtattgttatcttggacaaagtactacacctctctgacaccagcttttatactcaggttattttgaggatcaaatgagacaatggtatctggtacttggaaaaaccttcttatcaagtactctttaagatattcagggctaccactttatcatgtaattttctttttttaatagcataattgagttatttgctgtttagcaaatacttagatttcatttttgagggaaaccttgttcattttgcccagtggcaataacttcttttataacagcacataaaaaactggttgcaaaatggaatagattagcatgcagtatgaagctctcctgggcttctcgcttggtgagttgactcccactgatggtgctcccagtggcaaggggccagtggtgttactttctgaaaattaaagggcccagataattttgtaagcccagaaaatgaagtatttctttccagaagttgtaagttataaaagccctttgataagcctgatgtgctttaaatattcatgatttttgtcctgtaatttctagagaattaaatacctttaatttaaaagctcttttgacatcattaccttcctcatgctaaaatacaatttgtaatgagaattttttttttttgcattatgcagatattttgaaaaacagtttgaactgtcagaacaaacaaaattaccaatgtttcttcattgtcgaaactcacatgctgaatttttgggtgagttaaaaccaaagtctcattcagaacttaagaattttgtagaaatcaagctatttgctaaaagttctttgtttttaattcacagacataatgaaaagaaatagagatcggtgtgtagggggagtggtaagtataaaatagtcatttttaatacaggttgaacatctctaatccaaaaatccaaaatactcccaagtacaaaatgctccaaaatctgaacctttttaagcactggcatgagataatgacacctttgctttctgattattcattgtacacaaattttgtttcacgcacaaaattatttaaaatatttaccttcagggtgtggtataaggtgtatgtgaaacataaatgaatttcatgtttagacttgagtcccttcccaaagatttctttttatgtatatgcagatattccaaaatctgaaaaaatctgaaatatgaaacacttttggtcccacacacttgggataagggatacttaacatttatgtgacacacaaagcatcttggttattaaggatggcccctaattcagatgtcaacatttaaattttttttaaaaaggaataacaaagaaaaacataggaattagatagaattcaatagaattaggagcttcttttcccatcctttgaaagacatgtaaatttactgttgaatttatggaccaggtgtggcataaacacaaatcagttttaattacagttcctttgttcaaagtacaagaatgcgtacagaattccattcacaagaaaaccctgtgaaattttttttgttttttgtgtgtgttttttgtttttttttttttttggttattaagaaagggtctggctctgtcatccaggctgaagtgcagtggcacaatctcagctcactgcaacctctgcttccccgggatcaagccatcctcagcctcccaagtagctgggactacaggcatgtgccaccatggccagctaatttttttgtatattttgtagagatgaagttttactatgttgcctaggctgatctcgaactcctaaactcaagcaatctgcccaccctggcttcccaaagtgttgggattacaggtgtgagccactgtgcctggcccttgaattctacacatcctaatgctgtgcatgatattcttcgtctcttctgtcagctgttctttaatgttcttccatccaaattttgagcaaatataaactaatttttatgttttgaaatattttaccatttgttttaggtttgcctttctcatttcttgtccgctgtattcacctactattctgatctagagagtcattctcctttctgtaatttgcattctgcactaaacacttctctgatatagccattttagtcattattctggagacatttcccataaatactatctgctaaccacatacctccgatatctatggcagtgatttttttttttttgagatggagtctcgctctgtcaccaggctggagtggagtggcacaatctcagctcactgcaacctccgtcacctgggttcaagcaattctcctgcctcagcctcccaagtacctgggactacaggtgcacaccaccacrtccagctaatttttgtatttttagtagagacggggtttcaccatgttggccaggatggtctcgatctcttgacctcatgatcctccccccatcagcctcccaaagtgctaggattacaggcatgagccaccttgcccagccatgatttttagtctcttcgatcatggactcctttggaaacctgccttagaaaaatgctcagatatacatatattcatatgcaatttcaggagagtgactcagtgagtgactgtgtctagcaaaagaactgtaatccaggtagattaaatcacagttacactatgcctgctaaggaaagaggaaatagcaccaagcacttgcattcccatgcggcctgacgttgacagttttatgcgtattctctaagttcaacctctgcctcatytatactactagtaatatgtatgcatcctgcattgctgtaatgttaatattactgtgcacttttttcctgtttgtactaactctgtaattttttcctgtttttacttactctgtaatttatcctgtaggaactgtacttaagaattgagaggggttttagttttaactaatgccgttgggattattagtggtatttatcctaaccttcagactctacctctcagcccatttgctttatttcttttctttttttctttttcttttttttttttttttttttttgagacagagccttgctctgtcacccaggctggagtgcaatagcacgatcttggctcaccacaacttctgtcttccaagttcaagcaattcttttgcctcagcctcccgagtagctggggctacaggcacgcaccaccacgcctggctaatttttgtattttcagtagagacagggtttcatcatgttggccaggtgggtcttgaactcctgacctcaagcgatccacctgcctcggcctcccaaagtgctgggattacagatgggagccactgtgcccagcctatttctaaataagaatttacttgggttctattaatagtttttaaaattaacaaaagcaacaacaaatccaacctaaatgtttgacttttaccaaaaaagaaattgccaaataattaataactagttttctgaaatggtttatgaggagtcacttttaaaatgatttcgatattaatggagggcatcttttctagtcagctggaaatggtgaaggaaagaataatgcaggcagctgtgtaatgcaggcttctttattgttgagaaatatgttatccatagtgtattcaggctctctggactcagtagtaatgtgatgtcacttgtttaggtgamcctactttttaaaggagggctgttgttatatgttgtttttgattatataaatacatccaaactatgaaaactatgtcttgacccctatatctttgaaggagagaaatagcatctcaatcccttctgcttgctaagctgatattattgattatataatggtttatgcttttttttttttttttgagacagtttcgctgatctcctgaccttgtgatctgcctacctcggcctcccaaattgctgagattacagtttatgctttttaagcaacagtctcacccatttataagaatttcttcagccttgtctctttttttgttttgtttttgtttttgagacagagttttactcttgttgcccaggctggagtgtaatgatgtgatctcagctcaacgcaacctccgccttccaggttcaagcaattctcctgcctcagcctcccgagtagttgggattacaagcatgcgccaccatgcccagctaattttgtgtttttagtagagatgggttttctccacattggtcaggctggtctcgaactcccaacctcaggtgatccaccagcctcagcctcccaaagtgctggggttacaggcgtgagccattgcgcctggcccagccttgcctcttaaaataatttctcttccacaaaaaagtatcctcggccaggcgcggtggctcacctctgtaatcccagcattttgggaggccgaggcgggcgaatcacctgaggtcgggagttcaagaccagcctgaccaacatggagaaaccccatctctactaaaaaaaaaaaaaatacaaaattagccaggcgtggtggcgcatgcttgtaatcccagctactcaggaggctgaggcaggagaatctcttgaagcagggaggtggaggttgcagtgagccaagatcgcgccattgcaccccagcctgggcaacaagagcaaaactccatctcaaaaaaaaaaaaaaaagtatcctctaacagaaaattcatcagtattttaaaaattcttttaaatagtgccataaaattactaagctttcctcatgtttttgcctaagaatatatctattcctaaaccccttcctggagcttctgcactaatgctagtgcagagacagcaacactgccactctaaagagagaarttctcggcagctaacgttttgcatcatgtcactggagatgatgacaggttgtaattgtgaaaaataatatgaaaataaaaattatagcgactaccacctttgaaaccctgaggtccaaaaacttacagggatctatatttttgcctacaaagtcttattaatgtcacttagaattttaaagagtaattattataataataaacttatacstgtatgtccccaggtgcattcatttgatggtaccaaggaagcagcagctgctttgattgacttggatctttatataggatttaatggttggtacgttcttaggttgctttggtttttaacttttatttaagcagatttcttaaattgtcttacagtgaattgctgatgaagatttattttcattaaagtttgtgtgtgtttgcattgatctttgctgggaatttcagtaattatttattaagaaattaaacagtacattactattaaaagttaaagctcgaaagttatagactactacattatgttctaataatggaaaacaattttgtgttgagatctgcagctggctttctctggtaatccaatttattctcaggtcatttgatcccttgaaaacatgtgttcacagcattatgtatacatatacacgtcatatctgactatggacgaacggtttattctgtgacagtcatacatctctgcagtcaaagaaaccgaggctcaaagaaattaggaaacaggtatagagtttctccaagtatgagaacccatgtcctctggcttctcactctgtgatctttctgctgttgtaccacactaaacttcacacactcagtacagtcagctagcacagctaggtctctgggttggttttgtcacatatgtaagagcttctaccagtgacttttcacaggatgtcagtgtagcctattaaatcagttgcaaaatagtataggagtttctgtccttcttcattgtctcatacccttaaaattattatgtttccaattgcattatttttgactaaaayctagggaaatagaatcatggaattatgtatttgctctagagttcagagtttaaatgtctaagatgctttcatatttaaattaatggtttaattaactttaaaattaattaatatgcaagggaatatatgcatagagattaaaaagtcaagtagtactaacagatatgaacaaatatcagagtccccccagcatgaccttaccccaagtcagcttttgtagcagcaataattttgctatttgtcaccatatttctaaataatatccatatactattgtctcttgattcatcccctttgtctattctcattggggtatatgagcacattagttcttatatcccgtactaatcccctacctccattctctgcatatcactctcaatgtcgttatttcagaatttttggttatatgcatactcaatgttttcattattatgtctatataaatgttgtttccttattatgcctatataaatatataatttcacagtgctatgccaagtatgagagggtttcaagttttttgttttttggtttctttttaaagatagggacttgcttgctctgtagcccaagctggaatgcagtggcgtgatcacaactctgcagccttgacctcccaggctcaagcaaccctcccacctcagcctcctgagtagctggtattactggtgcatgccaccacacctggctattttttaaatttttagttgagacagggtcttgctatgtgcccaggctgggcttcaagtttaagaaagccaagtaaataaaaatatgagggaggttaatccaggaaaacaaaaagtagtacaagaaaagaaatgttaagcacagtataccacatgagcaaacctatgtagataatctaatagttcgttccgtcagttgcagacccttccatgtgtttcaatttggactagttcctatttttagatcccatgtattccttgcgtgtttgttttagtggaacacattctataacatcctctgaggatgttttcatgggaattaagtttcttttaaatacaagccagtatttctatttaataaggtttcccatttagtgatgagcaactacacgattctgaagtcaagtttgaaatacatcttcccattttgaaaatgaattttttttctgctcttcctcttacaagttagcctggatagttaatgaaaggggagagaaccccacttttttttttttttttttgagagggactctcactcagtcgcccaggctggagtgcagtggcgcgatcttggctcactgcaggctccgcctcccgggttcacgccattctcctgcctcagcttcccgagtagctgggattacaggtgcccgccactacacctggctattttttttgtttttgtatttttagtagagacagggattcactgtgttagccgggatggtctcgacctcctgacctcgtgatctgcccgtctcggcctcccaaagtgctgggattacaggtgtgagccaccacacccagccccccactttcaatggatagttctcttgaataaaattcaagatcagaaatcattttcattgagaatttatactgtcccatcagtaggttccagtgttgatgaaaagttgctactctgattcctaatcctttacctgtgacctagttttcttctcttgtgaaaggttttagtttttcatctctgatgtgaaatttcacgaaggtgtgtgttgatggttttcatcacgcctggtgttgctttttcattagcccttccagtggggggcacatctttacccgtccttggaatttgatttttctcttctgttcttttcttgggcatactagactgataactcgtattctttttattctatttccattgtttccctccttccaaaaaaagtgctatattttgtaaccctttttatgaaatttacttcaacttttgttttcaatttctgaatactctatttttatactgcagtgtcttctcatctctctaaagacatgaattatagtttaaagttactttctgcttgtcttcctgcatttgtttcctcacagtcaccttttcttctttcctttggtctctgtgatgatggaaactttcttcaaatgtcaggcagtccttcactgtctatttaaaaaaagaaaaaaaaaagccatttggaagctctctagaaggcattccagcaactggcaggctcagatggccaactgactttttgctagggattcccaaatgtcagtttgtagagatctttttctgggttggttcagtttctccagaaagggatcctgtgttctctgctggaaaagtggggaacagtggagggaaggggtttgtaaatgtccctgacagtattttggagcaggatgggttagaggatctcactgtttagtgggctgccccagtctccatgctcaggcctgtgcctgacgcctgtactcctctgtgcttgttgttctccagctgtttctgatgtggattgtcttgagacccagcacctctttctctgcaccaagtcacagatacataacctaggaaccccatcttctcttggagttttctcaaagaatctccatttcagtccctgccttactccactttctagggactgtatctacttctaggtttgtttgtctttctttccaggcacatagcatttaagttacttggcacttaaacactggtcttttatcatttctctgtccactttcagctatatgttgtgatttggggtaacatatgtctcctagtttcatttaaaaaaatcctggttttctccttgtaagtttggttttktttttttttttttaagagaagggggtagaagatctttattttaccaacttaaaaccataattcttagttgttgttttttttttttgagacagggtctcactctgcctctcaggctggacgacttactgtagccccgacctcctgggctcaggcgatcctcccaagtataatagctgagaccacaagctcctatcaccatgcttggctaatgtctgtactttttgtagagatggggtttcaccatgttgcccaggctggtctcaaacttctgagctcaagctatccacctgcctctgcctcccagagtgcttggattacaggcatgagccaccgtacctggctcctgtcttagatatttctaaatgatcttgagttcattaggatgttagtttaagctaatcacaaaagattcttttctcctacattaatattagcttcagaattaataggttagtcatttattaaagtggatgtttatattcttattttcaaatctaattcattatcatcttaatctgagtctctgaggaatgataacttaatccacttatagtagcatattacataaagtctttggttcctaaaagttaaattagaatttttcccccaagaaaatgggaagatggccaggcattgtggctcacgcctgtaatcccagcactttgggaggctaaggtgggtggttcacaaggtcaggagttcaagaccagcctggccaatatggtgaaaccccatctctactaaaaatacaaaaattagctgggcatggtggtgggcacctgtagtcccagctactcgggaggctgaggcaggagaatcgtttgaacccaggaggcggaggtttcagtgagccgaaatcatgccactgcactccagcctgggcaacagaccagactgtgtctcaaaaaaaaaaagaacatgggggccgggcgcagtgactcacacctgtaatcccagcactttgggaggctgaggtgggcggatcacaatgtcaagagatcgagaccatcctggctgacaaagtgaaaccctgtctctactaaaaatacaaaaaaattagccgggtgtggtggcgggcgcctgtagtcccagctactcgggaggctgaggcaggagaatggcgtgaacccgggaggcggagcttgcagagagccgagatcacccactgaactccagcctgggcgacagagtgagactccatctcaaaaaaaaagaaaatgggaagatgtatttcaaacttgacttcagaatcgtgtagttgctcatcactaaatgggaagccttattaaatagaaatactggcttgtatttaaaatgtttattagtatatatatttgggcaaattttacagtcatagaatagacacagaagaatattaagttaatcagacatgatttagtgagatcaaaaatacaaataatctgaaaatttagtgaaaagttctaaatatactatccataccaagcacatcaatatattttagaaaataactgtattgaccaagctggctgaaaataagaattttgtttttctagagagcactaattgctacttaatgtcaaactaatgacatctcacccacccctcctaaaatcctactaaaataaaattatagataytgaaaaaggaaagaatctrtaatagcaaagaaaaagggccagagttttgctaagaaatgttctgtagttgggtgagctcaggagttcaagtgatggtcctgccacagcatcctcagtagctagagctataggcgtaaccagtctgggcaacataatgagacccccatctcttaaattaaaaaaaaaaaaaaaaaaagaggccaggcgcagtggctcatgcctgtaatcctagcacttcaggaggctgaggcaggcagatgacgaggtcaggagttcgagaccagtctggccaacatagtgaagccctgtctctactaaaaataaaaaaaattagctgggtgtggtggtgtgcgcctgtaatctcagctacttgggaggctgaggcaggagaattgtgtgaacccgggaggcagaggatgcagtgagccgagattgcaccattgcactccagcccaggtgatagtgagagactccgtctgttctgtagatttctgaagacaggtgaaactgaaagagaaagcttagattataccactaaggggcctcagaagagatgggagcaagtctagcaaaatccaataggggggctttgggcctagaattagtgtgaaatcggactagaaatgatgattaattgagggcctatatagagaaaagatctcactcccatatccactcctgtgcatagaggacaaaagcagtaaacatttacacaggggccgggggtgggggttttcttaagaaaattgaaaaaactgtatggtgaggactagggcttggagtgcttacatcaatccccaaagaaaagcatttagagaaccatgagcctaacaattagctccctatactcttacctttaaatgaagtttcataatatacccactcccacaagaaggtcccactaagaatccccactaggagaagagaactggcagtaaaacaggcctgctttcacaaaagcaaaggaaacgcaacactagcaacctcccaaaatataaatggatatccaaggaccaccagacgaatgaggtgaaccagaagcatgaaagaaaaaaggccaagataaatagaaaaactaaccccagtgcgacccaacatagtgggatttgagatgttacagacatgaaatatgaacagaatgctaaaagaacataaaagaataagagctccttaaagattataaataaatggtgatgttaaagtaatagcaccattggacgaagctagggaatcaacacttgacagaaagatacatattttttttatacaaactacatatatttgagcaatcaagtagtagacatagagaattttctttttatggaagtactctaataagtaaagggctgatagaattatatcagcattttctagctcctggtgaattatgcattgggcatccatggctgccttagatcacaaaaataccaccagatatatgcctgtggatgaaagatcacaccaccacctgtgaaatagtcttccccacaaaaaatccaacccaaatcctatccagcctgtagatggtactcgagatcttctataagaaataaagagagcaggctggtcacggtggattgtgcctgtaatcccagcactttgggaggccaaggcaggtggatcgcctgaggtaagragttcgagaccagcctggccaacatggtgaaacccccctctctactaaaaatacaaaaatgagccgggcgtggtggcaggcacctgtagtcccagctacttgggaggctgaggcaggagaatcgcttgaacctgggaggtggatgttgcagctcgccgggattttgccaacgcactccagcctgggcaacagagtgagactccatctcaaaaaaaaaaaaaaagaagaagaaagaaggaaatacagagggcagaggaacctgttaaactgcaacgcagatgaaatcagcaaaatcaagactagggcactccacagcgtgaacagcttggtttcttcaacagataaatttgaagggggaaaagatgcaggagattttaataagttgagacttcagaagacaatgaccaattgcaatgtgtgggcctctcatttgtgtcctaatttaatcaaacttagaatgtatgccactgagacaactggaaatttgaatactagaagatttgggtttttcttaaacaagaatccttatgctcagagatacatgttgaaacatcctgaattaaatgctgaaataaatattaaaactgtccatctggaatttccttttaagataatacaggagaggaataggggtaagtggatggaactggattggccatgtgttgattgatggggctgggtgataactatatgagaggtccatattacctaatttaatgtgtatcttaaattctttgtaataacaaatgctgaaattaaaaatgctacataaggaagcaaccaagatgttcctcagtaggtgaatggataaactgtggtatgtccagtggaatattattcagtgccaaaagaaatgaactatcaagcatgaaaaacatgggattttaatgtgtatttgcaagtgaaagaaggcagcctgaaaaagactacatactgtgtaattcaaactatgtgacagtctggaaaaggcaaaactatggagactgtcaaaagataaggggttagagggaaggagggatgaataggcggaccatagatttttaagaccgtgaaactattcagtatgataccacaatggtagatacgtgtcattgcatatttgtccagacccacagaacacatgaaaccaagtgaaccctgatgtaaactgtgggttttgggtgacagttttgtgtcaaggtaggttcatcaatgataaacgtacctaccactatggtgtagaattttgagagtgggagcatatggttggggaatctctgtactttttattgctgtaaacctaaaactgctctaaaaagtaatttaaaataaatttgtgattagagaaattgtgtttttaaagtaatataagaacagtattagttgtcatcacattatatgctacaccatcccaaacctcactgccacattacaggaagcatttatgtttgcattcatggatctttgagtcagctgggttttggctgatagaggctgccacaggcagccatagcaagtcttgaggccaacgccagattcaaggaatagagttcatcctacaaagaaaccatggcaagggtgcagatacataattctgctaaagtagagtgaagaatctgtcttgggctaaaaatggaaaattcaggaaatgaacgtttacagccttagaagcacctctaagttacgcaaattactcagaagcagatgaattcttttaaaaagttaaattttacttagactgatatagaacgctattggaaaccaactaataagcatggaaaattgcatccccggaaggcagattgggttaaaatagatgttaatctggattgttgaagtatggaggtgtgcaaatactttccaaagtatactgaaaacaaagtgttatagggttttgggttggttttgtagcattttagacaagttgtgatacgaaaaaaggtattcgttaattgctgccttttaaaataaatatacacttttttttaagctcactgaaaactgaagctaatttggaagttttgaagtcaattcctagtgaaaaattaatgattgagacaggtaagtttgttttcagaactttgtttcatattaaaccataccaaacaaaaaggaaagctggagaaagaaatttgacttcaaactttaagtgaacaagtattttaaaacagcatgctcaacctcaacaattatgttttccagaagatctttgggggttattaatggaaaaacatatgcaaatgatttttttcaatttagaagtttgctatgtctaagcacttagaaaatgagatgccagaatataactcaggaggttgtagttacgagtacttagctaaacaaggggtcttgactaagcacatcacacttccaagtttcaaaatctgttcagaattttgtttacacagtgtctttataatggcttaattctacagcactttgtacagtgcaacaatttatattggtttagtataagaattttagaatccgttgcctcttaaaacaaggtgaggccgggcgcggtggctcacgcctgtattcccagcactttgggaggccgaggtgggcggatcacctgaggtcagaagttcaagaccaacctgaccaacatggagaaaccacatctctactaaaaatacaaagttatctgggcatggtggcacatgcctgtaatcctagctacttaggaggctgtggcaggagaattgcttgaacccaggaggcagaggttgctgtgagccaagatcacgccattgcactccagcctgggcaacaagggcgaaactcagtctcaaaaaaaaaaaaaaaatacaaaaaattagctgggtgtggtggtggcacttgcctgtagtcccagctactcaggagcctgaggcacgagaattgtttgaacccgggaggcagaggttgcagtgagccgagattgtgctactgtactccagccttggagacagagtgagactccgtctcaaaaaaataataaggtgaaaagctaaaacttttatctaaaccctgtcaaggctctccttataccatggactttaggaaagtcaagactgagccattctggagaaatcacattcatttccttgggcagtcaggaaaacaaaatatttgattaaaagtacgatgtttgcaaaatgtgtaattctttattaaaaaatattcaaaaccagtttcacattcagtagagatagaaatttgtttaacttatgsaaacctcactacatgcatagcgaaaaagattttgaaaactgaaaaaaaaactgtttaacttaaatgttttcatgttgttatacaattgtatttaaggtttaggtcttttttttaaagcatgctgcacaccaacaatgttagcagaaaaaaggaatagaagtgagtcttagaaggtatttaagatgcaattcaagattttatcttgtgcttttcttagaactgttttctgttgaaataactgtgccattttggaagctgaatcacggtttatcatttagaggttatatattagataatggtcataaaaaatttttaaaaatgtaaaccccttacgagacactttctttgcttaactagatgcaccttggtgtggagtcaaaagtacacatgctggatcaaaatatataagaactgcatttcctaccaaaaagaagtgggaaagtgggcactgcttaaaagacagaaatgaaccctgccatataatgtgagtattttgctttcatggtcttcaaaatcattagttaaccaccagatgccacttataaaattaacgcaagggacagaattaaaattttgcaaaatccaagtgaagttcaggttcaagaccaccatattaatgcagtgatttggaggaatttgcatacctggtttaagttccattctcactgcagcttcctgctactctttggtaacaagaaagccttagcagaatattttggatttaaatgatttgacagcctctataaatctaagaaataacacatttctttaagcctcagaacaaaaggataagtgatcttaaggacaaaccccttttttcctaccccctttttccaatcaaagggggtgggactttagcacgttttatttcctaaaaaagcagcagatcagaatcatcttttaaatggtgatatatatatagcacaagtgaaaagaggggctattacccatctgtcaaagagctgtaaaggtaacaaacaggagaaggtggttatatcattttaatgggtacataatccaatttcttttgtttgcacaaacagataatttaaattaatctagattatatcagtcttatatgatttaccaattcagacaattgggcatacttataacacattcacaaaaactaattggtactgtgtcttcatgaggggtaaaaaagaaaacaaaataggttgttgmttttaagactattcattgcatatgcaccatcttttttttcagtagtttttaacaggaaaagagtattagaagataagccagataagaacagtgaagaattattctataaaaatatgtttgaaaggttcttttcctttattaacatgcttgagctgacaaagtctttaaaactgaagcagccaggcatggtggcctgcgcctgtattccagctacttgggaagactgcttgagctcaggagttcaagatcagctcaggcaacatagggagacccctgtctctaaagaaataaagaaaattttaaaaaataaagaaatgtaagtacttgcaaattcagtgatgagacagtatttctaaatcttttttttttttttttttttttgagaccatcttgctctgttgcccaggctggagtgcagtggagtgatcttggctcactgcaatctccgcctcctgggttcaagcaattctcctgcctcagcctcccaagtagctggaactataggcacatgccaccacactcagttaatttttgtatttttagtagagatggggttttgccatgttggccaggctggtctcaaactcctgacctcagcctcccaaagtgctaggattacaggcgtgagctaccacacccagccaattttttggggaactaaaaggacactagagaaaagaaactggtattttgacagcagccagcttacaggaagtagttgccaacagtgtatccaagtaagttttttatatttccttaatcttatgtaagattatagctgttgactttagctatatatttgcaagacaaaatttcaaggtgtttttaaatgtagactgtttaagaactataaaggctggccaggcatggtggctcacatctgtaatcccagcactttgggaggccaaggcaggcggatcacctgaggtcaggtgctcgagaccagcctggccaacatggtgaaatcctgtctctactaaaaatacaaaaattagccaggcgtcatggcggatgcccgtaatgccagctactcaggaggctgaggcaggagaatcgcttgaacctgggaggcggaggttgcagtgagcagagaccacaccattgcactctagcctggrmgacaaaagtgaaaatacatctcaaaaaaaaaaaaaaaagaactgtgaaggcttcatcaatacttgttcttcagttagttgcagagcttaggaaaatctagcatctgcaagctgaaaagatttaaaccacayttaaaaaatacacaatcctctaatctactgctaattatgagttggcaagttaattgctacttgcaaagtcattttctcaacctccattctgttaacagttttacattctaattatttttatagaggtcttttagatatacattgtttgcaacagatgttttggagcccctgccatgtcaggaaaggtacaagttactaaggctacacaggaagaaccaagacagtccctgtctttatccatccaccagatgaataggtacactgtgcctggcactttagataaggcattcagtgagtcaggcgaggacccctgccctcctggagcacataagcagacagagtccaagatagtagtgctgttatacaagtaggaatctatgaccaggaccatagggcacatcaactgtctgctttgaggggaaacaggagagagttataccaaggtgacatttcagttgtttacccatgactgggagttaggccagagaaagacaaacaaacaccttaagcaaaggcagactgcagaagrgcctggctaatccagaggaacaagtgtggcagaaagtaggatgcacagtgtaagcagaagtcaagtctgggaaggtagagtgagcccagattgtgagggctcttatatgccagcattttgcttagattttatcactacccaaaggattttaagcaggagagtggcaattattttttttwaagctataacttgtatcagtatggggaagggctggaaaggagatagggtaggaatcatgtagatcttgcaagactttaaaaacctttgcctggctgggcacagtggctcacacctgtaatcctaccattttgggaggccgaggcaggcagatcagttgaggtcaggagttcaaaaccagcctggccaacgtggagaaaccctgtctctactaaaaatacaaaaaaatagccgggcatggtggtgggcgcctgtaatcccagctacttgggaggctgaggcaggagaatcacttgaatctgagaggcagaggttgtagtgagccaagatcacaccactgtgtgatcacacacagtgagccaagatcacaccactgcactccagcttgggccacagtgtaagactctctcaaaaaaaaaaacaaaaacctgtgcttactgtaaaagtgccacattaaacaaaagccactaaattctcagggacattaaacaactttatattcattttggaataactgcagctttgaccactgaagatgtatggaaatagcatggcttggctacagaagggttattcgaagaaagatttccataaactgcattatcaaacagtaaaataggatgtcctaagctccaatagatttttttttcttttttcttttttttggagagagagtctcgctctgttgcccaggctggagcgcagtggcacaatctcagctcactgcaacctccacctcccaggttcaagcaattctcctgcctcagcctcccgagtagctgggactacaggcgtccaccaccatgccyggctaattttttttgttttactagaaatagggtttcaccatattgcccacactggtctcgaactcttgagttcaatctgcctgcctcagcctcccaaagtgctgtgattacaggcatgagccactgggcccagcccaatagatttcttataagcgatttcaataaaakgaatttgctatgcaatataatcttagcaaagctgctgtgaccttcaaaactgtgtcatcagcagcattaatcaagagttccaattctgagaagtgcatacagagggacattcagtagtttcctaagaaaaatggattttcactgtcttaatttaaatgttaatagatttgcttttagtgtatcttgactgtcagataaaattttagtgtagtgtttgcttagtataaacatcaagcaaggcttttgtgtcacattacaaaacaattttttaaattcccattaatcttagatctccatccttaattcctttaggtgttaacatttaagatactaagggaacaaaaagcttaggcaaagaatatttaaatgttcaatttggactttggaactttctaattcatgtattaaaaatcttccacttatatataataagtatggagacactacggatcatcattactgtaagcacagaaactgaaagatgcggccaggcgcggtggctcacacctgtaatcccagcactttgggaggcccaggtggggtggatcacaaggtcaggagttcaagaccacggccagccaacatagtgaaaccccgtctctactaaaaatacaaaaattagctgggtgtgatggcaggtgcctgtaatcccagctactcaggaggctgaggcaggagaatcacttgaacccaggcggcagaggttgcagtgagccgagatcgtgccactgcactccagcctgagcaacagagtaagacgccgtctcaaaaaagaaagaaaaaagaaaaaaaaaagaaaggaaagaaaaagaaaggaaaggaagggagggaagggaaggaagagagagacagagaaagaaagaaactgaaggatggacacctgggcttatttctctcgcaagggtagaggtacagaaagccctcgccctcaataaccacacatttttccaagtaaatattacttttgcagcaacctaataccttcatttgctgtctctcaaggactagttctctagcagtagatttccaactgtggctgctgtcccacagtacaaattacgttgtgacttaggacacacatacataataaaacctaacaaaaaatggaacagtacttacccttattgagtacaatgtacttgtcaatgtttaaaatgctcatcatgacccactaatgaacatgctrtgactcacaattgaaaaggactcttcatttccactcagttaatgctataattggtgaacataatacagatggctgctttaataatttacttgaacctggttcttagctctagttatatgcaagacagtccataaatctgtttccagttactggcagtaagtttttctattgatattgctgaaaaacttaataactgttaagctttattatattaaaggtgygccaatattttcctttgtgtggaaaaatattrtatagctttagaactaaatgtatacttggagatttaaccatttttgtttttgttttgttttagtcaaatattggagataatgtcagcagtgagagatgaggatccactggaattagccaatacactatataacaatactattaaagtattttttcctggaatataattggtatatgtcttccactttccatcatgtatgtaaaatttcatagtaaaacttcctgatagtttcaataaagaaattatctgcaagttgtctaaagaaatactatatatcggtacacaccattccccaccattccccttctttttctcgtaaaatcagatcaggatgtttttatatcattgagtatcttagtttaaaacaatttaaaaaaaactatttttgttttgtaatatcttcaaaagaatgaaaggacaattttatgacaatactgcagacacagaatggctaacaaatatayaattttacataaaaaacayttagcacattctggtttatatcaaagtttagttgatacagtttatttgtcaaccctcagtctctctctgaatcaggactttcaaactcagctcaattacactgctactcaagtttcaaaaaaggtcctcagttgcttctggcagctaattttttctttagttttaaaatactctctcatgtcctttatcctctggtcaaattattttatttccttgactttaatgtggtttcctgatttgcattttcattctcccacccatttctaaagaaaaactgaggtccaaagttacattatataatttcattgaagaatatttggcacaggtgacgcaccatatgatcattacatctattaaaaagctatttgttcaaattttgtcataaaaatgtgaaaacattttattctatgtacaataatgtacacaaatttaaacaggtcaccaaagagaccagaartaattaaagaggtatatttacagtagcacatcacagtaaacggaaaaccattcacagattcaacattgatactgtttttgtgcttggttacacactgaaggtgaaggatattactccattttggatgaactgaattttaaacaaatacctcaatcattaataaatgctattttcatcagtcagtatcatcattaaattcttcagctgctgcgcctgtgtgctgaatcactccatttctttctctttgaacatcatcatcacaatctgtactgtcatcttcgttcaattccctgtcagattcagcagcagcttctcttacagcttcctctggagtttcattgggtggaataaatccattgttgttagatacatttgaattatccttgatatcatcttcgatgtatactttctgatggcacattggacaagtatcttgaatgtacagccatttccgaaggcaaagtgcatggaaataatgattacacggtgtaatacgagcagatgttgtaaactcatgatagcagattgcacatacatcatttatttcttgtaagcggctcccttttatttcaggaagtgaattaattttcttcacagcagtcctacgattcataaatgtcttccagccatttttggcttgtaagtagatgttaaaatatgcatgtaggcacatcataaaagcccgaattttacttccygactcaaacatcatagtgtaagccccatttccaaacattacaactccaaatataaattcaataatactgcctgttgaacgaacgtagtagacataatcgtcaagcttttcccagaggacattatagtagccatcaatcatgaataaygtataaacagtgagagaaacaattacttttaagcacagttccacacaaaatgctgtaactgcaaacaaccatgtktttagtgcatagtgatgccaaagaacataactgagtaagacaggaagaataaacaggcaagcagagacaaacagcacaggaaaatgtctacgaaaagatgacacatgagaggcactgagagacattaatacagggtctgtcattccatggataaaatgcaggactgcagttaataaaaggcacatgtttctacttaagcgaataagtctctcttctggtcttagcccacttaacccagtctgaagagccaaaataaaaaataaaacaggtgcaacaaagccaagacgcctgtcatcttcctcagttgatccaataaaggccaatattccaagccccaaataatgggctactgaggaaattacagcactcatgcccagtacagttagtgtagaatcgcacccactaattataagattgcaaatgaggtcccaaaaatcatcccaagaaataaagaaggaatcagtttcatttgccatccttaagatgtacattaacactgtagcctgagctgtaactcttgttagccaaaagactcgtagtatgtctgggaaacgaatcctcttccatytgtcctccatcaataactgtaatccrtaaattcgatacatgtgcctcaccaaaagataaacatatcgtgtggaataataaaaccacttcagtttcactgccaggacaaacactgtatttaatgtgagaatcaaggaagaagtaaacagtaaagtctctctgatgtgtaatggtagctctgtgattaagcctattacaggaaccaagagatccaaaataattaattgtgaatagatggaatgaatctggagtagtgtaacgtatccaattccaaatgttagctgtagaacgataagtgccatccacagcgagggaccttttcgaggaagcagctcaattccaaargctgacgtgttgtaggcaccatagaagtcaatgtgcaaagaagcataataattcaccaacactgaagttgcagctaacagaaaggctgagctgtacgtgtaaaacttgaaaagtgatcgttgtgacaagatcagaacaatactggatgcaaatacacctaaaagaaagaaagaaaaagtcatttgaatgaagtatttgtaagaatgtttccccactaagagttatgatattcttcctttaattaggaaatatgaatattttcagttatgaacattaagcctcaagacaactaaggcttaaagggtaataaaggttttgtaaagtcagagttcaggagaacagaccaaacatactaaattattctttaaaatttcattccttactttctaatttccaaagtatttcaagtaacactgtagctgtccaaggcaccaaattactaaattattttcaagatgaatttgtagtggtacatacattttaacaagttttaaaactcaaaagaatatgtcttttatcatttcataatcattaaaattaattttaaaaattgggttaaaaataacccaaatggaaaacatttattcctattaagttttagattcatttattattgactgactgagacaagagtctcactctgttgcccaggatggagtgcactggtgcaatctcagctcactgcaaattctgcctcccaggctcaagcaattctcctgccccagcctcccaagtaactgggattacaggcacctgccaccatgcccagctaatttttgtatttttagtagagacggggtttcaccatgttggccagactggtctctaactcctgacgtcaagtgatccgcccgccttgcctcccaaagtgctgggattacaggcgtgagccaccgcacccagccaagttttagatttttttttaaaggattctttaggaaatcaagttcaagttttatacttccacttaattcctccttttcttcaaactgtgaactcatgccagctcttatttcctactccttaactctgagcattctccaaagggtccaaaattccattttttttcctcctagtttccttcggacttagaaacatcttccaagttccctttttcctgtataatgctgaatctgtttcttaaaatagtcaactctttttattgttcttcacattacaaaagtaacactcagaaaaccaagacatgtttttagaaaatggtaattctccttcccccactccatagacaccatctttctttgtactctgacagaaatgcatattttaagtaggattacaataaacacattattatccaaggtttcaacaatgggaatgacatctgaatactcacctactttcactcctacaactgcaaatctccaaagttctgaaactcgacttgccttaaactagaatcagcttttccttgtgatttgctatttcagttgaaggtaccattattgttcttttagagatactcccaacccagccccacatgctcaaactttgccaattagttgccaaattcttctaacacctctatctcccttttctgtgacaccaatcaatcagtctgtctcaaaaaaccctcatcttgtccaaatccatttacaagccatcaccaaattgcctttcttcattccctgctcaaaatacttcagcggctctgaaattactatcaactaaaatctacattcttgctcctggcattcaagaacccaatttgctttacagtaatattcctcctaacacacacacatcagtgctccagacttggattccccaaacacattcctttctccactatagctacagcagtgtttacattctttttgcttggaatgatgtccccaacctcccaatccctgactattcaaatcctacctatcctagaaacctactttctttgatagaaactgttctttcagcatacctgcagaacttagtgaaacatttaacactcatatatcacctgatattgtagtctgcagttatctaagtataatctaccctattacacatgtatctataacagaaagcaaagatcctaccctgtccatctatggattctacaatattttgtacaaaataagtacaattagtattcattaggaaatgtctgtcacatctggatgtttttaaaggcaaccacaaaatatagcctgcttgaaaaataaaatctatgtttcagacaatgagaaaccataccctggagtacagaaaaagtgacaaactccaaattaaaaatccatcttggctgggtgtggtggctcacaatggtaatcccagcactttgggaggctgaggcgggtggatcacttgaggccaggagttcaagaccatgtcaacatggtgaaaccctgtctctaccaaaaatataaaaatatgccagggtggtagcacgtgcctgtactcccagctactcagggggttgaggtgggagaatcgcttgaacccgggaggcattgcagttagctgagatcgcaccactgcatgccagcctgggtgacagtgagaccctgtctcaaaatacataaataaataaatattaaataaaataaaaatccatctatccaccttatttcagcaggtaatcaagacattgcatattattacagtagacgcatttcacaatccactgcacatataagcaagggctagttcatttaagtgatgactctgtccagggatttaaaatgtattctgtgccaaaatgtcaagtcatctgtgaaaaggaaaacaaaaggacacaataaagtagaagacatataaacctctaaatacaaaccacctgattccccaagaaaatgggccactaataatcccccaaagagttgtgagctcagaacaggctcttttaaatatatatatttttaatatatatatttttaaatatatatatatttaaataatatatatatatttttaatagatatatttttaaatatatatatatttaaatatatatatatatttttaatatatatatttttaaatatatatatatttaaataatatatatatattatatatatatatatttttttttatattttttttaatggagtttcgctcctgttgcccaggctggagtgcaatggcgtgatcttggctcactgcaacctctgcctcccaggttcaagcgattcttctgcttcagcctcccaagaagctgggattacaggtatgtaccaccactcccagctaattttgcattttcagtagagacagggtttttccacgttggtcaggctggtctcaaactcctgacctcaggtgatccacccgcttcggcctcccaaactactgcgattataggcgtgagccactgcgctcggccctgaaaagatttttttattagaaacttcttccatggaaggtaacaagaaaatggaattaattcagcctaccagatgccatatgtaatcttacattctctacatggaaaaccaccttattttcctgagacaaaacttcagaaactttaaaacaaatcttctaagttgggtcaaaaccaaaacaaaataactctagttctactttatgccacttagaggggagaaagtcaagcaggaactgtaaattatttttgtcaacttgctattcacaaagtagtaaattaatcttcagtaactattcatgagctttgccataattttataactaatttttaaaattctaataacttttttcctgaagcttgtttttactacacacaaatgaagaaattatttgggttttagaaacatttctagtgaaaaagtgccattttgctttatgcaaatgtatcaaagaaaaaaaggggaaggcatcagatagacaaataatgtagtaagactacaacctcaaaatttggatgtatcccagcaagtaacaatctgacaatactctatcctgattaaaatcacaccccccaagatgtaatagtgagttaacatttcaagaatagtatatgtttgttttaattcctacccaaagtttgtaggtatatggggttcatagattttccttttatagtcacgttcctacctatggaatttgggaagaatctgctctcattttaaaaaccaatatcctaagtaacaagtctccaaagtaatcatctttctcatggcctttgcagaataatatcaaagtttcactgcatttttacattagacatgaaagcctttcttggtatttaaactgtaggtctaagaaaatataaaagtccagagacagtttctcattaggatttggaagtg

SEQ ID NO: 93874 - DNA, 23232 bp, Homo sapiens
agggtagacccatcactccttgcgttaggtgttgatggaactctggtccggttttattgttggactgtggatccaactggtcctgaggcatatgagaaaggctcttcttggccttcatgtatgtagctctggggctggaccttacctgttaggatcaaggggtaggtgggctttgttcagatacctcccagaaacacattaggagcagaactcaagaacagaataaactaatatgagcatacttttggaaggttctgtgacaaggtgataagacaaacactaagacagggagggtagtagacagtagtgttttccctgacctgaactgtagggatcaccttcattgtctggggcctttagaaaaggtctctcagctgcacatctgaatcttcaaagatgccagaaatagactcaaatgccatctttggggtgggagatggagggcagagctcatggctgttgtggatacctacagatggatcccaaactgcgcccatcttttgtggagattgggaagaccctggaggaaattctgagccgcctacaggaagaagagcaggagagggataggaagctgcagcccacagccaggggtaagagattagaccagggagcccaacctaaccctaagggaggaaattcggatgtggggccttctcctcttagggttgtgattgccaggatcccaggtccagaaacaaatgggaggggaaggagatgatgcagaaagtactggcctttttaagagctgtggcttggcatactgcttcccctctctgagtctgtttcttcattggtaaaacagggccatggtatcagctttgctttcatgagtgaaaacattctgtggtaaaatgctgcttgtatttgttatgactagtgagagtaacccagacttgattattcttcaggactcttggagaaagcacctggggtgaagcgactaagctcactggatgacaagatcccccacaagtcaccatgcccaagacgtaccatctggctgtctcgaagccagtcagatatcttttcccgtaagcccccacgtacagtgagtgtcttggacccatactaccggccacgagatggtgctgcccgcacccccaaagtcaacccttttagtgctcgccaggacctcatggggggcaagatcaagttttttgacctgcccagcaagtctgtcatctctctggtatttgacctggatgcaccagggccyggaactatgcccctggctgactggcaggagcccctggccccacctattcgccggtggcgttccttgcctggttcgcctgagttcttgcatcaagaggcttgtccatttgtgggccgggaagaatcgctatctgatgggcccccaccacgcctaagtagtctcaagtacagagttaaagagatcccaccattccgggcatctgccctaccagctgctcaagcccatgaggctatggactgctccattctccaggaagaaaatggttttgggtccaggccccaggggaccagtccatgccctgcgggtgcttctgaggagatggaggtagaagaaaggccagcaggctcaactccagccaccttctccacctcaggcataggcctgcaaacccagggaaagcaggatgggtgagggggtttagtccctgcctcaccttggggatggaccttcagctgaaaccatatggccccctaggtgcacagccttgattcttccctggagcctacagagcaggcaggctaggccaagccaggctcaacttctgggctcccagtgcccattggctgtgtatgacgggaggcagcagtgagaggccttcctagttagggccaacagctgataccaagcctctgaaatccagcaaggaggtctgcctcccaccagaccctctccagtgtacttccccagataggaccagaggatgtctagttctaggctgagctggcaggcagctattaccccggttctttccccaccccaggtctgtctcttgccttttcttggggcatataagctactgagtggaacatggagctgatcaagaggccgtaatggtcatggctgtttcccagacctgaatattggggtgcttcttgccagtattctaagacatttgagtaattgctgtttgcacttactgcatggtcagaccacgtcactacatttctatgcaaggggacagcaaggcagcgtggtggtcatggctcttagctaacctattcaaagaccttttcctgttgattaatctattttcatatttataaaggagtcttaatgttctgccccataagactttcaaccttgtggttgggagtggggctggttttgtaggccctagggcctgcttctatgtatttatcaacatgtgatacattcaattggttaaatggtttatacagggactgatttgcttcccttcctgccatggctggagctttgggaacagtctgtccttacagagctgcaataagaaataaccaaagatgaagctggtcaaatattttcataacttgcttctgttgatttttttttttgtaaaactttcccaagacattttcagacttaaaaataaagtcagtgttacaggtgctggtcagccttcttacttgtacctcaaacactgggataaaggaggcggtccagggcaatgcagtgatgtctgtcaagacattccccctcccctaaactcagtagcagttgaggatgacatttcaggctagagagacccaaaatacctctgttccacctgagagcaaggtggaagttgcatcagctactgccccaagtgagcttcatcttctgattgtgggctttggaggaacgagagaactggctcttggccactgtgaggggtacagctttgccactcaaatataccttattgtggcattcagggagccagggtccagagctgcagggctgcggtccctggctcacttccacataggccatcacataacctgtcataaaggcatcaaaaccagcccggtgcaatccatccccaggcactgggttaggactggcttggctccctggcacttctgaggtagctctatcagctatttcaggccttgctgccttaatccccatctctaagtcatttttgttgccttgcttggagtgaggcaggttcctagtttcatcggcagccacctcctgctcggtttcttcaggcttgatgctatccccacagacctgcttcttgggaggaccatccttagcttccccagaggtctgtgtccccggtaggttcaataaagccctcttccgtttttccctacgtcgtcgccgtcgccgcttgtcctctgccgcagcctcatcagtgtcaatgataaggtcaatatcgtgagactgaggacactgtggtcccagggggcaccagccataagcctaggggtgggaaagaggcttagaaagaggctccaggcatcagaaccttccctcccaagaaacaggtgggtgctctcaccgagaagttgtcacagatgctggtgggatgaggacggtgggttgctgggggcaggcagcagcggtaatcaatatggtccctcatgctggaaggatagttgcagaactccagggtaaggtgtgggctgccagctgcccgctgcttcccattttcccgttcactgcaacagcgcaagagggtaatggtccactagcatataagctccataagagcagggttttgtggtctgttttgttcactgctgaatcctcagcacctaaaacactgcctgggcacatggtaggagctcaataaatatcttaagtgaatgaaataaactcgtatcaggccccacccctttccctcaaccatttcctcaccatttccggaaggcatattctaagtaggaggccacgaaacgggcatgaaactcagcagcatatttggtgtcataaatgcctgctgggaacatctcacacaggtcagcggtgaaggttcccagactctcagggaggtgtgcataraagttctggtacaggaacaccaagtctataaggccattgtgtagcaccaggggccggcgggctcggattagctccaggaatagggtccgtactgactggctctggctctcatcaccctagatgaaagtaaaggggtcaatgaggaggacagagtcccccagggagcctcttctgctgggcacttatcccagacttccccacttggaacgctctctctctaccttacccaatgctgcccaccctcctcataccagtcttgtttcccaagccctgtcactagtgattccccatactccctaagaagcagattctccccagacatccagcctagggtaggaagaaataaagtcacagaaagggcagactcaaggctagggaggctagaggcctaccttgtcattgcccttatggtaggggatgccttgggcatactgctggttgaagttgaagccatgctgtatcaggaactgcacagactttggttctatgacatactcctccatgcacagcagagtgagattgaacacttgagccagataggaatgttcaccctgggagaaagagaagtctgctatatcaagatttcagagagccaagctaggaggatgcaaaagcttaagaatgatacaatggactctggggactcaggggggaaaggatggaggcaggtgagggataaaagactacgcattgggcacagtgtacactgggtgataggtgcaccaaaatctcagaaattgccactaaagaacttactcatttaaccaaacaccacctgttccccataaacctattcaaataaaaaaaaaaaaactatcaagtcaaaaaaaaagatttgggagagaaatgcttcctatctgatgttccctagaatctctctaccctccaccccacagccacacctaggattggggtgagatcagctcataccttgtctggctgccgcttgaagcaggcgaggcccagggaaaggatagaacgggtcctggcagcatgacacacggccttgtaacgttcctcaatgcaccttggggttgggtatgggggttgctgtggctaggagttagccttatgaaggacccaaaccacccaggtctgtgaccccccyactccacagttgagggctggcactaaagagaaaagggcttatacttactggttcagcaaactcttcctgtccccaagcccactcagctcctgtgggtaggtaaagggagagttgtgacaggcctctagcaccagccccttcacaaccacctgccctccttgtttcccaactctcaccgtgtccacagccacgaaattagctgtctttatggctagcaggagggatggccacatctccttgaagttgttgctttgcacatccactacgggaacctggactactagctcctccccagatgttgtgcttttgctgacaccacctgggggttaggagggtgatggatgttcatgcttaaggaaagagcccaggggaacagacaccaagctaggccacggtgatggtggtaaggggggtagtttccattggtagcttttcccacaagcctttgtaacccacgtgttctacacacaggccttggagtggagaatgccctgaatttggggagaggaagcctgagtcttctactggcttgtatgagcctgggtaaattacttcccacctcgctttcacaatctgtagaggagaaagttggactagacgacctttgattcttttttcccatgtcctgcaggaaacattttgtagggcttgaggatctcagctcccttaatatcccacagggatccatactactgttctcatggtgccccagcgccacaagcaacagctcccagtaagccccagagcctggcagtgccccacaccagagctcccaatacgtcctaccttcctttggatcacaacgctcaatccactccactgaactgaatcacaactattactactaaccgttatgagctccagactacatctcccgccatgcctccatcagccccatgctcccaacgctccaggcttttgcagccggagccgcggtgtacaacggaacttgtagtctcctcgtggctagttcaggcggaaggagcagtcctctgaagcttgaggagcctctagaactatgagcccgaggccttcccctctcccagagcgcagaggctttgaaggctacctctgggaagccgctcaccgtcggaagctgcgggagctgaaactgcgccatcgtcactgtcggcggccatgacaccgctcgtctcccgcctgagtcgtctgtgggtacgctggayttgcggtccgtctcctggcgcggttcaggcagtcggggatggggcggggtctcgccgtcgggtcgccgatgggtcgaacttccgttcagacgtcccgggtccggcgcggggaaggcagcctggcgcgcgctaattgcctattggcctgtgctgccggctcgcagcccgggtggacccgagccacgccccctggagtgcgccggaaagccgggcgcgctagagctcgcgggaggtaatctttctctcctgctctcgcggcgggaacgcggggcctccgtgttctgctgtcttcatcagcgtgggccgcgggtagggggtagtggggtggctgggtttgggctttccagagaaggtgacgctgcctgagctgagcttaaagcacgcccaggagttagactaggagagggtcgtgtgggggaaagaagggcgttctgggcatcggtaaattcccagagaggatggagagctcagtgatctccagaaagtgaaagaggcggggagtgggccatcggaggaggctgcccagggtgtaagagcgaccgattggtagggaagcttttgtaataatccaatcaagtgataatgtgaacttgaattaaggctggcagtatggatggcgaggaagggacaaattgtgaagcagctaggcggtatagtcgacctagagggtgattgaatttgaaagaggttcctaggccgggcgcggtggctcacgcctgtaatcccagcactttgggaggccgaggcgggcggattacctgaggtccggagttcaaaaccagcctggccaacatggtgaaaccccgtctctactaaaagtacaaaaaaaattagctgggtatggtgcgggcgcctgtaatcccactacttgggaggctgaggcaggagaatcgcttgaacctgggaggcagaggttgcggtgagccgagatcacgccattttgcacttcagcctaggcaacaagagcgaaactccgtctcaaaaaaaaaaaaaaaaaaaaaattcctattggagactagtccctccgtaaacactacgattcccatccacctctgccttccagtgctcctttgttactcattgtttatagttaatcttcagcttctctcaactgagcccatttcatcattattcagaactgcttgggccgggcgcagtggcttatggcctgtaatcatcttaggaggccaaggtgggaggatcgcttgaccctaggagttcaagactagcctgggcaacatagtgaaaccttgtctctacaaaaagaaaattaaaaattagttgggcatggtggtgcgcacctgtagtcccagctacaggaggctgaggtgagaggatggcttgagcccaggaggtcgaggctgcagtgagccatgttcttattgcactccagcctgagtggcagagcagcaaagtgagggacacactgtctctaaaaacaaaamaaaacaaaamaaaaaaacaaaaataaaaaaactctttggatttctcctatcctaaaaaagggaaactcttttgactatcccccatcccattaattcatttaacaggtatctattgtgtacagtttacctggcactgactttggacacacaccaatcaacaagagaatcagtccttgcactcaagtcgttttttacagtcaaattcaggaagtacacactgatggaaagaatcaaagtaatgtaaaattacattaggtaagagctacaaggcagaaatatgtgataggataagatgaggggacctgatttggacatttcagtcaagacttgaaaaatgataaggtgttaggtaaaagcataaaagagtccaaacagaggaaatggattgtgtgaggccccaaggtgggcagacacacttgaggtgtttaagcaactaaattcagtcaaccttggctagagcatagtgaggggatgaggcggatggtgcccggatcactggacctgcaaggctgtagtaagaggactgccttctaagagcaagggtgtggcagccaaatccctccaatggcctataaggtactttgtgaccctcctctccccacctcatctggtttacttctctgacctcttctaccactcagtcccatctcattccattctaaccacattgacctacttactgtaccacagacataccaggcaccctccttggggcctttgcactcacttagaatgctttgggtctaccttgaccacagtctttaaaattgcaacattaaaccccaccttggcactcttttttttcccctcttggtctaatttttgctttttatgctaatatttatcacctaacatcttatggaatttacttatgttcattattccttttctgtccccattagaatataagctccctgagggcaggaacttttgatgttttatttactgaagtatgccaagtgcctaaaactgcttggcacatattagggggctctataaatatttgctcaatctttttttytctttaagagacaaggtcttgctgagcccagggtggagtgcagtggcacaatcatagctcactgcagcctcgaccttctgggctcaagctgttcttcacttcagcctccagagtagcaggattacagtgttgagccaccacaaccagcttgctcaagaatttaatgacccatagtaaaggcctacagtatttaaaaaagaaagaaaaaggaaaaaaggaaggaaggaaagagggagggagaaaaaaagagaaaagaaagaaaataaaagaatataatggggtgtcaccaggcgccgtggctcatgcctgtatcccagcactttgggaggccgaggcgggttgattgcttgagctctggaggtggagactagcctgggcaacatggtgaaaccctgtctctaacaaaaatacaaaaattagctggatgtggtggtggtgtgcgcctgtggtcccagctgcttggagttggggtggggtattggggtgggaggattgcttgagccgaggaagcagaggttgcagtgagccaagatcacaccactgcactccagcctgggtgacagagtgagaccccatcccaaaaaaaaaaaaaagaatgggaaaccattgaaggttataaggaaggaagtgacgtgatctggaaaagattcctttgctctttggagaatagattgtagaatgaatgtggaagtaagcaggtttggtgaaggaagtttggctatgaagggaaggagggtgggatttgattgtgttacgagccaaggggaaaatctttccctttgccctctgaagatctgctgaaaaatcagctcacaaaaggcaggttaactggagaaaaggcatacaaatttattaacatgcacattgggagaaccataaagtgattacccatctccctacagagttcgtgagtttatataccatctggcaaaacagattatgggaggggtgtctcacgtgtgtccatgtgaagagaccaccaaacaggctttgtctgagcaacaaggctgtttatttcacctgggtgcagacaggctgagtctgaaaaaaaggagtcagcaaagggtggtggaattatcattagttcttataggttttgggataggcattggagttaagagcaatgttttgggggcagggggtggatctcacaaagtacattctcaagggtggggagattataaagaaccttcttaagggtgggggggagattaccaagtacattgatcagttagcgtggggcagaaacaaatcacagtggtggaatgtgatcagttaaggctattttcacttcttttgtagatcttcagttgcttcaggccatctggatgtataagtgcaggttactgaggatatgatggcttagcttgggctcagaggcctgacaaggggtagaagagaaattctgtttttctgtttttgtagagacggggtcttgctatgttgcaagcctaatctcgaactcctgggctcaagtaatcctcctgccttggcctcccaaagtgctgggattacaggcctgagccagcatgtccagctctatttgtttttaaataaaccgaactttggccagaaggagattctgttgaagggcaataaaggattactagagagaatggaatggggacagaggttgacttgttaatagttctctttggaatttgagtgatcctgaggtacacaatacctgtgaaagggtttgttcaggtgtggttacatgttagtcttattgggaggggaagaaaaaacaagtattctttttagtgagtttggactttaggcagataaagagttccagagaacaactttatcctggctttgggagagtctggggtggaaggatcagagagaccttgcggcttcttgagttcagcatgtcagagggccatattttggggtattggtttcttttcttttctttttttttgagacagagtcttgctctgtctttgttgcccaggctgtgcagtggcatgatctcagctcactgcaagctctgcctcctgggttcaagcgagcacgtctggctaatttttttggatttttagtagagatggggtttcgccatgttggccaggctggtctcgaactcctggcctcaagtgatctgcctgccttagcctcccgcagtgttgggattacaggcatgagccaccgtgcctggcctggggtattagtttctgagttccaacagttagacgggattggaggagcaggaccctgaagaggaggagggtaagacagtgcaaatggaggtagatttgaagttggtttttttttttctgaaggaggaggcaagctcttttgatgaaaatgaggtggtaaagtcaaaggtttggggggagagtttgatacagaggcttagcagggactgcattttatcacagtataagaatgctggtcgtggatttgaaagaacaagtcgcttaatctccataaacctcaatttccttataactaaggtggaggtgatactagtacatacctcatagagtcaccaggagattgagagatccggtaaagctcttcatggggtctgacatagagtaggcactcacaaaatatcaactaattttagctgttagagaaaaggcggccattataacagttagggagcagtgaaaatcaaccaggcacattttctcattgttgatggtcagccacctatggtttactagattaggaataaaaatagctaatctctgttctcccactgatttgccatctgttctcagacagatcttttgtccctctgatccttggtttcttctaggataaaatgaaggttttggacttaatgactactacaggctgtttcagtgtaaccatgctacatctctaagaggcagagaaaccgcctacccccattctcccagacacacctaaacaacccctatccacacacacagtcacagtaagcatcagagatacacaaatgctcccaaacaggaggctttcatccttgacccatcccagccctggcctcacagtctttgcatgtctccagggctgtaacgccggcccccttgaggccacttgctcagctatactagttgtatctcagtgctgcagccagccaagagtaaacccgtgagcatcttgagagtgcttgagagaagctggaccccatgtgaatggtggatgagagggagatagctatcacccttggaaggcctcaaaatttggcctcattgtgactgactgctttggctgggtctttttgtttcaggccatyatgaggaagccacgagcagccrtgggaagtggtcacaggaagcaggcagccagccaggaagggaggcagaagcatgctaagaacaacagtcaggccaagccttctgcctgtgatggtaaggaactaggttgtggcccaaggctcattggccatgaaaggcagattcaggctgggaagggattgtgatacgtatcaagacattaagagacttactaagggccaggtgcggtggctcacacctgtaatcccagcactttgggaggccgaggcaggtggatcccttgagcccaggagtttgagaccagcttgggtaacatggcgaaatcccctctctatgctcgcgtggtggtgagcgtctgtagtcccagctactcgggaagctgaggtgacaggatcgcttgagcctggaaggcagaagttgcactgagtcaagataatgcaactgcatttcagtctgggcaacagagccagactcttgtctcaaaacaaaagagactcactgagggtgtaattctgactgtattgctgtgtgacattgggacaattgctctgaatggctgctttcttaccagtaaaatggagcagtagttcagcatttcctccctcatgtggctttcatgggaccaaatgagtttatgagcctgaaagtgttttgtgaataggaaggtcctgcaccagtatacattctagctggctaaaactattaggttttcattatggctcagagacaagccagtagtaccaccctgagaaaattaaggccagaaacttagccacagctacacacaattacataactctggtctgactccagctccaaagcttaagggggttagttgggggaagccctaagtgggagcatactgccacaggctgctgtgtcccaagaccctgatgcacagcctgtgcagggatgattgctgagtgtcctggggccccagcaggcctggccaggcagccggaagaggtggtattgcaggcctctgtctcctcataccatctattcagagacgtagctgaagtcacagccttcygagggagcctgctaagcyggtacgaccaagagaaacgggacctaccatggagaagacgggtaggcaggcgaggagcagggacagtgggtgggaggcaggcacccagccccctccaccctaactcctcatctggggttgcattgacaggcagaagatgagatggacctggacaggcgggcatatgctggtcagtacatctcctgagagcagggccactttgcctcgaggcccttgggtctgggggctgtgggccaggtaggggcaggtcagcagtgtcctcatgccaacccctttcccccagtgtgggtctcagaggtcatgctgcagcagacccaggttgccactgtgatcaactactataccggatggatgcaggtgactccaggggaggaagggaagggtcatgggtcagaccccagatgagagcctctactttggggtgggtgtagagaaggcttcctctaccaccttcacccttgaccttgtctctttctgcctgcctgtggctatagaagtggcctacactgcaggacctggccagtgcttccctggaggtgagagccaccctagggtaggggaaataggaacratagagggactgacgggtgatctctttgacctctgatcctacccacaggaggtgaatcaactctgggctggcctgggctactattctcgtggccggcggctgcaggagggagctcggaaggtaaggggatggcaggagggtaggaacccaggagtcttgggtgtcttataatcttgagtcttgcactccaatcaggtggtagaggagctagggggccacatgccacgtacagcagagaccctgcagcagctcctgcctggcgtggggcgctacacagctggggccattgcctctatcgcctttggccaggtgatctcacagcccacccccactttgtgcgtgcccagcctccttcctcccagcccaggctaactctttggcccctctgtgccaggcaaccggtgtggtggatggcaacgtagcacgggtgctgtgccgtgtccgagccattggtgctgatcccagcagcacccttgtttcccagcagctctggtaggatgttggggtaacaagggtgcttcaggggtgtctgcaaaggagctctgcttcacagcagtgttcccttcttttaggggtctagcccagcagctggtggacccagcccggccaggagatttcaaccaagcagccatggagctaggggccacagtgtgtaccccacagcgcccactgtgcagccagtgccctgtggagagcctgtgccgggcacgccagagagtaagcctactggggaaggggcagtgagaagtcctaaggagtgactctgccctatgacactcaaccctgtgcctctcaggtggagcaggaacagctcttagcctcagggagcctgtcgggcagtcctgacgtggaggagtgtggtgagcaccaaacctagcccccaccccaacccttcctggcccagtcagaagccccattccagttcttcctctaacctgagtaagattctgcagaacccggccaaagcccactctctaggttggcccctaaagccctcttggcttgagtagggttcggggatctccgttcccagctcccaacactggacastgccacctgtgcctgcctccctcggagccctgggaccagaccctgggagtggtcaacttccccagaaaggccagccgcaagccccccagggaggagagctctgccacctgtgttctggaacagcctggggcccttggggcccaaattctgctggtgcagaggcccaactcaggtacctggatactgggcgtggagggcagtggcatgagtaacaagagagaatggagggaatcggcagctgaggcctgacccctgcctggctgccctccctctcagrtctgctggcaggactgtgggagttcccgtccgtgacctgggagccctcagagcagcttcagcgcaaggccctgctgcaggaactacagcgttgggctgggcccctcccagccacgcacctccggcaccttggggaggtaagtgagcagcggaatagccaaggatgttggcttttgaggctatatccacaggcctatttgaaccccttgacccttcctccaggttgtccacaccttctctcacatcaagctgacatatcaagtatatgggctggccttggaagggcagaccccagtgaccaccgtaccaccaggtgctcgctggctgacgcaggaggaatttcacaccgcagctgtttccaccgccatgaaaaaggcactacctttgttgtctttgttgtacttccttgtgtttcctacatgttctacatgaatatattactgtgtaaacaggaaaaaaagcatttttttttgagacggagaatcgctctgttgcccaggctggagtgcaatggcgctatctcggttgactgcaacctccatctcccgggttcaagtgattctcctgcctcagcttcctgagtagctcggattacaggcgcccgccaccatgcctggctaatttttgtatttttagtagagatgaggtttcaccatgctggccaggctggtctccaactcttgacctcaagtgatccgcccgcctcagcctcccagaatgctgggattacaggtgtgagctaccacacccagccatgattttttgtatttttagagatggggtttcaccatgttggccaggctggtctcaaactcctggcctcaagtgatccacccgacttggcctcccaaaatgctgggattataggcgtgagccaccatgcctggccaaaaaagcatattttaaacaaaagtactgggacatgaagttaagggcagaacaccggtttatctcttttggaaaaagtgccagccctcacctccctgtcttcttgtctaggttttccgtgtgtatcagggccaacagccagggacctgtatggtaagtctcctaggcctctcccaaccgtgtctccccaggcctgagtccataggtttttagtcagttaactaacgaatgtctgggtgaacattctccactccaggcttcactggagggaggaatagttcttgacctggagaccttccattgtggggtgcagggtagagggaaaggaaaaaaatgatgaggactctccagtgtcacaggtgtgtgaaatgcctgtactgagttttgtgggatatgaattgtggagccatcagttctttttttttttttttttttttttgagacagtctcactgtcacccaagctagagtgcagtggcccgatctcggctcactgcaatctcccacaactggattaaagcgattctcctgcctcagtctcccaagtagctgggattacaggtgcctgctaccacacccaactaatttttgtatttttagtagagacagggtttcaccatgttgactaggctggtctcgaactcctgacctcaagtgatctgcccatcttggcctcccaaagtgctgggattacaggcgtgagccaccacacccatccatgggagctatcagttctaattgggagacggatcaggaaaggctgtttggaggaagcagctggtaatcttcgtcctagaaatgaatccttttcttcaggtttgggaggggaatcaaccgtagcgatgttctttccagtcccaagagtagtgtgagcaaaggtggagcccagtgcaggctgcagtgctcaaggagctgtgagcagttggtttagctggaaaggtcagcagggcctgctgggtcagtcagggtgtgagccctaggctgctgactcattttaggtggaggagagaggagtcagatttgcatttttaggacaattcgattccctcaggcagccttttggagggttgattgatggggcagatacttgaggcaggatgaaagctctacagcattccaggctaagcctagctagatcagtagagtcggggaaagggagagaggacaaggagaggattctctgctccccctcccccaactacaaggcctccctccttccattttttcacagggttccaaaaggtcccaggtgtcctctccgtgcagtcggaaaaagccccgcatgggccagcaagtcctggataatttctttcggtctcacatctccactgatgcacacagcctcaacagtgcagcccagtgacacctctgaaagcccccattccctgagaatcctgttgttagtaaagtgcttatttttgtagttattttatgttgtatttttttgagatgggggtctcgctatgttgctcagactggtttcgaactcaggtgattctggcctcaagtgattctcccacttcagcctcctaaagtgcttggattacaggcatgagccaccacgcccgcccttttgtagctattttggacagccttccaccctctccctagccccctcaccccttatatctgagggagggacccagaaaagtggtgacgttctgcttggttctgactttctctggctgaactcccagccagccccgggcagatggggttggagtgggggtgttctgtccagactgatctgccctccaacccccaggagaaaggcaaggcagctacagggagaacctgccagtggctgacacacaacaccctctgtttacgtctcaggtcagctctaattggagtggtggcatcactctggagtaggtagttgggctcaactctcacccagcccctccccacctgcagtggtcgctccctagggggagaggaagcacaggagaagatttgttctgttttaaattcctacctcaaatacgaaataatttatttagggttatgttacatacggagtgaaacaatacagaaaagcaaagggctaataatgacaggatttgaggagtgggtgggaggaaatagaatcacagcgggacacagggaggactcgaaagtattggttatgttctatttcctagtgtgtaattcttttattgttctttgtatcttacatatttattatagactgtatataagaaatgttttagttttaaaaaatcccacctctttggagcccaatgagagacacagcttctggcaggcactgatgaaatggaagtcacacctgccccccggaggcaaagcctttcactagttgggcctcctgcagatgttcctcagttctgtgctggtctccccagagctgcaggacagctggctgcacccagccctgggcatccttaggcttcctggctcctggcagattgctcctgtacggactgccacagagctctgatgttgccctgaccaaagccagtggccccctgcctctgaatcagctccaggaagaaagtgtcctcagtaaaaagggacttggtgaagacctgaagcagaaacttgcctttatcaccatctagcaggatcccctgtcgagcaagcagatgaggctcgtgccctgcagctcggatctgcctctcctttcctggctgctggtagtatgccccagggggagccaggaactggcctccagcagttgccaccccctcagtggcctccacaatgttaggcgtatacagccccacgtgctgcaggcctggccccttgtgccgggccaggaactgctccacctggtcctgtcgtgtcgtcgcccccggaagggactcagccagaacaagagtggggacaatgctgcccggctgggcctgcagggctgtaagcctcagtcccccaagcccaaaccctgctgtcatttcgaggcccagctcgggatcctcacctgggctcagcggcaagtggcaaaagcccaggcagtcgtggaaccagcgcaaaagtgtgggggagctgccgggggtgcaggccaaggtcaggtggtccacgcggctgacccacccggggccaggcgcagaggacacgggcctgaagccgggtaggaagggtccgcggtagccagcgcgctccagcaaggtcaggctgaggatgccggcaggcgagctgaccacggcgtaagtggcggcaccctgcgcgtcccgcacgcgaacgggagggacaggcacgctgcagcccagcgctgccagctcccgggttgcagcgccggcgtccgccacgtcgaagcacaggtttgtggcgctgggcacggcgtgacgcggatccaggccgtacagcggctctccagaccctgcgccctcgttcaccaaaaagaccgcgtcgccgctgcgcagggctagctgccgccagccgtccacctcccgcgaagccaggggctggaagccgaagaggcgctgcaggttccgggctaggggctgcccggcgggcacgtggaaggcgatgtggcacaaacgaagggcgggcgcggccatggcgctctggacggcgacctagacttgtccttctggggccgcttacttgtggttggggacttcggggctctcagtcctgggctgatcgtccggagttggggagtccggctcaccccgcagagcgcgttcctcgctttcttccggaaagaagtcacccgccgacccctgagagctcgcggttctccctgcagcgccaccccagccaggagcagcgtctggaccaccgggtctcagtgagccgagctgctggttgtgagaaccacgcggtgcctgtgctcgcgccaagcaggagaaagagggcggagcccgtgactccgcctttgactccccaccccctcccccacaccctgtcgcctcggatactgcggggtcgccgcgctgctctttccccgggcctcacgcctggtcacatccttgggcactgagcctcccttccccagcccaggaactcacaatggctgccttcactcggcgccaggcactgggctcccactcatccccccaacctcacagcgaagggactcagcccgggttcagggaaagagttggaattctctctccacaagcacggaattttttagcactttcatgttttttctttaagttctggagtttgcctctaagtcttaatgttccctggaatacacacacacacacacacacacacacacacacacgtttatatgttttgagacagggtctcactctgtcacccaggctggagtggcacaatcacagctcactgcagcctccacctcctgggttcaggcgattttccttgcctcagtgcacaaatagctgggaccacaggcggacgccaccacacccagctaattaaaaataatttttttttttagaaatggggtcttgctatattgcccaagctggttttaaacccctgggctcaagccatctttccacctcagcctcccaaagtgttgggcaatctctcaaccagtcctgtctctttcttcaatcacccttctgtcaacatcatttaaccccttgtcccaagcaagatttggaggaaaaatctgacggttcgggatctgaaaggaacagctgcctggctgtcattccccttccccatcctttgaggactggaacacaggccctccttgctctttgcagcttcctgacttggcattgagccagagatttctgtggtgggggcacttctggctctgaaacccagaattgtgtgagatgactggattgaggaatttgtagtcttctggaacttcaactgagtggcccttgaagggttagggaagggcatccaagaagggcaaagggcataagcaaaaactcagtaagagtgtgagccagactcttagaggagcaatgggccatgctgttagggaggcatttaggatgaatgccacagtccaaggcatcacaagaaatttttttgtcaggcagcctgatctactgggtttcattggcaagagggagaaggatgtcataggggacaggggctagctggatgtcatggtgttcaggcctgcaggcaggagggcagtacccaggagctggtcagggtggtaaaaggtacttggtgctactctgcagaccagtgaatgtgaggacatgagttccaaaagccagacggacctgggtttgaatcaccagcaacacttactgtctgtatgggcaagttgcttaacgtctctgagccttaatttgcccatctgtaaaaatggaaataatagtacctacttcaaagagttgtgattaagtgaggtggagtaagtgttcagtaaatagtagctgttgctattgtagttactgttttttttttaattaattttattttcccacatattctaatatttattttaaaaagtttttcagagctgggcacagtggctcacacctgtaatctcagcactttgggaggctgaggcaggcggatcacctgaggtcaggagttcaagaccaccctggccaacatggtgaaaccccatctctactaaaaatacaaaaaattagatgtaatcccagctactcgggaggctgaggcaggagaatcacttgaacccaggaggcggaggttgcagtgagccaagatcatgccattgcactgtagcctgggcaacaagagagaaactctgtctcaaaaaaaaaaaaaagaaaagaaaaaagtttttttagagatgaggtcttactctgtcacctaggctggagtgtagtggcatgatcacagctcactgcaggctccaactcctgggcttaagcaatccttccacctcagtctcccaagtagcttgggactacaggtgcacaccaccatgcctggctatttagttattgttttattttatctcatgatacaatgccagtggtacctcccagaaggtgttgtgtggcctactagagagatggggacaggggcttcactggcatgggccaaaggctaggcagcctactcaatgagcagctcaccccaaggaatcctgggtagtaagaaaggaaagtaaatcttgggggccccaaatcactaagctaaaaggaaaagtcaagctgggaactgcttagggccaatctgcctcccattccgttcaaagtcacagtaagagttaaagaaagaggaaagaaacacaaaaagcagctcaaaaatcaaacctgagaggggcttctggctgatttcagtcaggagtgctctctcttacagacatatttatttatttatttatttatttatttagagatggattctcactctgtcaccaggctggagtgcagtggcgagatctcagctcactgcaacctccgcctcccgggttcaatcgattctcctgctagcctcccaagtagctgggacttacaggcacgcaccaccatacccagctaatttttgtattttttagtagagacgggtttcaccatattggccaggatggtctcaatcttttgacctcatgatccgcctgcctccacctcccaaagtgctgggattacaggcgtgagccaccgcgtctggcccagactaacagtatttattggagagagcttggaatgtttctgtgtcagggagaagtttatggtggagttggaatgtctctggttggaggggaggttatcttgaggctgacacctctccagccgaaggggaggttatcttggggctggcatgtctctggctggggaggggcttggaacgtttctggtcagagatgtcatttgtggtttatggtcatgctgaccttagccattaggctgatgccctttggatttaggcagtttttgatcaaggcaaaacttaaaatggcagtgcttgtccaagatggcagtgctcctgctccgtcagtccagactctatagtgataaaaaggacgggggcagccaggtgcagtggctcacacctgtaatcccagcactttgggaggccaaggcgagtggatagcttgaggtcaagtattcaagaccagcctgaccaacacggtgaaaccccatctctgctaaaaaaaatacaaaattaggccaggcgcggtggctcacgcctgtaatcccagcactttgggaggccgaggcgggtggatcacgaggtcaggagatcgagaccatcctggctaacacggtgaaaccccgtctctactaaaaatacaaaaaattagctgggcgtggtggcgggcacctgtagtcccagctactcgggaggctgaggcaggagaatggcgtgaacccaggaggcggagcttgcagtgagccgagactgagccactgcacaccagcctgggcgacagggcgagactccgtctcagaaaaagaaaaattagccaggcatggtggtgcacgcctgtaatgccagcaagctgagaggctgaggcaggagaattgcttgaacccaggaggcggaggttgcagtgagccgagatcgcaccattgcactctagcctgggcaacaagagc

SEQ ID NO: 93875 - DNA, 24475 bp, Homo sapiens
acctgtgggtgtttcttgttaggtggaacgagagacttggaaaagaaaaagacacagagacaaagtatagagaaagaaataaggggacccaggggaccagcgttcagcatatggaggatcccgccagcctctgagttcccttagtatttattgatcatttgtgggtgtttctcggagagggggatgtgtcagggtcacaagacaattgtggggagagggtcagcagacaaacacgtgaacaaaggtctttgcatcatagacaaggtaaagaatcaagtgctgtgcttttagatatgcatacacataaacatctcaatgctttacaaagcagtattgctgcccgcatgtcccacctccagccttaaggaggtttttccctatctcagtagatggaacgtacaatcgggttttataccgagacattccatcgcccagggacgggcaggagacagatgccttcctcttgtctcaactgcaagaggcatgccttcctcttatactaatcctcctcagcacagaccctttacgggtgtcgggctgggggacggtcaggtctttcccttcccacgaggccatatttcagactatcacatggggagaaaccttggacaatacctggctttcctaggcagaggtccctgcagccttctgcagtgtttgtgtccctgggtacttgagattagggagtggtgatgactcttaaggagcatgctgccttcaagcatctgtttaacaaagcacatcttgcacggcccttaatccatttaaccctgagtttgacacagcacatgttccagagagcatggggttaggggtaaggtcatagattaacagaatctcaaggcagaagaatttttcttagtacagaacaaaatggagtctcctatgtctacttctttctacacagacacagtaacaatctgatctctcttgcttttcccccacagatggagtttcgccatgttgtccaggttgatctcaaattcctgggctcaagtgatctgcccacctcggtctcccaaagtgctggctttacaggcatgcaccaccatgcccggcgtccattattttattttgcatttgttgttacaattatctgagagcatttagtttcatggtttataggtttaattttaatggtttataagtttatagcaggctgctatcaggttagcaagtcctactgttaaaatgattgctgtcctgggacatgggctttatacttacattgaattgccttaccttttacatttagttggctgtgaagaagagacaatggctgttgatgagtcaggtaactgtctcccacagcaaattagtgcagtgatgtaactactgctttttttttttttttgagacggagtcttgttctgttgcccaggctggagtgtagtggtgcgatcttggctcattgcaacctctgctcctgggttcaagcaattctcctgcctcagcctcccaagtagctgggattacaggggcacactgccacacccggttaatttttttttttttttttttgtattttagcagagacggggtttcaccatgttgcccaggctggtcttgaactcctgagctcagacaatctacctgcctcgacctcccaaagtgctgagattacaggcatgagccaccacacccggcatttttttttttttttttgagatggagtctcgctcttgtcatccaggctggagtgcagtggtgccatcttggctcactgcaacctccgcctcccgggttcaatcacttgtcctgcctcagcctcccaagtagctgggactacaggtgcccaccaccatgcccagctgatttttgtgtttttagtggagacggggtttcaccatgttggccaggctgatatcgaactcctgacctcagatgatcctcctgccttggcctcccaaaatgttgggattacaggcgtgagccaccgctcccggcctgtttaacattattttaaacctcaaacctgcttttcttccagtgtttcctatgtcacaggttaatgacatcactcatgtcaccaagaaactggatttaatttactctttcctttcatcctaaatccaattaatcctaaagcctgaagaaatataccttgtatttccttctttctaccctgctgctaatgtcatattacagttctgagacttctcttgtctggatcattgccgtggcctcccaattgctctctttgcctaatctcctagtcactaaattcattcatcacacagcttccagagtcaacttcctaaaacgtagttcaaataatttaattctacatctcaaaagtcttcaacacattgtaacatttattaagtacttctatgccagttactgtgctagacttgttactacaaatataaataaaacaaggggaataattcccatgctaatggtgagcaaatgaagagagcacaatggaatatatctaaaaatagaactagaggtatacatcagaccctgcaagaaagcctcctccccatggttctgaaatctttactgtcctttggagagactctacaaatcacttagacttgttcaacagatttcttcttttttcagtactctgtccagttatttcacttttatgatcttaaggggatagactgttaacatttctctaggctaggataactctttttttttcctgtttttttttctttgtttgtttagagactggttcttgcagcactgcctaggctgggctcaaactccagggctcaagtgatcctctcacctcagcctaccaagtagctgggactatagtcacatgccaaatgtgctccactctcttttagttcttttttcttttctttttttcttttttcttttttttttttttttgagacagagtcttgctctgttgcccaggttggagtgcagtggcgggatctcagctcactaaaacctctgcctcccgggttcaagtgattctcctgctgcagcctcctgagtagctgggattgcaagtgcctgccaccacgcccagctaatttttgtatttttagtagaaacaggttttcaccatgttggtcaggctggtctggaactactgacctcatgatctgcccaccttggcctcccaaagtgctgggattacaggcttgagccaccatgcccggcttttgttctttttttttagacggagtctcactctgtcactcaggctggagtgcagtggcgcgatctcggctcactgcaacctccgcctcctgggttcaagagattctcctgcctcagccccctgagtagctgggactacaggtgcacaccacgaaacccagctaatttttgtatttttagtagagatgggatttctccatgttggccaggctggtctcaaactcctgaccttgtgatctgcccgccttagcctcccaaagtgctgggattacaggcatgagccaccgtgcctggccttgttcttgaattagaaaaataaactcaagtgcccagcccaatgcctggcatatggtgaatacaataggtggcaattttctttgggctgaagtatgactgtatgtactgtgtattggtttagcctgcccatagccaataaccatccattattaagctctgaactttcatgctgcccttgctcctgcaagaaagaaaggggagtctctctgagcctacgctggctgctggctcgggtggctgcctgataaaaaagaataaaagttacataaaaattaaaaaaaggaataatgccaactaactattcagcctcaggcaaagaaggaaaaagcaaataaatcacgtctatgcaaagtagtatgataaataacaaaaattgagatgctcaatgagcatgagacagcacttcctcattcattatcccactataagggccaagggagttagtgagggagctggggacagagacagaaacatgatactattgattgaatgctcactgactgagctcctattttatatcagatgctttgttgtgactttggggacacagagacagatgtcacccacatcctactctccagaaagtcactctagcaggcagaggaagaaatgtaaaactaaaattgcttaaaagatttttttggctatacaagctattgtttggacacaaaggaggggaattgtaaatcctgggaatgagtaaaggtaagaaacagccggagagaaagtaatgctgaaagacatgttttctccagggaaagagttttccaggttcgaacaaaagtctgaaggcggccgggctcagtggctcactcctgtaatcccagcactttgggaggctgaggcaggtagatcaactgaggtcaggagtttgagaccagcctggctgacatactgaaaccccgtctctactaaaaatacaaaaaattagccgggcgtggtggtgggcgcctgtaatcccagctacttgggaggctgaggcaggagaattgcttgaacgctggaggtggagggtgcagtgagcagaagtcgtgccattgcactcctgcctgggcaagaaaagcgaaattccatcttaaaaaaaaaagtctgaaggcttgaaacaactacactgtgttctgggtgttataagtgtgaaggatggaagagttatactaatagcagctaacatttctaatttataataagaactaagtactgtactgaactacatagataatcacaataaagtattaatattattcccattttacagttgagaaaagtaaggtttaatgagtttaagacttgcccaagttcacacctaaaattacagtgaggagtttttgtgtttgtgtgtgtgtgtttttttttgagacagagtttcgctcttgttgcccaggctggagtgcaatggcgctatctcagctcactgcaacctctgcctccctgattcaagcgattcacctgcctcagcctccagagtagctgggattacagacatgcgccaccacacgtggctaattttgtatttttagtagagatggggtttctccacgttaggctggtctcgaactcctgacctcaggtgatctgccctcctcagcctcccaaagtgctgggattacagacatgaaccaccgcgcccggccctgacagtgaggagttttaactcagtaaattgactacagagcctcagcttttattttattttttatttttcttttctttttaaattttactttctttctttctttagccccagcttttaaaccacgaataacagtgacatgatcagacttcagaaagatttccttcagctgcagtggaagggatggataagagatagtgttaattgaaatgagtgactaaactgactaaaccatgtcacagacacttttgtggctgtttcttccccagcttttaaaccacgaataacagtgacatgatcagacttcagaaagatttccttcagctgcagtggaagggatggataagagatagtgttaattgaaatgagtgactaaactgactaaaccatgtcacagacacttttgtggctgtttcttcccaagaggttctcaggaggtttttagtatttatacattttccttgaaaagtgggggtgggaaagattgaggcaaagactttagctaatgctcaggaaatctacgttttgttttttgagacggagtcttgctctgttgccaggctggagtgcagtggtgctctcggctcactgcaacctctgcctccgggttcaagcgattcccctgcctcagcctcccaagtagctaggactacaggcgcgccaccacactcggctaagtttttgtattttagcagagacagggtttcaccatgttggccaggatggtctcgatctcctgaccttatgatccgccctcctaggtggcctaaatctacatttttacataagataaggtgaatgtttgaagaaaaagggaatggaggaagaaaacaattatgtggtggactcagggtaatctagtagtaaggtactactagaaaggtagaaagtagtctagtagaaaggtaatctagtagtgaacatttatggaatttgtggaatagaggccaggtgcggtggctcgcgcttacattcctagcactttgggaggccaaggcgggcggatcacctgaggtcaggcgttggagaccagcctagccaacatgatgaaacctcgtctctactaaaaatacaaaaaattagctgggcgtggtggtgcgtgcttgtagtcccagacactccggaggtgaggcgggagaatcgcttgagcccgggaggtggaggttgcagtaagccaacaccgtgccactgcactacagcctgggcgacagggtgagtgagactccgtctcaaaaaaatgtggaatagaacaaactttagttttaggaactagactttatattgtagatctagttgcaattgacacgtccttgttttatgggaggctacatactttaaaggtttccaggggagcaaataattaattatgattttgtgtatgtgtgtttgtggggsgtagtcatcaggaaatgtctgaggccttttgccttaccgtgtgggtctggctaatgtgtaatgttttgactcaagattgtaaagtcaaattattcatccggggagaggatggtcgtgtaactgaatcagcctcccaagatgaactttccctytggcgtaagtttaggagtcctgatattttattttcctttacaacagaaagcagcaaccctgtaattaaagagaacaatgaaggaagctatctaagccatgagggttactgaggatctgcgctggggttaaggctgcgaacttaagaaatatttggatagacagttctcatggcttggtgtggttagacgtggtyctccgtgggcagcagctaagacgcttactccagtttgggcattgagggcacagtgcgtagtggtcctggaagtaaagagaatcctggttttccgcagagatctaggattaacctaagcgttcgggttcgggagcggccacaagggcgcctcactccaacctcagccatccgcaacagggtggggtattagtatttttccgcacccgccccaacgagggaaagcgccgagtcattccggcggggcgcgccgggcggggctcgggccacatccccctcctctctctcctcctccggcacccccgtccgttccgactctcgcgagatccctactggctataaaggcagcgccccggagagctcttgcgcgtcttgttcttgcctggtgtcggtggttagtttctgcgacttgtgttgggactggtgagtgtgggcagtgcggcccctgcggagtgaggcgcggcgcgcccttcttgcctgttgcctcttcctcctcctgtccggggcccgcccgcgctcgggtgggggtgctgtgatgcgtgaggcagccgggggaggcccggagtccgagactgcttgagcgctgcgcacacccctctcgtgggccccccacgtaggtgcgggaacctggttgaaccccaaggcaagcgtggactcgagtcgagtcttcccccggcaactcgagcacgtggcgcggcgtctgggcgggctggtggtgggggtctccgagactagcctcctgccggacggggtgggttcgggaagcttctggaatggacctgtatccagactcgtggctgtagaagacagcctctatgtatttggctgttccgggtcctgagccttgactagctgcggagcttcgggtaccctttccccgtctttattttcctgtacgtggaatggagttagcgatgagcccaaatgtccccgctgaagcactctctctgctggtgctttctccagtgctggggagggacagggggcacctgaagtggggtttagggatgtggccctctacgctgggcagatcccctgaaggggcccggtggcggcctgaatcccagcagcstttaccccgaattggttgggttttgtacttgggggccacttgggaaagaaggattggacgagaaggccatttgggggcaccaagttgcagcatgccttagtttttggtttttgttttttgtcgttaaaggtgttaaggactttttaaaaaacagttaaaagtttgctaagatccatgcttamaaaatttcttttgcttgtggtattgtgaactaagaactttgggacttggaaaagctttcagaccgcggcttagtgggttaaatctctgttttttgagctagagtctcgctctgtcggccaggctggagtgcagtggcgcggtctcggcttactgcaacccctgtctcccgaaytcaagcaattcttctgcctcagccttaggagtagctgggattacaggcttgtgccaccaagccccggctaatttttgtattttttttttttttttttttttgagacggagtctcgctctgtcgcccaggctggagtgcagtggctcgatctcggctcactgcagcctccgcctcccgggttcacgccattctcctgcctcagcctcccgagtagctgggactgcaggygcgtgccaccacccccggctaattttttgtatttttgttagagacggggtttcactatgatggccaggctggtctcgaacttctgacctcaggtgatctgcctgcctcggcctcccaaagtgctgggattacaggcttgagccacagcgcttggccaagatctcaatactaatcttggtgttgatctgggtgaatccagtgcaaccttccttttcagcagtaaattgattcttatacttgttttcgccctgggatattagccccaaagtcaggaacccatttgtgaagggaattctagggcttacacaatacctaaagatttgaaattaagcagatgccaatcaatatcttggtcttgcctcttttttttttttggagacagagtctcactgtgttgcccaggctggagtgcagtggcgcgatctcagcttactgcaacctctgcctcccgggttcaagtgattctcctgcttcagcctcctgagtagttgtgattacaggcatgcaccaccacgcccgactaatttttgtgtttttagtagagacggggtttcaccatgttggccagactggtctcgaactcctgacccggtgatccgcccgcctgagcctctcaaagtgctgggattacaggtgtgagacactgcgcccagtggtcttgcctcttaaaagttggactgactggaagggcgcggtggctcacgcctgtaatcccagcattttgggagactgagttgggcaatcatctgaggtgaggagtttgagactagcctgaccaacatggagaaatcccgtctctaatagaagtacaaaaaaattagccgggtgtggtggcctgcgcctgtaatcccagctactatggaggctgaggcaggagaatcccttgaacctgagaggtggaggttgcagtgagccgagataatgccattgcattccagcctgggccccaagagcgaaactccgtcaaaaaaacaaaacaaaacaaaaacaaataaaacaagttgaattagttataggttgtgtgctgtcttggacaaagctacctggagaaaagtcaaatatgcttctgatgttatgaaggcaggtggaggcacrgtgatgggaaaggtcaacgtgacttttggggagccaaacaaaagtgtttgtggcattgtgcatttggattctggtttgagagtcttcatctgcctctctctctgcttctgtataatgaataagatgccactgcactaattatggttcagaaagaatgagaggttatctcagtatataaagaaattgccttgctgtttttaaatgaaaacaaaggctgagattcagagacttgtttcgttccaaaagttggaaagctcagactgtgacccttgactgctggctggagcttcttactaaaacaacatttaatgtattcagggacactggacaatgccttgattgtttacagctaagtctctttaagtaggtgaaggctgctggttatgtagaaaattaaggcttgtttctaattcatttctgttatttctagctgataggaagatgtcttcaggaaatgctaaaattgggcaccctgcccccaacttcaaagccacagctgttatgccagatggtcagtttaaagatatcagcctgtctgactacaaaggtgagagaattaacactgggctcattgagatggagttattttatattctaggggtggcttgttagatttgtgtcaatgttgtttgactgtaaaatgttttgtctcctaggaagaagtatttaggttgttaccttcatgttgaagtggtgattatcaagtgattacagggtatatatcctaggaccaaaccacttctggagaaaccacatgcttcattatgtctggacatactagctcaattatcttttcagtattcytcgtctattttctttctttatttttatttttgagacagggtctcattctgtcacccaggctggagtgcagtggcgcagtcatggctcactgcagcctctacctctctgggctcaggtggtcctcctacctcagcctcccaagtagctgggactgtaggggcatgctgccatgcctggctaatttttgtactttttttttttttttttttttttgagatggagttttgctcttgttgcccaggctggagtgcaatggcgtgatctcggctcaccacaacctccactgcccaggttcaagcaattctcctgcctcagcctcccgagtagctgggattacaggcatgcgccatcatgcctggctaatttttttttgtatttttagtagagacggggtttctccatggtggtcaggctggtctcgaactcctgacctcagatgatccgcccacctcrgcgtcccaaaatgctgggattacaggcatgagccaccacgcctggcttaatttttgtactttttgtagagctgggcgccatgttgcccaggctggtctccaactcctgggctcaagccctctgcctgccctagcctttcaaagtgctgggataacaggtgtgagccactgcctctggccctcctctattttattattggagaaatactcattatctcttgttataagagacattctacatttaaagtctcagagctcactcaaatctctggagctgtgacactgctcgttcagtttgtttgggtcacgtatatatctgttgtcatagttttttttttttttttttttgagacggagtctcgctttgtcgcccaggctagagtgcagtggtgcgatctcagctcactgcaagctccgccttctgggttcatgccattctcaggcctcagcctcctgagtagctgggactacaggcgcccgcaaccatgcttggctaatttttttgtatttttagtagagacggggtttcaccatgtttgccaggatggtctcgatctcctgaccttgtgatccgcctgccttggcctcccaaagttctgggattacaggcgtgagccactgcgcccggcctctgttgtcatagtttcatgcagacacttggcaagttctgttgaggctcctcctttctttaccttgtagttccagagcagctcgatctcctrggacagttgaggatatagattccttagaatgctaacctgaaactcaggtgtcaagtgtccttttctcagtggtgtagcattagtccctggagttagtttttggtagaacatttgactaggtttcctgacataatcacactttgttcttggggcttctcccagcaaacaaggtaagttgcaccatagggaggtgacctgggcccaggggtataagcaggaggtctaggaggagctgytctctgccctccagagcttgacctgctgaggccccaaagtgcttgttaggcaaagctggaagggttgtttagatgagttagtttccagtgatactgcaaagtggtaaatgtcaaaaagggctgcttgtttggctttttttttttttttttgaggtggaattttgatcttgtcgcacaggctgtagtgcagtggcatgatctcaggtcactgcgacctccatctccccggttcaagtgattctcctggctcagcctccccagtagctgagatttcaggcccccgctgtcacacccagctaatttttgtatttttagtagagacatgttttaccatgttggtcagcctggtcttgaactcctgacctcaggtgatccacccgcctcggcctcccaaactgcctcccaaactgctgggattacagacgtcagccaccatgccaccacacccagcctgtttgacttttcaaacattgctgctacctggaaatgagtgaatatttggaattgttctagtatttaagcctggtgggtgtggcgagaaggctgcctggccagtttgaagatctgttatttcagtggttaatcccagtgacttcattaaaattgcagctagaagttctgttactcactagtacttttgtcttttctgtctctctctgtctccctctttctctctctctctctgtgtatatgtatatatatatttctgttgttttgagacagtcttgctgtgttgcccaggctggcctcaaactcctggggtcaagggatcctcccacctcagcctcccaagtagctgggactacagacacgcaccactgtgcctggcttaaaatttttcctgtcctgtcaggcacgttaggaacacatgtgatcacttaaaccatgcttgttccattactatggttcatcacgggagaagtgcaaaggctgtgacttcttattggtgtcttatctctacagcagaggagtactgcaattcagctttctctgggtattgttaagcattggcattaggccatgcttataagtgcatccttgcttttgctatctttggagaacttggtgtttatgttaattttagccactcagaaaagatcaaaattagactgaacagtgtttactctgtattggtagctatgacatggaggcaggagaataaagtatgggattggaagtttttttcattcaggtattcctaatgcaccaggttctaaaagtagcttctaggagacatctgtattgagcatcttggcagttagtggttattgtgtcagccatcaacttgcttctttttgtataggaaaatataaagcaaggaagtctgtgtcraatgctaaccatgactcygattttccccccaggaaaatatgttgtgttcttcttttaccctcttgacttcacctttgtgtgccccacggagatcattgctttcagtgatagggcagaagaatttaagaaactcaactgccaagtgattggtgcttctgtggattctcacttctgtcatctagcatggtaaatctcttggtctatttggcatgtgaactttttttttttttttttttttttgagatggagtcttgctttgtcgcccaggctggagtgcagtggtgtgatctccgctcacttcaagctctgcctcccagtttcacgccattctcctgcctcagcctcctgagtagctgggactacaggtgcctgccaccatacctggctaattttttgtattttcagtagagacggtgtttcaccgtgttagycaggatgttcttgatctcctgacctcgtgatctgcccacctcagcctcccaaagtgctgggattacaggtgtgagccactgcacctggctggcatgtgaacttttaaaacagcaactgggaagctttggcaatagactttcaagtattgccttctcattgaagggagtgcaaagtctgactttctcttattgctctcatgacctggcagcagagaagmagcagcttcaattgcagttgagtgtaccctagtgacctaccttaactgttctcagcattcactttattgctggaaaacggaaaaaaaacagtctttttggaaagttagattaggaatatgggaaaggggaaagaggaatgcgtacagtcaagtcaagagtttgaatgtaactgtatgtttgccttttgccatagggtcaatacacctaagaaacaaggaggactgggacccatgaacattcctttggtatcagacccgaagcgcaccattgctcaggattatggggtcttaaaggctgatgaaggcatctcgttcaggtatgtcatcaggacaagtatccagttggctgaaagccttttatttggagagatctaragccctgatctgtagagactccttgtcatttcattcctttatgcaggggcctcctcactaaggccaggccagtaggagtgtggagaccagtccatttccttcaggcttcaagcctctgtattctaacaaagcacatctctaaacctgtattgcttttcctttcatctcttttcccaggggcctttttatcattgatgataagggtattcttcggcagatcactgtaaatgacctccctgttggccgctctgtggatgagactttgagactagttcaggccttccagttcactgacaaacatggggaaggtaagccatctgtctgataacaggacaacagagtggtggtatgaaggggtgggttgccccttcacacctgtgggtgtttctcgttaggtggaatgagagacttggaaaaagacacgtagacaaagtatagagaaagaaataagggggcccaggggaccagtgttcagcatacagaggatcccgccggcctctgagttcccttagtatttattgatcattcttgggtgtttctcggagagggggatgtggcagggtcataggataatagtggagagaaggtcagcagataaacacgtgaacaaaggtctctgcatcatgaacaaggtaaagaattaagtgctgtgctttagatgtgcatacacataaacatctcaatgccttaaagagcagtattgctgcccgcatgtcccacctccacccctgaggcggttttcccctgtctcagtagatggaacatacaattgggttttacactgagacattccattgcccagggactggctggagacagatrccttcctcttgtctcaactgcaaagaggcgttccttcctcttttactaatcctccttagcacagggtgtcaggctgggggaccccggtcaggtctttcccttcccacgaggccatatttcagactatcacatggggagaaaccttggacaatacctgggtttcctaggcagaggtccctgtggccttccgcagtgtttgtgtccccggatacttgagattagggagtggtgatgactcttaaaacgagcatgctgccttcaagcatttgttttaacaaagcatatcttgcacagcccttaatccatttaaccctgagttgacacagcacatgtttcagggagcacagggttggggataaggttacagattaacagcatctcaaggcagaagaatttttcttagtacagaacaaaatggagtctcctmtgtctacttctttctacacagagacagtaacaatctgatctctcttttccccacagtggtagaatgggaaagatagtaggaacagaagctaccaaataagaaaatgggtatctctcttcataaattgaagcccctggattacagtgtgttgtgagggtgagggtaatggaaaagcttgggaaggagaatataaaggctttttattcaaagtatacatactcctctcttctgtcctgctcatttagaatcagtcactcccaaagatctaacttactgaatgtaggatgatctcacagatgtattagggcaaaacaaaatggttgggaatcacctctagagataaagcatgccattttttaaataactttattgagagaagaggttaatccatatagttcatatttttatttatttatttattttttgcaagatggagtcttgctctgttgcccaggctggagtgcagtggcgcagtcttggctcactgcaacctccgcctcccctgagccattgcgcccagcccagactagctttctaaggcctatttcagctctgatcttgtgatttaaaggaaatgaagttattagagtctggattagtggtgtatgtttgggaagacccaaaggtgctagcttggctagcaccaagtaatctttttacagggattagagtctgattatatagggatcagtgagcactgataaccaagaggtaccctttgcagaaggatgtgtgggcagttagcctggacagatgacacatggctcagctgacacctgctgagactgcccccttgtgggagatgaggttcagcattaagaaggaggcagcagtggcaaagtaggccctttaactggactttcctaggaacctacatataggttagtctcctgaacccaggctttcataactcagaagcttgcttcttcagactctgttggtctctgctgcttcccatcccactggaacatgtacagcctcttaaataggtaccatttaagagccaatgaatgccaaacactttttttttttgagacagagtcttgttttgtcgcccagactggagtgcagtggtgtgatctcagctcactgcagcctccacctcctgggttcaagtgattctcttgcctcagcctcctgagtagctaggactacaggggtccaccaccacgccccactatttttgtatagtcccagctactcgggaggctgaggcaggagaatggcatgaaccccggaggtggagcttgcagtgagctgagatcgcgccactgcactccagcctgggcgacaatgtgagactgtctcaaaaattagccaggtgtggtggtgggcgcctgtaatcctagctatttgggaggctgatgcaggagaatcgcttgaacccgggagaccgaggttgcagtgagacggaggtggagattgcgccaccgtactccagcctgggcaacagagggagactccatctcaaaaaaaaaaaaaaaaaaaaaaaaaaagaaaawtaagagattagtccccttgcctcattttcttcaggctagcctgaggcacaytcttaggcattgtcaggaaaaggttgaaggctgtgctttctgtataaatctatgaaaaatttcaaactctgccttttgcttaccaaggggtagatggcagttacttaatgaaacaagcgggggcttctgttaagttcttgatcctttataaggttcaggctatccagtttggtagagttagaagaatgctgagaaggcagactgagtttgctgtcttcagagctctgaagggctgtcagaaacagtttagtgttaagggtttacatagtcctatgtgtgtcgtttatttagcttttttttccccttaaggattagagagtgttggcaaattatttaaactttgcctttttttgtggaaaatttaaatttcaagtgctacatgaataaattaggcatgatagtatcttaaggctgtggtgatgattatatgtttgtaaaatggttagctcatactaaaagggtgaatgatctaagactgattgcaggggtaggtttcctggtatctgagtgttcaggtgcagaactggttttgtccataggagaatggtggtgcataccattgagaaggttattaattagtggtgcctttctcttgcagtgtgcccagctggctggaaacctggcagtgataccatcaagcctgatgtccaaaagagcaaagaatatttctccaagcagaagtgagcgctgggctgttttagtgccaggctgcggtgggcagccatgagaacaaaacctcttctgtattttttttttccattagtaaaacacaagacttcagattcagccgaattgtggtgtcttacaaggcaggcctttcytacagggggtggagagaccagcctttcttcctttggtaggaatggcctgagttggcgttgtgggcaggctactggtttgtatgatgtattagtagagcaacccattaatcttttgtagtttgtattaaacttgaactgagaccttgatgagtctttattttaggaagcatattattagcttttgattttaagaggaatttactccttgctttccctgttttggggaaaatgaggagagctgcctccaaatcagggaattatattgacacaggtagayatagggaatggaactgaatgaacccaaggtgttacattttgtttcactacacatgagggagaagaataagccctgctatagtgttggccagagcactgcgactgacgccacaggstgggttaccagttaaagtctcagtgtgactacttggacacctatttttgtttagacacactattcaaagggctgcatgggaaccagaagcttggcctcttctgataaatgcctggtacctgctatgtaaaagagctggaggtttctgttctttttgaactgacagaggaaagaggaagacaaggctggtggccttgggtagggctttcagtagttgcacagtaytgggcaattcttagccttcccttggttcyagccttgattagagatagtcttttttagtgtcattatgttgcccagagtggttctgaattccttgcctcaggyggtcctccgcctcagcctcccaaaatggtgggattacaggtgagcgccacagtgcctggccaaagctcgttttgatcctcattcatatgtcattgtcctcagagaggctgtcagctgggaaaagttattctcctgggcccttgaggccaaggtagattcagaactgaggatacttctgtgtatcatgtgataccattccagccacttgtcttcctcagctactcccacctgcccacccctctagaaccgactacacccatgagcagcagtacagaattcccagggcctttsgtaatggccaacatactgcttactatatatgccaggtatttttccaaagtgccttacacgtgtttattcagtccctacctgaggtaggtacttttttttttttttttgagacagtctcacactgtcacccaggctagagtgcagccatgcaatctcggctcactgcaatctctgcctccctggttcaaatgattctactgcctcagcctcctgagtagctgggactacaggcctgcgctaccatgcccggctaactttgcatttttagtagagacggggtttcactgtattggccaggctggtctcaaactcgacctcatgatccacctgcctcggcctcccagagtgctgggattacaggcgggagccaccacaccctgctggtaggtactctttagaggatatttgccccttaggccctgtaacaacatcttggggaactgcttagaaatgggaacagatagagtcttggctgggtgcggtggctcattcctgtaatcccaggactttgggaggccaagatgggtggatcacgaggtcaggagttaaagaccagcctggccaatatgatgaaaccccatctctactaaaaatacaaaaaattagccaggtgtagtggcaggcacctgtcatcccagctactcaggaggctgaggcagataattgcttgaacccaggaggcagaggttgcagtgagtagagactgtgccactgcactccagcctaggtgacagagtaagactctgtctaaaaaaaaaaaaaaaactcatttgaaggcagatgggaattctggttccctggcctttatcttggccaaacctaacttccttgagccttgttatcttcatggaagatctctactatattatcaaaaatagtaatcttgtactcaaaaccttttgctttgccaaagccaattaagtcctagcaagtaccaccataaatcagggtccacatgggagaaaatcaagggccaggggatgcaggtggtgagaccctggggctgagccagctccgggctctgctgggattcccaggcttcttgggggcgggtgtggtaaagggaaggtccggggagggagaactaggcttctctgagggctgagccaagcccaatagggccaatcgttgggcaggtggagtggagaagtaggccttctgctcttctgagtagcgctcctggggtgtcacagcatcccggtaagtccaatcacgccagtggaaattgaagccttcgagtagggcgatacggtcagctcttgtaggtacacagtcatgaggttttctgggtggcagatctggcacctctatccctggcagcagcactacccctcggatggcaaaccagcccccaaatcgggggtgtatgcacacacctgatatgcgctggggagagggtgaagaaaagcaaggtcatggaggtccccttggcaccaagtcaactgccatcattgcaagctaggcctgttcacttcccactcagtgtacactgactacataaacctctgtccttttcttggcaaaccctttcataaactattctgagcacagggaagggctgggcttcctagtctcaccactagtcttaacactgctgtgccccctgtatcctaagacagttctgcagactaagttttctgatctcacgagtacccagttagacaaccgcatgtgacaggactgcctcccatccagaacaaagctaatttgttctgggttgtgtcacatccatccagggaaggctgaggaatgtgggacctggtagggagaggcctttaccagtctatctcagcctctatttacattttccctctcacctggttcccccatgggtcagcctccacatcttgtcgttggtagtagtaagcagccccagctacatgggctgctgtctgggccaggatcttggggcgtcggttggggtgyacctcgtagtcagcaatgatttctatctgcagctctgggaggctctggaacagtggacaaaatagagggtactgtcagcatgaggggagttatgaccttgtccgagggagccctagtttgttttgtgtgtgtgaacatggtcctgtcctcagaagggaaaacatgaccttaacttgggaggctccagtgtggacatagttatagttatttccagaagggcacatgtttgaagggaaatacataacacctggtgtgaaggaaggcatggtcagctttggggagatccagtgggtatgtacatagttatgtgtatatgtgagtgtgtgttgggagaatattgttctgtcctcaaaaggacagcataaagcttgcaggtctaggacaaagcaatgcctggggaatgttggactcattcctattccacttggaggccaaggaaaacctggtctgaggttcatatagttgcccatcagtgtagggtgagtgagactaatttcacactgggggactgctagatgagggtggtggaacctgggtgtgtgagaaggcagaatgaggaaagatcacagaatgtcaagcctggctttagggtatcatttcacctttgaagtggctcctagccctaggtctagatcctgcattgagtgtggaggaactggaggcagctgtaggtttgggagctgggggaaaactgagccttcctcacctctctaacacggcccagatggtaggccacacactggtccactgggtcagtcagcattcggaggtggcagctctgcaagaagggcttgagggcccggtcaaacatggcaggcgtgctgagtaccaggaaggccagggtaggtcctggcagcggtaggtggaaggctggaggcaagagttcattgtaccatgccacctgaaacagaaagttcaggccaggctggagagggccagtctaggcctcagcctggcccacaccttaaccttcaggcctcacacttttgccccagcctccatctcactcattcagtgaattttcactgacgctatgtgatgcatttttataagcaactcaactgaatttgacagggaattcattattttttgagacagagtcttgctctgtcacccaggctggagtgcagtggcatgatcttggcccactgcaactttggcctcccagattcaagtgattctcatgcctcagcctcccgagcagctgggattacgatgtgcactaccacgcctggctagtttttgtatttttagtagagacagggtttcgccatgttggccaggctggtctccgaactcctggcctcagctaggacccacctgcctcggccttccaaagtgctgggattatataggcgtgagccaccgagcctggcccagggaattattttatttattgaaggactgactgacagcaaataatttcaggcctcatccaactacaaatgaaccaatgaaaatgaaaaaccccgccaggtgtggtgactcacagctataatcccagcactttgggaggccgaggcaggtggatcacctaaggtctggagtttgagaccagcctggccaacatggtgaaaccctgcctgtactagaaatacaaaaattagacaagcatggtggcactcgcctgtaatcgcagctactcaggaggctgaggcaggagaatcgcttgaacccggtaggcagaggttgcaatgagacaagatcgtgccactgcactccagcctgggcaacagagtgagacccccgcctcaaaaaataataataataataaaagaaaattaaaaacccaggaacgaggacccacagagcagagttcctaaatccacaactgactgaggtgcatgagggcataggaacagtcaaagtggctgtcaacgcacttgccctccaagtccaacaccttgaaggcattttaagacaaaaacaagatcggagatttctcaaagcagaatcaacatatgatgccatgacagttgttcagaaaaatattgttaatctggagaagcatgttgctgcagccaagcctgagagggagaaagccacctgaaccctcaatgccgttcatgccacagtccaactcatcctcaaatgacacaaaacgatgtggttccaccagtctcttcccaaccagcacttctttatccttttgatatgtcatcaggggaagctatcagtggcagcaagctatgtcttcactgaagatcaaggggttataatagattaaaattttactatatccagagcatctccatacagacagatcaaaagacgagatcatagttccaggctatataaccctaactctagagatgaatttggagagaacaggcagttttgttttttttttttttgagacggagtctcactctgttgcccaggttagagtgcagtggcgtgatctaggctcaccgcaacctccgcctcccgggttcaagtgattcccctgcctcagcctcctgagtagctgggactacaggcacgtgccaccacgcccggctaatttttgtatttttagtagagatgaggtttcaccatgttggccagggtggtctcgatctcctgacctcgtgatccacctgacttggcctcccaaagtgctgagattacaggcgtgagccaccgggcccagcccaggcagtttcttaaaatactgtttttaggctcggcgcggtggctcatgcctgcaatcccagcactttgggaggctgaggtaggaggactgcttggggccaagagttttagaccagcctgggtaacagagtgagaacctgtctttgtttttttattttattttattttattttttgagacggattctcactctgtcgccaggctggagtgcaatggcgcagcctcggcttattgcaatctccacctcccgggttcaagtgattttcctgtctcagcctcccaagttgctgggactacaggcgtgcatcactacgcccagctaatttttgtattttttagtagagacggagtttcaccatgttggccaggatggtctcgatctcttgacctcatgatccacctgcatcggcctcccaaagtgttgggattacaggcgtgagtcaccgcgccaggcgagaacctgtctttaaaaacaaaacggccctttttttttttttttttttaaatgtatacagtctcactgtcgcccaggggctagggtacagtggcatgatgttggctcactgcaacctctgcctcctgggtccaagtgattcttgtgcctcagtcccccaagtagcagggattaacaggcgtgtgctaccaggcctagctaattttttgtatttttagtagagatggggttttgccatgttggccaggctggtctcgaacacctggcctcaactgatctgcccaccttggcctcccaaagtgctaggattacaggcgtgagcttccgtgccaggccaaaaaaaccatttttatcagttaatgatgaactgatgctaccaaagaggctagaaacgtacttaacctctgacttgagcccatcaggggtttttctgcttcttttttttgagatagtcttgctttgtcacctaggctagagtgcagtgaggtgatcacagctcactgcagcctcaacctccctccctcaagcaatcatccctcctcagcttcccgagtggctgggaccacaggtgtgagccaccacacctggctggctaattaaaacaaaaaaataatttgttgtagagacagggtctccctatgttgcccaggatgggattttcctgcttttgacagactttcttgttaccacggtcaacaccatattagtctac

SEQ ID NO: 93876 - DNA, 12963 bp, Homo sapiens
cggagtctagcccttttacccaggctggaatacagtggtgtgatctcggctcactgcaacctttatctcccaggttcaaatgattctcgtgcctcagcctccagagtagctggggctacaggcgcccaccaccatgcccagctaattttcatatttttagtagagacattgtttcaccatgctggccagggtggtctcgaactcctgacctcaagtgatccgcccgcctcagcctcccaaagtgctgggattacaggcatgagccactgcacccggccccattcctcactttagcctcaggcagagaagacagcgcgatggggaaacacttatgtaggaaggtgtccaatgcggtattgcaaatcaacaggaagcattgccagcagccgcagcgagcagcaagtggggaaggaacagagagcatggatgcgcagagcttcctgtaactacgagggtggtcagtgaagcttctgtgtccacaaggaaaaggtggaggacattcaggcactagggggtgctccccaggcttatgtgagaaacctgtagcacagacagccacacaggagtagtgaactacaaccatggaatttgaaatttagtgtctaatacttggttctaaaattgggttgatttaaattcagaagtgtgctctactctgacaaatgttaaaatagactaatagaagacacattttgacacagaggccctgggtttgagactcctccatcatccctaaaccagaggaagagttgctgtgtgagagctggggatatttggtctgatttctgtttagtttctgtaatgtagctgtgctacctttaaaattaaaaataaaacaaaacatgtttatctctttaattcattcccactcccaggtgaaaaaaaaattttattgttgaatgaaaaatattttcatcatgtgttattggaaaaattatatgtattctctcccaactcaagatacccacaaatttttaacagacagaaaaatagactggtggttcacgcctgtaatcccagcactttgggaggctgaggcaggaggatggtctgagcgcaggagtttgagaccagcctgggcagcacactgagactctgtctttccaaaaaataaaaaattagccgggtgtggtggcgcgagcctgtagtcccagctactctagaggctgaggtgggaaggtagcttgaacccaggaggttgaggctgcagtgagctgtgactgcaccactgcactccagcctgggcaacagagtgagacgctgtctcagaaaaaaaaaaagaaaaatcaactggacaatgacaaaatgagcaatgatggaaaggaaataaactccattttgcacaggaaaggtagtatagggatggcttgttgacccaccagaagaggaagaagagtgaaggtggggctgggcaaccctctacctaaagcccccaaccgacaggtggtcctctcccgcagcaactgctgctctgagggtctgctccctgctgtggctggtcttggacgctgcatcatctgctgctgacccctttagtgacaccacccttggttaggtgcagctgtttcctgcagggccccgaatgaacatgcccttcacacctgtgctccagccatcctgagagtctctcagttttggggccgccctgagctctctgcacctcgaaaactcccccgcagacccctctgctgtgcccccaaccccggcccgctcctgctcacctttggcttctggagggctgtgctggccccaggctgtgctggcggacactgggtgcccatcgctgttaggctctggggtgggagtccatgtcgcccggggtccttgttctgtgagggcggcccaccttgttctgccctggtcaccgtgcagcgctgggttcctcccagcgctggacaccgtgcctggagcatcacaggtgcccagtaaggggcttgtgatgagcctgagtgttcatggaggaggctggaaaagccaacaaatgcaaacattgttggctctaggtttgatacagtgaagttccaggcagaatttggttggccataagtagagcatgaggacgtggagagaacgggctgtccttcaggtctgcacacctttgggggaccttctgcacagaggccaggtgccacccacccagggcctgagtggtttgcagggtccagtgcaaaacagcacgtggggaccttgctcaaagagcattaagaatttccagagagcaacagtagagcactcacccaaacgcacggaccttctagggtggggtctgggcctctgcatgggtggccaggctgcgaggccaaccctgcttccacacccagttcccagctcagtgcctggctcagataaagccttcctgcctccttcctccctctttccatccctctctccctcccttggccactcattcattccttcatcactccctcactcaaccattctctcgctcactcatttcctcatttattcatcccctcactcatggactcatccattctctgattctttcatcccctcactcattccctcattcattctctctcactcattctctcatttattcatcctctcactcattcactaattcatcattctcttatttcctctcattcattccctcatcacacattcccacgctcactcattccctcattcattcatcccctcattcattctcattcattcattctctcaattctcacttatttattcatcccctcactcattcactcatccattcattctctcactcattccctcatttattcatcgcctcactcattcactcattctttcactcatttcctcactcatccattctctcactcattcacccattcattcattctctcactcacttcctcacccatccattccctcatcacacattccctcactcattccctcatttattcatcccctcactcattcacccatttattctctcatgtcttcacttgctcattcattcccttactcatccattatctcattcatcactcatttcctcacccactcatttcctcagttcatcccctcattcattttcattcattcacccatttcctcactcactcatccctcattcattcacttgtctctcattccctcactcattcattttctctcattccctcattcttgttccttcattcattcatccccttgttcactcatgctctcactcattcattccctcatccattctcactcattccctcatcactcattccttcattcattctctcatttcctcagtcattccttcatttattaattccctccctcattcattcattcattttctcactcctttcctcattcattccctaacttatccattctgattccctcaccactcattccttcattcattcatcccctcactcattccctcattcactcactcattctctcatttattcatcccccactcattcactcatccattcattcacccactcattccctcattcattcatcccttcactcatccattcattcactcatttcctcactcatccattctctcactcgttcattcattcattctctcactcatttccttactcatccattctctcactcactcgttcactcattccttcattctctcactgatttcctcatccatccattccctcatcacacattccctcactcacccattccctcatttattcatcccctcactcattcacttatttattctatttcttcacttattcattccctcactcattcattctctcagtcattcatcagtcatttcctcacccactcattccctcaattcatcccctcattcgctttcattcattcactcatttcctcactcactcattccctcattcattcactcatcactcattccctcattcatccattctctcactcattccctcactcattcattttctcactcattccctcactcttgttccttcattcattcatcccctcattcactcatgatctcactcattcatacccacactcatccattctcactcactccctcatcactcattccttcattcatccccactcattctcactcattccttcattcattaattccttccctcattcatttccctcattcattcactcctttcgtcattcatccattctcattccctcaccacttattccttcattcattcatccccattcacttactcattcttctcactcactcatttcctcagtcattcattcactaatttcctcattcattcccttgctcattcattcactccctcattccctcactcacttattccctcattcattcactcacttattcattcattcccttgctcattcattcactcactcatttcctcactcattcaatccatcatgcattcattttctcactcattcattcactcacttgcacagtccctcactcactcatgtcagtgcactttttacatttttctccttcaaagagaaaccagagagataatatggggctatggtaggcgctctctgtggggacctgggctcagcacctgagccttcacctgccctgcatgggatgggggtttggctcctcctgagagagaggataaagagaacacatcattccatcactcactcattcattcactcactcacccactccttccctccctgccctatcaggcaggcctttccagggaccctctgggaagcaggcagaggtgtagtgcagggatatgcccttttgcagctcacatgggaggggacagagtgctaccaagcagacaagcagaagatctgtcatgtcagatgtcaacaagtgtgctggaggaggagaaggcagggcagcacctgggggagggcctcactgagaagacagcccgtgaggaggctggcatggtgaggactgagtggatgtggaggatggggagaggggaggcaaggaggccaaaggcccagcacctataggcctcagcaagaaccgtggcctttatttaggtgagatggtagtcaccggaggatgttaagcagagaagggccacagtctgactcatactttaacagccctctcgcctccgtgtggaaacagactgggtgcaggagagaaagcggggcctgccaaggaggctgctgctgccatccctcagacgctggtgacagctgtgcagctggaaggaagccatataatcctggccacacttaggaggagagtggctgggccacgtgtgggtatagaatggagaggggctggaggatgcccagcagcaggaggccgggttccctatgctgaggagggagggctgagtccggacagagcccagcttgtgtggggatgggtttggcatctatatggggccctggagaaagcacaagccacctgaagctggcacggggagggtggcctgggctccgtcctccccagtggcggggcagggtctgcgagaggatgtgtgtgtttagaaatctgctccaagcgtggatgggagaagataaactccacacacgctgatggaggctgggaagcactgctggagttggtatcaggtgacaggcatggctcaggcagggatcagcctgtctaaaaaagggcctgctgtgctctcagcaaggaagattgccatccagggtcagaggctactgtgatggacagacagacgccattccgaaaacatcggatttattaggattagctgtagtgtacactgattcctttagctctaaatggatacatatgtgccccgcagacagtatacacgcagggatgtgactgagccacagtgacatagcaaacccaacagctggcttgtgaagccatcgtgatcccaacaaggtctatgttagcaattggtgaaagaagaagagagtgagatgggacccaggtgggcctggaggtgggatcctgtgggttttcagagcacccaccagtgctcccttggtgagcccagcaccacctggaagtggagggaagctgggtcgctgctggaagggagagaggctgactctctacccctcacctctgcaaggaactgaggcctgtagggttgcggctgtcactggctacaggcggcatctttctgtaaaaagcttttcaggcatgaaacccatttctgtatggactgggctgtgttgacggtggtgcttgggccttgtgtgccaggcctctctgggtcccctccctggcctttgccttcctctcaccttctcgaggccaagctgtgcgagacctggcattccttccaaacctcagttcctccacgcccctgcgctggtgtgactccagagctcagaatgtcagcacggagccgtcagtatcgagaaggaactcaacgcaaggcttcacagctttccaaggacagggaccggctctggagtggccgtgcgtgagatgtcaggcacgctcacacgcagggtcctgtgttggctcctgacccagcagggggacatggtgggcggatgtaccagcccttctggataacatgacagtcccaatttcaggaaagtttttattttaaatattggtgattctttaaccaggaatgcaaatgctactgaagtgctgtgtgtgtctctgtgagagccttcatataaataaattcatgcatctaaagagtccctggtcaggccgcatgctgatattcaatttggggaatggtgatgccaycacatgcatctgggggaggcagcagggaggcgtagggactttgtgtggcctgctctatcacagctcctgggagaattacagatctgagcccagggcatctctgggcttttggaaagggttcctgcttttcctgagttcccatggctgccctgctgccggggctgactaagcaggcggggctggctttctcagtgcatattttacatttttctccttcaaagagaagccagggagacaagctggagctacagaaggtgctctgtggggacttgggccgggtcagcaaccaagcccccacctgccccttgtggggtgagggcttggctcctcccccagggcacagagtgatcttcagcagggtgacccgttcctggctctcatggtgtgatcagggctgctggagggagggtggaggggcacactctccaggaaccaaggttagcctccagaacagggcctgggagagcagtggcagttcccgctgctggaggaagaagggcgggagcccctgaggcctagacttcatgttgggggtcctggtgggaagtggcctctcctctgtggccccagaacccctacattgcaccttctgcagggcttcaacggtggcaaagccctgaccagggtcatatttgcactaaggagcctcctgaggtaacagcaagtcccatttagaaggggaaagtattcccgaggcgggtggtgaaccccacttattgctgggaaaaagtgaggccaagggcagggctggggtggtattggcacctgagaagggcaggctaggcccagggcctcagctctgaatgattggctgatgccagccttggccttgggtgaggcctgtcccggcctgtcctgctgtggcctggggcagggctgggggtgcctccagtccctgctctgggtcaccgagtgctccatgcagacctggacaggaaggcctggcctgctgctgtgctgggcctctcttctcctgccaccagaggtagctgtgctgctagcactgacactcccagggtagctctgggccacaggcaggcccaggcccaggcctagggatcatagccccatagggtgccactgctccatggtccctggtgggcaggaagagcactgggccttgcccataggaaaggcccagccaagtcccctctcgggggctgctggcttagctcctagagcacagagccctctggccccaccactgccggcccaacctgtccagttctgtacagtagcatcaagctctgattccctcaaactccccttgctccctcccacctatccaccaaaatagtctctgctttaaaatatacattatatattagacatttcatcttcaatatgattctctcatagcatcaggtaaaattagtgactctagaggaaaggcagcctttgtgagtacaggcggcactcggggaccaacctgagcctccccctggcaggaggggaagggcaggggacagagaagagccttggtttcctgctcagttctccttctgggctaagcctcaccccccgcccctctgcaaagcctggtctcaggctaacaaggagcccacaaagtcatgggtggctgctcattttgaggaagggctgggcattttctgagcctcagaggggcacgtgagtctgccctggggagctggcccctatggagacagcaaccacctcatcacacggccagaggaaggccaccaagcggaggctggtcagagagggcgctggggcgtgagcgaagggtgggcaggaaggaggcgcctccagttattgcagtctggtgtcctgggaacaccaggaattcctggaacccttgtgggagctgggagaggcagggcagaggcttggctttgttttcagtggacattttagcacattctttgtggaaaatcacctgggacctttctctttttttgcataaagtgtctaaccattaaggtaggtccagtgtctgatagtctaatgtataacaaaaatgtctgttattttttagaaaattgtgttaaggatttctccaatttctgatttttttttttttttttttttttgcaagccatatctgagaagccatctctgcccttcccctgcctgcatcccccagaccatgagccgggcaccggccaatgcattcagggtggggacgcagttcctgccgtggctgtcctttgagagacccacatgtttatttcatggaagacggagttggtgacttcaggaagctccttgtggagaacatggtaggcaccttcataaatctgcaatgaggagagacacggaatcagagctgcaccatcagaggcaggtgcagggagcggagaccgtgggcagtgggcaggggtctgcagcattctccggaccctctccctatgcccgaggacctggccctgacctcccattattaggaggccaacacctttctatcagaagatggttcaaatgtgttacaatgtcccagtgtgttctcgaacttcctttctcaaatgcaaaccttccctcactccacatctctccccatccctggacctgtttctgtgtctctgagtcaggcaaccttctcaaaagagggggttccactcccggcctcacatcctgacctccacggggtcctcagctcatcccaagccgacttccactcccgccaacccacggtggctagcctggcgaggtctccagggacctccattgctgtggcaggggacactgtgctggtcattcataagctgctcactgtcaccttctagaaacactttcctcttgtggttccatggctttaacttttgattttctttcaacctagccggcagatccttctcagtccaggctcaccccacccactggcctctgcaggcggctggactacgggcttggctgtgccctccttcactctccctggtcaccttgtccagtccagtggttttaaaatccatcctgggctgatgactccggaatttacatctccagccagacttcccttctgcctctagactgccgacctgccatctccatccgaatttctggcagggacctccagacttcagtgcgacgctaatgggcatctccaggtggactccagccgttgctcacgtcagtctctctgcctggcgtttccggtctcattacagcctcctcattactgcaagcccaaacccagggttcgtccttcatgacagtgatctcactctctgccaccctgcctggcttgacctgccttggttgtcactgtctcctacctcctccttaccccagctcctgtcttcccaaggccacggggggatgcttttaaaatgaaaatcacagcacgtcactccttggcttgaaatgctcatgtggcttctcatctaaccaagagaagaagtttagacttcacaggtggtggggctcccctgccccccgccaccagcgtccctgactggtgcatcctcactggctgctcttcttatggctgcgtgcctatgccagcctcaggtcctcaatctctctcttgcctcagtctggaaggttcttccactggctcttctcaccaacagactgcaggcctggctgtcccatctaaagtgctgctttccccctgtccccctctatgcctacactacactctgctgagtttccttaggggcaccgactcctctccatcatcatccgtttcatttatttgctcatcccaccaggatacaggttccgggggggcagggcagagcctttgcctgtcttgttctctgggcctgacagaaacttagggccccataaatacttgaattaaagaagcaatgaatggatagctgggtaaatgaatgaataaacaatcttagcggactcctttcgcagggacttggcaagggttcacattggtgtaagggcggtctcagtgatgctctcatggatgaatgcagtgttccactgtggcttttaaaaaatatattttgctgggtgaggtggctcacgcctgcaatcccagcactttgggaggccaaggcaggtggatcacctgaggtcaggagtgagaccaacctggtcaacatgatgaaaccccatctgtactaaaaatacaaaaattagccgggcagggtggcaggcgcctgtaatcccagctactcagggggctgaggcagcagaatcacttgaacctgggaggcagaggttgctgtgagccgagatggcgccgctgcactccagcctgggtgacagagggatactctgtctgaaaaaaaaaaaaaaaaaaaaaatatatatatatatatatatgtatgtgtgtatatatatatgtgtatatatatgtatgtgtatatatatgtgtatatatatgtatgtgtgtatatatatgtgtgtgtgtatatatatatagtcttgctgtctaatattccacataaccaagccgcagggcctgtcctcagggcccctgtctgcagagctagctctggcagctcccttcacggatcaggctctgccaagtcctgccagcacctgtgtgccctgagccctctggtggccatggctcccgagctactgcagctaccactggtgcagagggaggcttgggcatcacacgtgtccttggagcttggacatgtctctctctcaggagattttatttgctcagtgcccagttgcagattcctttcttgcctataacatcttttgattgttcttcttccctttgaggcttattcatgcaaaacaatcagcaaatgactcgtgttctcttgaaattcataggctcctgggattccttttatttatttatttctcggtcaagcaggctggtccctatcctgagacctgggaggtggccctcgagggtctgggcagatgtgccccaaggggtgctgccttcctgtcccccctccaccttggggggaagtgggcaagtggcagccgctcaccttgagagtcttgtcctggctcttggctaactccatgagcaggtaggcccctttgctgtcacataggcgatcggcagagccctggagcagcaggaagggcacagtcagcttggggagggcgcgctccacccgtgagacggcattcagcagttggatgccgaagcacaccttcagccctgcccggcagatcagggggtctgagttataaatgtcgacctggaggaagaaggagagggttccatcagcatgggcagggctcacttccataagccaggcctatttcctggtagcttttccttctgctctggcctgaagggttgattccattcaggtcagctgggcttgggcatggctctgaaggccagccgtgttcatccacaaacctcatctgcaccactggcagtgcctctcctttcaggcttgagggtttcacatacacatgggtgcctgtagaaaatgtcaagtattggccaggtgtggtggctcatgcctgtaatcccagaactttgggaagctgaggcgggcggatcacctgaggtcaggagttcaagaccagcctgaccaacatggtgaaaccacgtctgtatgggattttttgtatttttgtaaaaatacaaaaactagctgggcgtggtggtgggcacctgtaatcccagctacttgggaggctgaggtgggagaatcccttgaacctgggaggcggactttgcagtgagccaagatggcgccactgcactctagcctaggcgacagagcaagactccgtctcaaaaaaaaattaaaaaaaacgaaagtttcaagtattaatttgtattttaaaaaatataagcagcagcatattgttcacatcaattattttattaaaaagtagctctgcagcagttttagcacttgatttttgttctctgtctctgctgatttggtgtccacctggtggaagtggatgaggggcaaacagtaaactgcaggaacagtttactgggttctgtgctggaaagcgagggcccatgctaggagcccctggaggggcttcggccaggcactgacaatgggctttggggtgagggacgcccaagggtgggtctggctggggtgggctcggcctccgtgcccctcagggctacacagggtggtcagacgccctgacaggctgtgcccaaggccaactctccccctctacgggatgtgggtcctctctcctcaaccaccaccctgtggatcttgcctttcaaggggctgctctctcccctgtccttgctctccctggcctgtctgggtttctggcttcactcttcctgcctccataaagacagctcaggctccactgccctgatctctctagcatctgccctacaggatcggggagaagtttctaggaatctctcaggcccatagagggcaggagtgagcccctgatgcttcttttttttttttttttttttttttttt

SEQ ID NO: 93877 - DNA, 57026 bp, Homo sapiens
cccagcactttgtgaggccgaggagggcagatcacctgaggtcaggagttcaagaccagcctgaccaacatggcaaaaccctgtctctactaaaaatgcaaagtcagccgggcgtggtggcgcatgcctgtaatcccagctactcaggaggctgaggcaggagaattgcttgaacccaggaggtggaggttgcagtgagccgagattgcacattatactctagcctgggcaacaagagtgaaagtatgtctcaaacaaacaaacaaacaaaaagacagcacagaaatctttacaggtattctgatagatttattttaaaagttggaatattatccaaaaaatgcctggcacatagtagacatttttttttttttttttgagacggagtctcgctctgtcacccaggctggagtgcaatggtgtgatctcggctcactgcaactccgcctcccaggttcaagtgattctcctgcctcagcctcctgagcagctgggattataggcacctgccacaatgcccagctaatttgtattttagtagagatggggtttcatcatgttggccaggctggtctcgaactcctgagctcaggtgatccacccatcttggcctcccaaagtgttgggattacaggcgtgagccaccatagtatacatttaatagatattaatcaaatttatttagcctatagattcaatctatggatatagttaggaaatgcccctttactgggtgacatccacttattctatatatatttattgggacatactattattgcatatctggtggcttacccctaggtgtaattcaatgcttctctgccacctccaaggagcactaatatatggctaagacaaaatggattccttggagacaaattaggatcaagatgctaagtggtagacctttcactgtggacaagcaataggattgaattttcaagcatcagtgtagtattgtgtcttttattaattccatgtactcggcttggctccatgtgactgccagtgtgatcaaataggcccaaagctacttggagatcctaacttccttggcttatttctctttttgagtgttcctgttgatctggtctagcttgccagggaggagtctaagagagggaaggtcatctaggcctcccttgattatacaagagagttttctctaagctctataagatccatctcagcttactaaatctaaggttccacagagggcttttggaccctgtagaaactttaaaacatggcaccaaaattcctgacactcctcttgagaagtagggcctatgtaccctctccttgaatctgggctctgtgtgtggttgactgaaagaatatggtgaaagaagagttgctgtggcagtttctaaaccgaggttttaaaaactggcagtttctactccccatctcctggaatgtttactcttgaagagtaacatttagccatcatgctgtaaaaagaaacctaagcaactcatggtaaactccatggtctttagggaaagagcgtttccacaatgttagggagagccaagaaaaatttaaatagtgtattttccagcttcccgtctctacaccaaaattaagtattgacactcacaagaggaaaaaagttatcctctgtcagccatgtgaatgagccttcttggatatggatcctccagccctcagctgagctgccccagctgatgccatgtgggatgaagattagctgtccccactgagcccagcccaattttcaggtaataggcaaaataaatgtttcttgttttggctggacgccgtggctcacgcctgtaatcccagcactttgggaggctgaggcgggcggatcacttgaggtcaggagtttgagaccagcctggccaacatggtgaaaccccatctctactaaaaatacaaaaattagccgggcatggtggcgggtgcctgtaatcccagctacccaggaggctgaggcaggagaatcgcttgaacctgggaggcagaggttgcagtgagctgagatggtgccactgcactccagcccaggcgacagagcaagactccatctcaacaacaacaacaacaaaaggcagggcttggtggcttatgyctgtgatctcagcactttgtgaggccgaggcgggcggatgacctgaggtcgggagttcgagaccagcctgaccaacatggagaaaccccgtcactactaaaaatacaaaaaaattagccaggcgtggtggtgcatgcctgtaatcccagctacttgggaggccgaggcaggagaatcgcttgaacccgggaggcagaggttgtggtgagctgagattgtgccattgcactccagcctgggcaacaagagtgaaactctgtctcaaaaaaaaagaatgtttcttgttttaagtcattgatttgggaatggctgttttgtagcaatagataactggaacagactcaaagggccaactagtcataaagtgtttttttgcctcaccttgtcattcctggaaatgactccctggaaaacccttcgcagagatgggtgtctgggtttcagtttttagaaatctttccacattaatattttccttagttgcctaacataactggcagaaggagacaggcaaggaacaggacattaagtactcaaccaactgtggtcataattatccagaaagtttttttctctgtgaaaaaaaaatcaccacatattgctttaagtaggtttactaggaagtttcagacccaaacccctgtgtggaatccttagttctggtgttctatcatggaaacaacaaagactgtctttttgtctctagcccaaggccttcactaaaagtatgccaatagcttcctagccctttttctcacagacaccatatccttaagatcttttaactctaattgtgtgaacaaaggaaaagaagacacatttgttttgatatggcctttttcatactcctgctacccattcccaatatgaccaattgtccttgttcttggctgcccatgtcctagctcctcctccccagaagctgaagggtttggagccttcttttttttgagacagagtcttgctctgtcgccaggctggagtgcagtggtgcgatctcagctcactgcaacctccacctcctgggttcaagcaattctcctgcctcagcctcccaagtagctgggattacaggcatgcaccaccacatccagctaattttgtatttttagtagaactggggtttcaccgtgttagccaagctggtttccaacctcaggtgatctgcccaccttggcctcgcaaagtgctgggattacatgcatgagccgctgcgcccggccgtgtttttttatgtgaaaattcacatatctaaacgtgggtccctgtttttgtatagccttcaagctcaaaataatgttcacattttaaaatggattttaaaaataaaaataaataatattttgggacacatgcaaattatataaattcaaatttcagtatccatagaaaaatgttttgtttttgttttgagacagggtctggctctgttgcccaggttagaatgtagtagcacgatcttggctcactggagtttgcacctcctaggctcaagggctgctcccacctcagcctccacctcctgggctcaagggatcctcccacctcagcctcccatctcagccttccgagcatctgggactacaggtgcacaccaccacctgtagtgtagtgtaggcctggctgggcgcggtggctcatgcctgcaatcccagcactttgggaggccaaggcaggaggatcacttgagcccaggagttcaagaccagcctggacaacatggtgaaaccccctctctactaaaaatacaaaaattaaccaggggtggtggcaggtgcctgtaatcccagctacttgggaggctgaggcagaagaatcgcttgaacctgggaggtggaggttgcagtgagccaagatggcaccactgcattccagcgtgggtgacagagtgagactctatcccccccaaaaaaatttttttccagctgtgataataaaaaatatcccattctcctttctatggtgggaaggaaaaggtagaagttgtggagaggaaagaggtagaaattaaagggagaatggaaaagaagggcaaacaaaggcaagtaggtgaggagaaggacaggaaaagagacagggagaagggagggacttataaatgggaaaagaagggtaggaaggatgggaataagtaaaaacaacaacaacaaaaagaaagcaaggagagagagtagagatggggaagagccagaaaatgctgagtgagctaagaaaggaccaccaaaagaaaaaggagaatgggggtggtcagacagagggctataccactatcttcctctcctgtttgctttcgtttactaacgtcctggtcactctgccctaaacagcttagttcctttcccatagtctttgttcactccagcactatctgacttgaacttgtacctgtacgacaaatctaacaccctggactcttagttctaaaaacaggacatgcattctgcctcagtcttccattcccatggtctcaccctggaccttggcatcatcagaaactcagaagctgggacatttcaattccaaatatcccactcagaccagcagcatctatactgccagagcacttgctcatataccccactgcaatctttcttgggccaatgctctaagacattggtccctttccccaccaccctccaacccctccactaccaggcttcatgtgccattatttgctttcctgtatggttttgattctacacacagcatcatgaacattctcttccaaacactctcatcacttggccccctctctctgttgtacttgccaggcaaaatcccaaccctcagtaaatgcaacaagctgccttctctgcctgtgcctgaatggccaaacatcttcaattattttgaatccgttacctcaaatatcaaatgagctcttaacgttggccagaaggccttttaaaggcctgtatgcaccaaggctcagttcttgaacgtctccttttcttctcccttaagattcttccctaatgaagggggcaggcgaacggagttaaagggcttccattgctgttagaatacagcccaaattcctttccataatcaaaagtcctgatctgccaccgacctcactttctcaacttttcaccttccattctcccctcatttgactcagccctggtctcactgtcactggccttttttccttttttttttttgaagcagtctcattgtcacctaggcaggagtgcagtggtgctattacggctcctaggctcaagtgaacatcccagtagctgggatcacaggcacgggtcacggtgcccggcttttaaatttttggtcgagacggggtctcgtcatgttgtccaggctggtctcgaactcctgggctcaagccatcctcctgcctcagcctcccaaaatgctgggattacaggcgtgagccaccgcgcccagccaggccttccttcaattgctttaacatgccaaaccaacttagattttttgcacatgcttttctctgtgggacactctatcctggtgtttgcctggtttcgctcttttctatccttttgtcttggcttgaatgtcacctcttctgaagccttctctggcgaccctggccatcttatgtcctacttgttatttcttcaaaatcgtactgccttttgtatgtactggtgtttactcattcacactggctacctccccatacctcactggctggaatggaaactcattgcgagcagagacaataggttttgctctcccgcggatcacgtcccagcctccagctcagcaccagacacttgagggcgcaggataaaatatctgcagtcagaaagcactaataaccacccaagggttggaggaaagctggcgcggaccgcacgagtgtcgccgagacgccgccgccgtgcgaagctcctccccttccgacagggccgcggacgcccgggcagccacggcggcggggccgcggcgggcgccggctcagcccgcccctttctcccgccgcctccccgccccgccccgcgccgcgccggccgctgtcagctccctcagcgtccggccgaggcgcggtgtatgctgagccgctgccgcagcgggctgctccacgtcctgggccttagcttcctgctgcagacccgccggccgattctcctctgctctccacgtctcatgaagccgctggtcgtgttcgtcctcggcggccccggcgccggcaaggggacccagtgcgcccgcatcgtcgaggtgaggcccgggcagcaggcgggctccttggggcttgacgggatgcgggccggcctgtcccgccgcccctagtccgcgccccgcggagtcgccgagccgcagactacgagtcccggcggccaccgcgccgcccgcgtggcagtggccgagggccgccggcgcgcggcgtgccgggacttgtagtccgcgcccgcccgccttgggggccacmgcttgaggtcgctttgttcctgcgccccttcttttcttacattttggggaccagattcgtctctagagtgggctgggagagggatcccggaggccaacctttgggggtcccccagcgcgcagaggttagcgtgtcgctgatcgtgtggcaggtgaaggcagcaggagcgcggatttgggttagaggccgtgtgcgcccacagttgtctgaaggagagacctatttttcttctccgcgccttccctctggttccctaaactccgcactgtcaccgaacgtgtctttactctagaaaggaggcccgtggggcggggtgttattttaggcgtgctgtgggctgccgctggcactctcgagccccgtccccgcaagctttagggcggagccagccctgaggctcggcccgggtcggggatggggaaagccgggagtgctgttctgagatcaagcttcaacctttggccctgctgccaactcacgctcggccctcggtcacttcctgtctcccagcctcagttagcccttgtaatacagtaaaaagagtctctgaacccagattttctcaggatataaaacacctcccaaatgtaaaatgctgttacttttttttcttttgctttgagacaggttaccagttcaattcttttaacaatttttgagctagatgtatggttggttagctgcattgacactgtgggaaaaaaaggcttcatggacaatctggggaatgcttgggaaagaaggaaaacaggatatctagaaacagaagaggcgaccattggtggcctctagtgaaatcactctgaaaccctgtaaccaacaaaagtttttttgacctagaacttmtaatttcctcctcttctaggatatggccaatattagcatggggcttttgcttctctccttatatgttcataacaatcaactcctgtcctgtattttattccctaaatagcatccagagaaagttagatgagttcaacaagtcattatgtgttggacagatgtatttataaatattgatcattttgccaggcgctgtggctcackcctgtaatcccagcactttgggaggccgaggctggcggatcacgaggtcaggagttcgagaccagcctggctaacatggcgaaacgttgtctttactaaaaatacaaaaattagcctggcgtggtggcgggcgcctgtaatcccagctactccgaaggctgaggcaggagaatcgcttgaaaccggaaggcggaggttgcggtgagcccatatcgcgccactgcacactagcctgggcgaaagagtgaaactccgtctcaaaaaaaaaaaaaaaaaaaaaatcattttaggtgtcaaagtggaactagtccaactaaaaaaatagataacatttacatcctcttaaaaaaatttttttttgttggttctctttcttttgttgtttttttgtttttgtttttgtttttgtgacagtctcactccgtcaccaggctggagtgcggtggtgcgatctcagcacactgcaacctccgcctcccaggttcaagcgattttcctgcctcagcctctgcatagctgggattacaggcgtgcgccaccacgcctggctaatttttgtatttttggtagagacagggtttcaccatgttggccaggctgatctcgaactcttgacctcgtgatctgcccgcctcagcctcccaaagtgctgggattataggcatgagccaccgtgcctggccttgtcacttgtcttttaaaaagtaaagagactggctgctgcactccagcctgggcgacagagcgagactccgtctcagaaataaataaataaataaataaatggcaagtgaaaagtgggagtgatttcaaatttttgtttaatatatgtgatctttcttaaatagcatgatrggggaaggggcaaagactttagagtcaaagagatataggttcaaaccctgactctgccatttactgtttctctaggcccagagatgttgttgcctttagttccctgtgaaaagggaaaacatagaaatggctgttttgtatggtatttgtgaatattaaatgaggtaaaatatctggcacacagagacagatgcagatagtttttttctccactttaaacttctgatcttattacctctactttaaacttcctgatcttattatattggttatttttattggtgggttttgttgttgttgtttgttttgagatcgagtctctctgtgtcacccaggctggagtgctgtggtaccatcttggcccactccaacctctgcctcctgggctcaagccatcctctcacctcagtctcccaagtagctgggatgacaggtgtgcactgccactctctgctaactttttttcaggtttttgtagaaaccagggctcactatattgcccaggctggtctcgaactcccagactcaagggatcttactgccttggcttctcaaagtgttggcattacaggcatgagccgccatgcctggcctggttatttttattgcaaaatagtatttttcttttaaattactttatgcrtgttatatttgaatgcatttaaatacagtatgctgtttctgaatcataatatgcctttaaaatatctgtacctaaattaataatacccatactactacactggttaaaaaataatctacacattcagggctgggcgcagtagctcacgcctgtaatcccagcagtttgggaggcccaggcgggtggatcacgaggtcaggagattgagaccatcctggctaacaaggtgaaaccccatctctactaaaaatacaaaaattagccgggcgtggtggcaggcgcctgtagtcccagctacttgggaggctgaggcaggagaatggcatgaaccggggaggcggagcttgcagtgagccaagatcacgccactgcagtgcagcctgggtgacatagcgagattccatctcaaaaaaataaaataaataaataaataaatacataaatgaaataatctacacattctgcaattattctttattctgttcagtaatggcaaataatattttaaacttgttaattatcagttacaagattccatgatgagatatgttctgtaatgtattatattattaagatttcaacaattatttgaccttaaactgttatcttctttaatgaaaagtcttctcttgagtctagttgccataaactttattaagctgtcaatcaactaattccaaatagtttataatttagcaattgctattccctagctggctagacagacactggaatatctattttttttttttttttgagacgaagtgtcacgctgtcggccaggctggtgtgcagtggggcaatcttggctcgctgcagcctccatcttctggattcaagcgattctctgcctcagcctcccgagtagcttggactacaggtgcgcgccaccatgcccggctaatttttgtatttttagtagagacggggtttcactatgttggccaggctggtctcgaactcctgacctcgtgatccacccaccttggcctcccaaagtgctgggattacagktgtgagccactgtgcccggcctggaatatctattgttagtgaagtcagcggtatgttgtttttttcctttgtgaatctctttattttgactcaatatttttttatacaggcaattataaactaaattccaaaataatgtaagttttggaggtttttttcctgtaggaaaaaaattacrtaaatccacggtaaattctccaattaatctggctgaagctaatgcagctcacagggcacctgaaattgttactttagtatgttgatttccaactcaggctgccagaagtacatatttgagtcctagctacagaatcttcagttgacaggaagagaagaaaaagagaaaaccaaaaacccttagggatatcttgctctctaaggcactgaaattagtgaagtgggtattgttagagggaagctggtattttttctctggaggtgaattctgctctgcaaattgctcctggagacctagagaaggtaaaggcaaatctgatacagtgtcttctgagagtgttctgtactgggaaggaaagattggagggaggttttgggattgattttgcacatttatttgtactgatgtttttcagttttgtttgcttttctccttccttccttccttccctccctccctccctctctccttccctccctccctctctccttccctccctccctctctccttccctccctccctccttcccgttctttctttttcttcttttcttttttttttaccaaatacccagacttggagaatttgttttattttctaattgtttgtaaatctgtatcctctaatactgaatttgtttttgaaaatgagctattttctaaatcagtgtgatacttagagttaagtttccagaatggaattattgtgcaataatttagttataaaatcatgatgggaatactgtgtcattcttgaatttttaaaattaagctttatttatatttgttgttttggcccaaatgaaattatgtcaatgtaacctaaatttatatttgaaaataaccaccattttacatgcattagttggaagaaatatttaaacctctcttttaaagattgtgaacattttgcttacataaacaaattatgactaaagcttataaccatgccaaattgctttctgtagcacccagaaaacttttttttttttttttgagagagggtctcactctgttgcccaggctgaagtacagtggtgtgacctcagctcactgcaacctccgcctcctgggttcaagagattctcctgcctcagcctcccaagtagctgggactacagacacatgccaccatgaatgccatgttggccaggctggtctcgaacttctgacctcaggtgatccacctgcctcagcttcctaaagtactgagattacaggcatgagcctttgcgcctggcctcacccaagaagcattttatcatctgtgtcaacttcctccagggcctgtgtgggtaactcttactttgcctggccatcctacttactgcacttagaaaaagttttggatgataattgactttaagcatatataaatcagaaacttgatttcatttatctttgtgtccccagtgttgaacattgtgcctgacacatagtaactgcttattaagcacttattgaattataagttgaatacgttggattcatagagtttattgtttgtcctgaagatgtaaaatttttaaaaattcgatccccagagggcgctccagtggcagttggctctcccattttaaggaccagaagtgtttgaatgtcttcctctgatttctttttctttcttcctttccttttttttttttttttttttttttaagacagagccttactctgtcgcccagacgggagtgcagtggcatgatctcggctcaccgcagcctccgcttcccgggttcaagcgattctcctccctcagcctcctgagtagctgcaattacaggcacccaccacaacgcgtggctaatttttgtatttttagtagagatggggtttcaccataatggccaggctggtctcaaactcctgacttcaggtgatccgcctgcctcagcctcccaaagtgctggaattacaagcgtgagccaccgcatccggctgccctcttccctcccctccccttcccttccctcccctcccctcccctcccctcccctttccctttctttcctatttatttatttatttatttgagatgagctctccctctgttgcccaggctgcagtgcagtggcacaatcgtggctcattctcactgcagcctccacctcccaggctcaactgatctttccacctcagcctcccaagttgctaggtctacaggtgcatgccaccatgcccagctaattttttttattttgtagaaatggggtctccccagagcaagactccgtctcaaaaaaaaaaaaaagagaaatggggtctccctatgttgcacaggctagtctcaaactcctggattcaaacgatcctcccacctcagtctccaaagtgctgggattgcatcgtaagccagcgtacccagcctgtcttcctcagatttctcatgtaacacttttgtttactctcaatgaatgaatcaatgatatggttgtgaaaatctgctgagcagatttccaagctcctcattacaaattctcaaacagagcagcattcagaagaaactagataggaaaatccactggatattaaggtccagtgtttaagaatatgcttctttccttctggtggaataataattttttttttttcgaggcagagtttcagttgcccaggctagagtgcagtggcacgatcttggctcaccacaacctctgcctcctgggttcaagcgattctcctgcctcagcctcctgagtagttgggattacaggcatgcgccaccatgcccggctaattttgtatttttagtagagacrgggtttctccatgttggtcaggctggtctcggactcctgacctcaggtgatccgcccgcctcagcctcccaaagtgttgggattacaggtatgatctaccatgcctggcaaattttttcttttttaagaaagtttacattatctggtccacaggatacttgactcttcagaagcaccactgtttgattaagggtgcttatgacatgggatttttgttaagaacttggaggaggggagatcttcagattatttactgcccttaattttgaaaactttcattttttgcctttccattttaagttataagagtaacacatgcccatagggaaaatgttacatcttttctaatcctgagatcaccagtagtaactgcttgttatgaactgctttcccatctctttctcaatgttcttgtgaacaaaaatgcaaatatttatattttttaccttcaagtgagattagtgtattttttgctgactgtatcatagatatcctttcagttctttacctatagatttaattcatttgtgtttttttgtttgtttgtttgttttgagacagagactcactcagtctgtcacccccaggctagagaaccttggcactctcttgtctcactgcagcctctgccttccaggttcaagagattctcctgcctcagcctcccaagtagctgagattacaggtgtgtgctaccacgcctggctaatttttgtgtttttagcagagacagtgtttcattaggtatttctttatagcagtgtgagaatggactaatagagtctactttaagatttttatttttattttttattatttatttatttatttggacagagtcttgctctgtcgcccaggttggagtgcaatggtgtgatctcggctcactgcaacctttgcctcccaggttcaagcgattctcatgtctcagcctcccgagtagctgggattacgcccagctaattttttagtatttttagtagagacagtttcaccgtgttagccaggatggtctcgmtctcctgacctcatgatccacccacctcagtctcccaaagtgctgggattacaggtgtgaaccactgatcctggccaatttttattttttggggacagggtcttgctcagtcccccaggctggagtatagtggctctatcactgctcactgcagccacttggctcaagcgatcctcctgccttatccttcagagtagctgggactacaggctcacaccaccaggcctggctaattattttttattttacttttttgagatggagtcttgctctgccacccaggctagagtgcagtggggtgatctcggctcactgcaacctccgcctcctgggttcaggcaattctcttgcctcagcctcccgagtagctgggattacaggtgcctgccaccacacctggctaatttttgtatttttagtagagacagggtttcaccatgttggccaggctggtcttgaattcttgacctcaggtgatctgcccgcctcggcctcccaattagccaggcctggctaattattttttgtaaagacaaggtctcactgtgttgcccaggctggtactcactcgactgcttcaaatgctaatctcttccggaaataccctcacagatgataatgtttaccagctatctgggtatcccttaatccagtcaagttgacaccaaaaattaaccatcacaaacattattatatttctatcaaaagtatatgaatatcatcttggaagattattttaatttttacaaatttgttaatctattttctgagatttttgagaatcttttcctttttctcttttttctttttttttttttttttgagacagggtctcactctgttgcccagcctggagtgcaatggtgccatctcagctcactgcagcttctgcctcccgggttcaagaaattctcctgcctcagcctcccaagtagctgggattacaggcacttgccaccatgcccagctaatttttgtatttttagtagagatggggtttcaccatgttggccaggttggtctcgaactcctggctttgtgattcacccgcctcagcctcccaaagtgctaggattacaggcataagccactgcgcccggcaattctttttttaaagtgaaatggcataattaaccatttgtatttttttttttttttgaaacggaatcttgctctgtcgcccaggctagagtgcaatggcgtgatctctgctcactgcaacctctgcctcccggattcaagcaattcttgtgcctccacttcccgagtagctgagaatacaggcacatgccaccacacccagttaatttttgtatttttagtagagatgaggtttcaccatgttggtcaggctggtcttgaactccagacctcaagtgatccacctgccttggcctcccaaagtgctgggattacaggcatgagccacaatgcccggccctctgtgtatttttaaaaaatattttcctggccgggcgcagtggctcacacctgtaatcccagcattttgggaggccaaggcgggtggatcaggaggctgtaatcccagctactccggaggctgaggtaggagaatcgcttgaacctgggaggaggacgttgtagtgagccaagaccacaccattgcactccagcctgggcaacagagtgagactccgtctcaaaaaaaaaaaagtctcaaaaaaacccacaaaacttccctgtacttgtcatttattcagaaaacattttttgagagccaggcactgtgatattggttgttgagttgagtcagaagacgcagattggccagttgcagtggctcatgcctgtaatcccagcactttgggaagccagggtgcaagaattacttgagccaaggagttcaagaccagcctgggaaacatcaaaagcccatccctgcatggtggcgggcgcctgtagtccagctactcaggaggctgaggcaggagcatggcgtgaacccaggaggcggagcttgcggtgagccgagatcgcgccactgcactccagcctggatgacagagagagactccgtctcaaaaaaaaaaaaaagcccatctctacaaaaaattagctgggcctggtggtgcgtgcctgtggtcccagttacttgagaggctgaggtgagagaatcacctgagaaagagaattcaaggctgcaataagacatgatcacgccactgcgcttcagcctgtgcaacagagcaagaccatgtcttaaaaaaaaaaaaaagacgacagaccctgctgccaaaagtttacaatgtagtgaggaaacaaggaaattaattggtgatgactacaggatagaatgataaatcctatgatataaatataccaaatatcccatttagggacgtttagggaagggacatctaaatgtcaatttaatgagtcagggagggcttcccagaggaggtgatgtgtatgagctyaattttgaaggacagtgggaaagaagcagttgggagatggaaaaacgcttagagcagttatccttgtatagggttactgaaggattcaattctgagtaaagtgtgagagggtaaaccgacatacgtgaggctgactcaaaaaacactcccttgaatgcaaacagatatgaaagaactttgcaggtattaaagttcaactgtaaattattattattttttctttttttttttttgagatggagtctcactctgtcacccaggctggaatgcagtggcacagtcttggctcactgcaacctccacttcccgggttcaagcgattctcctgcctcagcctcccaagtagctgggattacaggcacacaccaccatacctggctaatttttgtatttttagtagagatggggttttaccatgttggccaggctggtctcgaactcctgacctcaggtgatctgcctgcctcaccttccacagtgctgggattacaggtgtgaaccaccatgcccggcctaactgtaaattatttcaaaattgtttatcttttagttttgcctccctaactagagtgtaatgtctttaagggtggggaccctgtcttttccctctcatttcactacacgtttttcatttatttatttatttatttttacaaggactctggctctgttgctcaggctggagtgcagtggtgcgatattggcacattgcaacctttgcctcctgggttcacgcgattctcctgcctcagcctcctgagtagctgggattacaagcgtgcaccaccatgcccggctaatttattatatttttagcagagatggggtttcaccatgttgctcaggctggtctcaaactcctgacctcaggtgatccgcctgcttcagcctcccaaagtgctgggattacaggcgtgagccaccacgcctggccttcattctactacatggtttttgaaatgccttagtcatccttcagatcttagcttaaagactctcaaacgttctcagtttatgatgcccttagtgtctcagtttttttttttcatagaaactctagtgcaaaagaaatacctaacagctatattaagtaagtaattaggtctaaacaatacttaagaagtattttctaacaagttagtagctgtttgaagaaatgatacatagaaattaggataaaaaattaggagaaaaaaagtagcaatttaatktctttttttttttttttgagacagagtctcactctgttgcccaggctggagtgcagtggcacgatcttggctcrctgcaagctccacctcctgggttcacaccgttctcctgcctcagcctcctaagtagctgggactacaggtgcccaccaccacgcccggctaattttttgtatttttagtcaatctcctgacctcgtgatccccccacctcggcctcccaaagtgctgggattataggcatgagccactgcacctggcctttttttttttcttttgagatggagtttccctcttgttgtccaggctggagtgcaatggcttgatcttggctcactgcaacctccacctcccaggttcaagcaattctcctgcctcagcctcctaagcagttgggattacaggcatgtgccaccatgcccagctaattttgtatttttggtagagatggggattcaccatgttggttggactcctgacctcaggtgatccacccaccttggcctactaaagtgctgggattagaggtgtgagccacaatgcctggccttttttttgttttgttttgtttttgagacagagtctcactctgtcacccaggctggagtgcagtggctccatcttggctcactgcaacctctgcctcccgggttcaagagattctcctgcctcagcctcctgagtagctgggactacaggtgcccgccaccacgcccggctaatttttgttttgttagtagagacggggttttaccatgttggccaggctggtctcgaactcatgacctcgtgatccgccagcctcagcctcccaaagtgctggcctcccaaagtggctcccaggcatgagctactgcgcccagcctaatttcattcttaagtaaccacacttactaatgaaatgtatatgcctgttgtgtactgtttctcatacgctggaatcatattggacacttccacctgcatttcttattaattttatctccctgtctcttttctttctctctctcttttttttttcttttttgagtcggagtttcactctggcgcccaggcttgagtgcaatggtgcgatctcaactcactgcaacctcggcctcctgggttcaagcaattgtcctgcctcatcctcccaagtaactggcactacaggtgtgcgccaccatgcctggctactttttatatttttagtagagacggggtttcaccatgttggccaggctggtctcgaacctcagacctcaggtgattgcctgccttggcctcccaaaatgctgggattacaggcatgagccaccgtgcccggcccgtttgtttgccttcctctccccctccccatctctcctcctcactcctctcccctctcctccccttcccttcccttccccaagtgattctcctgccttagcctcccaaataactgggattacaggcgcccgccaccatacccggctaatttttgtatttttagtagagacgggtttcaccgcgttggccaggctggtcttgaactcctaacctcagatgatccacccgcctcggcctcccaaagtcttgggattataggcatgagccattgtgcccggcctattttatttttttattttctttctttcccttcctccttctgttcctcctttcttccctccttccctccctccctccctttcttccttcctttcttctttccttccttccttctttccttttttccttccttctattcattcattctctcattcattcactttgttgcccaggctggagtgcagtggcacaatcatagctcattgcagcctccaactcctggactcaggccatcctcccacctcagcctcatgagtagctgggactacaggcacatcacaccatacctctctaatgtttaaaattcttgtagagagaggtttcattatgttgcccaggctggtcttgaactcctggcctcaagccatcctcctgcctcggcctccccaaatgccgagattacgggcatgagctgctgtgcctgtcccacattaattttcatgtgatacttgtttttatcacagcaatagcccataaaatcagcctcacaaagatatgatgtaattgaaaggaatgtgccatgatctttttgttgttgttgtttttggtttttgttgttgttgagacagagtgtcactctgtcatccaggctggagtgcagtggtgcaatctcagctcactgcaacctgtgtctcccaggttcaagcgaatctcctgcctcagcctcccgagtagctaggactacaggcatgcgccgttaccatgcctggctaatttttgtttattattagtagagacggcatttcaccatgttggccagggtggtctcgagcatctgacttcaagtgatctgcctgtctcagtctcccacagtgctgggattacaggtgtgagccatcgtgcccggtccatgatcttaagttgaaaattaactatcttgtgttcacttagtgtcacattgactattgctgtgtttcctttaaaaaattaaacccagggcactattgtgaatttgctgtaccacattccagtttagatgctaatgcaaaaggattgtatcactgaagacctccaaaagtcacgtaggagtacagtattttaacgggtagctttctgaattgaaatccagaggattagagaaatcaatctagtagtgggactttttgtccaggtaagagagagaaaggatggggactctgctgggagtatagagacagcacatatattttgatgtcttatttttttgtttcatgttggcctagtcacactgattcttactaccttaaagctaatacttttagcccaattgccatatgaaaatgtgtttgctcttacattttagttgctttaatctgacaaattaagaacatttttacagactaaacatgtgataagagcatttagaactttaatagggaacaggtgtgacagacatactgtttgctgacagttttatgctgcctggtgcgtaaagttaacaaaccatcactttggtaaaggaaaaagcaccagttgttacttactagtctcagaggccttcactttgagggactgggtcctatgaaacatgttcttccatgcctggtttccatcagtcttctccagaagacccataagctggttccattccccgttggaatgtatcctatgtcaacaagcaattgaatatgcctaatttggggctacacaaaagtctgtttccatacccactttgtgtttggagcttccagaatgtgttagtcattgattggtattggaaaatgttacatgtttaatttaacccacaagctttacctgtataattatgtatgatttagttaggtaataacatgaattttcattttcttggtgcctactgggagtatagagacagcaaagatgttttgattgtataattgggtgttgacttaatggttaatttaggttttcaaatagagtttttccttgctatgtatcatttgaagggcaagggaagtgaaaagtggaaatggtaatgtttcagaagtggggaaaggcaaggaggaagcaaaggaagcaagaaggatggtcagaatcaggctgaatcaaggtgggtcaaatatgcctagctttctgtgtgtggataaagtttctgatctcatctgcaagccaggacataacaaaatgatcaactttgagtttcttctttaactcccaccagtagattctgttattcaatggccatagtagcttgaagacgaaagactgcatctccatatgggtcacctaggaattacctcagaggcctgttgtggaataatagagttattgagagtgaggagacctggattcaagtgccagatttctttccagtaactggcaagtcagcttatctcaatttccccttttgtaaaacgaagcgtatagaggagtagatggtcttaccagctccaaaacagatctgtacctcaaaacttctgtgttagatagcatataacccaatatagtcacacccaaaaggcaaaatatccagttactatgaatatgtgtgccttctttgctattctgtagcgtacgagttggagcaccaaggaattatgtttaataaattcctttatttcatgttcatctagaacttcacagtggtaacattgcacctataaagttgagaaaaggaaagctttttgaaatgtaacagttgcttgtgtgtatttttaattaaaaaattttaagaaatgtgctattagggccaactttctaaatgttcttgtttgtttgtttgtttgtttgttttggagacagggtcttgttctgttgcccaactttctaatttttctttttttgagacagggtctcgctctgttgaccaggctggagtgcagtggcgcaatctcggctcactgcaatctcsgcctcccggttcaagtgattctcctgtctcagcttcctaagtagctgggattacaggcacgcgccaccacgcccagctaattttttgtatttttagtatagatggagtttygccatgttggccaggctggtctaaaactcctgacctcaagtgatccgcccacctcggcctcccaaagtgctgggattataggcatgagccatcttgctcagccttattattatttatatagaaacagggtctcactgtcttgcccgggatggtctcgaactactgggttcaaacagtctgcctgcctcagcctcccaaagtgctggaattacaggtgtgagccaccatgctccacctactgtttttttttcttgagacaggaccttgcgctgtcaccaggctggagtgcagtgacatgatcatggctcattgaagcctctacttttcgggctcaggtgattctcccacctcagcctacaggcacaagcttgtagtcccagctacttggggccaatttatgggttgaggttggggagggggtgttgttttggtagaggtggggtttcaccatgttacctaggctggtcttgaactcttgggctcaagtgatctgcctgtcttagcctctcaaagtgctgagattacaggcatgagccactgtgcccagctattttggttgctcttatttaaagtagagtgtgcgtacattatagaaaaattggaaaatacaggccaggtgccgtggcttatgcccgtaatcccagcactttgggaggctgaggtgggcggatcacgaggtcaggagttcgagaccagcctgatcaacatggtgaaacaccgtctctactaaaaatgcaaaaaaagaaaagaaaaaattagccaggcgtggtggcacgcacctgtaatcctagctactcaggaggctgaggcaggagaattgcctgaacccgggagggcagaggttgcattgagccgagatcacgccactgcactccagcctgggcgacaaagtgagactgtctcaaaaaaaaaaaaagaaaagaaaaattggaaaatacagatcccccacccttccctagctcctggtaagttctaatctactgtctctacgagtttgcctattttaggtacctcatataagtagaattatatgatacttgtcattttgtgtctggcttattttacttaacataatttttgtttgtttgtttgtttgtttgtgacggagtctcgctttgttgcccagggtggagttcagtggcacgatctcagctcactgcaacctccgcctcccagattcaatgattctgcctcagcctcccaagtagctgggactacaagcacatgccaccacgcctggctaaatttttgtatttttattagagatggggtttcactgtgttagccagggtggtctcgatctcctgaccttgtgatccacctgcctcgagctcccaaagtgctgggattacaggtgtgagccactgcgcctggcccataatgtttttaagcttcctccatgttagcatgtatcagaacttcctttttatggctcaataatgttccattatatgtatgcagcacattgtgcttagtcattcatctgttgatggacacttaggttgtttccacctttggttactgtgaataatactgcagtgattggtgttcaagtatctgtttgagtctgttttcagttctttggggtatatacatagaaatggaattgctgagtcacatggtaattttgtgtttaacttgttaaggaaccactaaactattttccacaggagctgcaccattttacatatccaccagcagtatacaaaggttccagtttctccacatcttcaccaatgtttattttttttgtttttgttgttgtttttaaaattatagccattctagtaggtgtgaagggttttttgtttttttttytcctcagaatagtgcatttaaaaaattgtctttggccgggtgtaatggcttacacctgtaatcccagcactttgggaggctaaggcaggtggatcatttgaggtcaggagttgatgaccagcctgaccaacgtagtgaaaccctgtctctactaaaaatacaaaaaatgagctgggcatggtgttgcacatccgtaatcccagctactagggaggctgaggcaggagaattgcttgaacccaggaggcggaggttgcagtgagctgagattgcgccactgcactccagcctgggcaacagagtgagatttcatctcaaaaaagtaaataaataaaaataaaaagatgtcttttaattgggttatatatcttcttatcgagctgtaagagtttatatatttcaaagataagcccctaatccagatgtatgatttataaacattttctcccatcctgtgggctgtcttttattttcttggtagtggtatttctttaaagtaaaatgttttaaattttgaggagatcttacatcttgtacaatagaacatccagtatgctttctattgcctatggtgcagagattaaaaaggctgataagctagtccaaaactacaaaaataaagatgtaactggtatctatatagtgccacgagttgggagtgggaaagagacggggtagtggtaaatggaaaggaaggtggggagggatggggggtcacagattctcattacttctttsaccagttcaagggcataattgagttcaagttaattaaatcagattagtgggatgcccattaagcaaaaagtcacctattttgtaaatggttttyagtgctttttctattgtgtagtcatgacaggaaaaaaatatggaaaaattttccataagattaccacttcttaggtcattttccttgatgaagttaggctctaatcaagaaccaagaggcccatgtaktctgctgtacrttatagaaatgggtacagttatttatggtcatcattaaatcccatgctgggctgtggtttgattgcgatattgtttaaaaatgtattatcactaaactgactttaattttagattgagcaaaatatacttatgaaggtaaattttataccaaaatttaaaaaaaattactacttttcaagccaaatgatgatttctctcacacttctattagcacaggttattggagtaacaatgaaggtgattctttgttatctaagcagtgattgatgtttttctaaaaagtcaattaagagaggttacttggcacaataaagttatgaaagtgctccaatgggttattttggagactaagagtagtatgcttatattgtctatgccatagaagtggcatttctagaatatcttgcttataattttaaactcaaatgtctggagtagagcttcattgaaatrtgtttccttttaaacttttgctgctgtaccttatggatcctctcaactgagtatgtctctaaatttccttctgtttctaggctataaaactggactgttttctgtcccctgtaactcttcatgcccatgcagtgtgtttctgtgttactatattatacttttgtttctcctttgtttaaggagtggatcactttccagaaaaatttttatctaaacacttgaattgatttttgtatttagagcagttcaccaatatgtctccagagctgctattctctatcatgatttagttttaaattttagataagtttttgattgtgcaggtactgtttcccttttttttaataccatatggtggtttttatattgggattcttatccttacttcatgtgagacaactgaattttattttgctgtgctcttaggatttgatgttaataaaacatttaaatcatcagtctttccttgtgatatttaccttttgttttgagatggagtctcactctgtcacccaggctggagtgcagtggcgtgatcttggctcacttcaacttcggtctcccaggttcaagcaattctcctgcytcagcctcctgagtagctgggattacaggcacccgcccccatgcctggctaatttttgtatttttagtagagatggcgtttcaccatgttgtccaggctgggctcgaattcctgacctcgggtgatcctcctcccttggcctcctaaagtgctgggattacaggcgtgagccactgcgcctcgcctgatatttactttttaaagatgtataggttgggcatggtggctcagtcttgtaaacccagcactttgggaggctaaggtggaaggattgcttgagcccggagtttgagaccagtttagacaacatagtgaaccccatctctacaaaaaataaaaaaatgaaaaaattagccaggcatgatggcatgctcgtagtcccagctactcgggaggctaaggcggcaggatcacttgagcccaggaggtaaaggctgcagtgagctgtgattgtgccactgtattccagcctgggcagcagagcaagacactgcctcaatagatarataaagatgtatggatagtgcatacttttttaaaactaaaatttttaaagtttatatgtatatgtgtatattgtaaaaaaaattcaaacaattttggaagtacacaaagtaaaaaatgaaagttctctttaatctcatcctaccctccttatgtaatcacttgtcaggtttttgcgtgcgtgyctttctggatgtatttgtactcagatataatgcacatgtgtatgcacatacacatagtgcttattgttttgtgacttgctttttttttttttttttttgcttagcagtgtatcttggagagcgttccatatcggaacatacagatagttctacttcataatatgcacaatagtttacttagccattcctatattggtggaagtttagatttgttttggtggacatagacatttgtttacaaaagacactgctgtaaacattcatgtacatatgtctttgtgcacatgtgcaacagtgccataactcctagaaatggaattactgagtcaaagtttgagcaaacttaaacttggattgaataaacttaaataatttgcccaagactgaactgatttatacttctatgaagtatgaagatactggtttctccatattcttaccattgctgaatataacattttattttatattaattttatgaacattagttttataaaatttttacttttaatccagtggaaaatggaatcacattgtcttttttttttgagatggaatctttgtcgctcaggttggagtgcaatggcatgatctcagctcactgcaacctctgcctgctgggttcaagcaattctcccgcctcagcctcccaagtagctgggattacagacacacactgtcatgcccagctaatttttgtatttttgtggagacagggtttcgctrtgttggccaggctggtcttgaactcctgacctcaggtgatccgcctgccttggcctcccaaagtgctgagattacaagcatgagccaccatgcccagtctttttttttttttttttgagacagagtctcactctgtcacccaggctggagtcagtgatgtgatctctgctcacttctgcctcagcctcccaagcagctgggactacaggcatgcaccactatgcccarctaatttttgtatttttagtagagacggggttttagcatatcggccaggctggtctgaaactcctgacctcgtaatccacccgcttcagcttcccaaagtgctgggattacaggtgtgagccatcatgcccggcctttttttctggggggacagagtctcgctctsttgcccaggctggagtgcagtggtgcaatcttggctcactgcaatctctgcttcycgagttcaaatgattctcatgcctcagccccgcaagtagctgggactacaggcatrtaccaccacacctggctaatttttgtatttttagtagagacagggtttcactatgttggccaggctggtctygaatttgacctcgggtgattagcccacctcagcctcccaaagtgctgggattacaggtgtgagccaccgcgcccagccagaatctctttatatgcaatrtatagtatcccatcacctttgtatagtgaaaatattttcctccaggctgttacttattatctgattatacttatgatgcctttctttgttcaaaagtttttattattaatgtggtcaaacataaatcctagctgttttggttcttgtttagtgccaagcaagatgtcttttcctatctcagtttattttcctctagtactgtcatagggtttttacttgttttgtgttttagaactttaattcacctggcstttagttttgttgtagtgtaatgcagagatctaattttattttttcccagatggatagccagttgcacaagtatcatttactaaatagaaataaataaaagcacctattttaggtgcttttattacttgttgaattcttatttatacttgggtctatttctggagtcccttgagtttcattgttctatttgtctatttttataccagtaccaccctgttttacttgctgtagttttataaaatcttatgtcacaaaagggacaagtcctcatttgtagttattaatattatttcagttttggccattcactcacatttactctttctgataagtttgagagtcaacttaccaagtttcatttaaaacaaaccaaaaagacaaatgccaatcaaagtttgcttaaagttgccataagtttatagattaatttgtggaaaactgaataattacagtatgaatttttctatctagtaatacagaatgccttctatttatttatttgagacagggtcttgctctgtcacccaggctgaagtgcagtggtgcaatcaaggctcacggcagcctccacctcccaggttcaagcaattcttgtgcctcagcctcctaactagctgggatctgagatgtgtgccaccacgccaggctaatttttgtatttttagtagagatgggatttcaccatgttagccaggctggtcttgaactcttggcctcaagtgatccgcatgccttcatctcccaaagtgctgggattacaggcatgagccaccgcacctggtctgccttttttttttttttttgagacsgagtcttgccctgtcgcccaggctggagtgcagtggcacgatctcggctcactataagctccgcctcctgggttcacgccattctcctgcctcagcctcctgagtagctgggactacaggcacccgccaccacacctggctaattttttgtatttttagtggagatggggtttcaccgtgttagccaggatggtctcgatcttctgacctggtgatctgcstgcctcggcctcccaaacaaagtgctgagattrcaggcgtgagccaccgcgcccagccctgccttctttttatgatattgattttatttgtcttacactaaagtgtttttaatttcttcatataattcttacacatttagttttacatttattcctaaatgtcaccagcatctggtgagggccttctcactgtatcatcccatgatgggagccaaactcatccttttacaaggaaaccactctgtgataacgtgataatggcattaatgsattctttttttttttttttcttttgagacggagtttcgctctattgccttggctgaagtgcggtggtgtgatctcagctcactgcaacctctgcctcccgggttcaagcgattcttctgcctcagtctcctgagtagctgggattacaggcacccgccgtcatgcgtggctgatttttgtgtttttagtagagacagggtttcgccatgttggtcaggctgattttcaacacctaacctcaggtgatccacctgcctcagcctmccaaagtgctggggttaaagatgtgagccactgcaccggccaatctgttgttttttatgtcaaatacaatccaagcagaaatccattcttgagggtggggcttccatgatccaaacacctctcattaggccccacgtcccaacactgccacattagggatcaagtttccaacacaggaacttggggcacgttcaaaccatagcacataatattgatattgagccagtttggtatttctgttcctctatcggcgtgtaatttgtagttaagccactgattattttggactttggtctaggagtaacctgtatgagtttgtctatctcttctctgacctatcttgagtgctgtcatagtaggtctttttttttttttttttttttttaagggacagagtctcattctgtttcctaggctagagtgcagtggtacagttatagcttactgccgcctctaactcctggggctcaagctacccacttggctgagccttccgagtagccaggactacaggtgcacgtcaccatgacaggctaatttttccattttttgtagggatgacatcttgctatggtgcataggctgatctcaaactcctggcctcgagcaaccctctcgtcttgaccttccaaagtgctgagattacaggcatgagccacagtgcgtagtccctgtttttagaagtttgttcttcaagagattcttctagttgtaacatctaataatgatattttgctgtggctgttagtatagtatagtatgtgtagatgtcatttttggtagcatacatattatttctgttttataaataaacagatctaagaaagattaaayaaattacccactgtcacactgggttgtgacagagttataaaactttagttttagttataaaaccttaagcactctagttcagtgttctgagtgtgtgatttcatgtaaggttcaggttcttgtgatctttgctgagttctttgtgtttctcyaaatttatttccccattagtttgataattttgcaaatgctcaaatgttatgtttgcttaatattattatttaggattctgtctcctttgtacatttttctggtgttgattcttaaattcaaataaattctagttcctaaagagcacctgagatactaaaatgtgattatttcatgaagaggatctttacatgttgcattttcaagcagttgaatcttttgggccaactttcttgcttttgaaattccttaggcaaatgatattctcattttaatgttatttacctttttataataagaaagaagtacaggccaggcgyggtggctcacacctgtaatccgtgcactttgggaggccraggtgggcggatcacgaggtcaggagatcgagaccatcctggctaacatggtgagaccctgcctgtactaaaaatacaaaaattagcctggcatgttggcgggcgcctgtagtcccagctactcgggaggctgaggcaggagaatggcgtgaacctgggaggcagagcttgcagtgagccaagatcgcgccaccgcactccagcctgggcaacagagggagactccatctctaaaaaaaaataaaaaataagaaagaagtacagtgtggcctgtttagtggttgttaagaaaccttttttcttttttttttttttttttgagataaagtcttgctctgtcacccaggctggagtgcaaaggcatgatctcagctcactgcaacctctgcctcctgggttcaagtgattctcctgtttcagcctcctgagtagctgggattacaggtgcccgccaccacgcctggctaatttttttgtatttttgtaaagatggggtttcaccatgttggccaggctggtgtcgaactcctgacctcaagtgatccacccgtctcagcctcccaaagtgctgggattacagacctgagcccccacacctggcctgaaacctttcttttataaggagaaataggagaggctggtcttgaactcctgacctcaagtgttccacctgcctcagcctcccaaagggctgagattacaggtgtgagccaccacacccagcctgaaacctttatcttataaggagaagtaggagaggctaggccttcatctgagtgatttgatgtatacaaagatccatgttacctttgctgtgtgcctttctcsaggtattctcttaagaactgaattaactgattcctaggcttttagaccacctgcaacaatatctaggttgtagtgatacatgagagacttcttaagatattgcttcttcctagaaataagatgagtatgtaacttgtatgttctacagtgacaataagaatttatcatttaattaacaagactaagtgagcgtttcctaagagtaacaagacccctgtgcctatccattaatgctggaagttttcaaattattgcctctgagctcctggactccctgaaggtgtctaagcctggtctccatctttgaccattttccattccttctaatgtagggaatgcaaattgattcaaaatggctgagatgaattaaaagaaataaaaatactggaattgaycaattacagaataaaattaaagtgtgaaaattccagtttacgtttcctatagggtccatttggcatataaatcagatgctataatcctctattatctgagaagccatccgtaaaatgttagagggacatccaggccttacatagatgaggaaacaatctgtttagtggcttctaactcactcttaagttttatttattctattttcttgccattgcttctgaagaatcagcttccccaagcagacaatcatcaagtcattaaagtcataaagactttaagttatgcaaatatggagaattacttttattaattagtagtgaggctcaagtcattttatagatgcaagtcactattgcatcctttgttaatataacccttttccttcctctgtgtcagcacattgcttggcactttgtagacagcaaatatttatggatttacagtaagtcgaagtgttgcctgaattaaggttttgttacatgaatattgtcatccaaaagaccaccaggatggctacatagtagaaagaagagctttattggtgatatcagtttgcatactggggagagagtccctggcatagattgtgctccatctttgaggaggagatgggcaggttgggttttatgcttcacagggcttaatattatatagtagtcttaaatatgaagctggtttgggagaaaagctatacatatttatgaggggaattgggcacatgtgcaatgggtaaacatatatgtaacatacatcccatgttcattttggggtgggcttttagcattaaaataaggtggacttgttgggcgtggtggctcacacctgtaatcccagcactttgggaggccgaggccagtggatcatgaggtcaagtgatcaagaccatccaggccaatatggtgaaaccctgtctttactaaaaatacaaaacttagctgggcatggtggtgygcacctgtaatcccagctactctggaggctgagacaggagaatcacttgaacccaggaggcggaggttgcagtgagccgagatcgcgccactgcactccagcctgggcgacagagcaagactctgtctcaaaaataaatacataaataaaataaggtggaatttggctctttaggtcaaaggcgaactataggacacaaagacaagtttgtgtgcaacctctataaagtggctgaaactggcttaagatctgcaactgcatatcagaaaagaatgtttctgaggctggtcctctgtccaatcacagttacagtggtctgggttgtaaatcagagttaggaggggtctgataatttgcaagagtgtgattttttcttgtagccgtaggaatttagaaatttgccatgtcagccaggccctgagcccyggacctgtaagcaacttttgtttccttaaccttagggtccatcttagttgataaagggatgtctattttggtctttcagatcacaagggaaaaacattgaggaaaatgttgtaattgtctgcaattgaatggattatatccttcctttttctcctttctaggatataagcttttaaaatactactctttttttttttttttttttgacggagttttgctcttattgcccaggctggagtgcaatggcgcgatcttggctcaccacaacctccgcctcccaggttcaagcaattttcctgtctcagcctcctgaatacctgggattacaggcatgcgccactatgcctggctaattttgtatttttagtaraaatggggtttctccatgttggtcaggctggtcttgaactcctgacctcaggtgattcgcctgccttggcctcccaaattgttgggattataggcgtgagccacagcacccggcctttttttttttttttttcgagacggagtttggctcttgttgcctaggctggacggcagtggcacgatcttggctcactgcaacctccgccttctgggttcaagcgattctcctgcctcagcctccccagtagctgggattacaggcacacaccaccacgcccggctaattttttgtatttttagtagagacagggtttcaccatggccaggctggtcttgaactcctgacctcaggtgatccgcccgacttggcctcccagagtgttgggatcacaggcataaaccaccacgcccagcctggagatggagtttcactcttgttgctcaagctggagtgcagtggcaygatctcggctcactgcaacctccgcctcccgggttcaagcaattctcctgcctcagcctcctgagtagctgggattacaggcacatgccaccacgcctggctaatttaaaatattactctttattagaaaaagaaacatgcttcatgctaatttggaggttatctgcaaaagctttctacttaagaaaatatttagcttcgttgagaacttccatactttaatatgtggatttgcgatgaaatatgcatggtcaratgcaatgcacacatttacaaatactgtgagagcaaactaaaaatgagattaggaatccactagcaatttaagtcagatattatactcagctttctcccactagatatttttttcttaatgataagcttcctttaagagtgattataggaaaaacccttttttccaacctctatgggtgggactggaaggaattctaaaaagttggccagtaaatatctgggcagtgtattcttacagtcaaaggaaagtaagttccccagggatggcaagtattttttctggaaaatccttatcatatgtcttatttatattacagatgttcctcaacttaaaatgtggttgtgtcccagaaaacccattgtaagttgaaaatgtagtaagtcaaagtgtgctttaaacttacaatacagtattttcagtttacgatggatttggaggtaacccccatcataaatgaggagtgtactgaatgtgtatgctttcacaccattgtaaagtcgaaaaatcctaaattgaaccatccgaagttagagattgtctgtaactggtaaaagtactattagaactgttttgaggttgggtgtggtgcctcaggcctgtaatcccagcactttgggaggccgaggcgggtggatcatttgaggtcaggagttcaagaccagcctgaccaacatggtgaaactgtctactaaacatacaaaaaaatttgctgcgcatggtggcggctgcagtggtgggcgcctgtagtaccagctacttgggaggctgaggcaggagaatcgcttgaaccctggaggtggaggttgcagtgagccgagattgtaccactgcactccagcctgggcaacagagtgagactccrcctcaaaaacaaataaacaaacaaacaaaaaacaggcacggtggctcacgcttgtaatcccaacactttggaaggccgaggctgacggatcatgagatcaggagttcaagaccagcctggacaacatggtgaaaccccatctctgctaaaaatacaaatattagccaggtgtggtggcgggcacctatagtcccagctcctygggacgttgaggcaggagaatcgcttgaacctgggaggcagaggttgcagtgagccaggattgcgccactgcactccaggctaggtgatcgaccgagattccgtctaaaaggaaaaaaaatgttttgaaacagataatagacttacataaagtgttgctgggatgttgtgggctctaaagctgttgtttgcagcaggtaccagactggtgcatctggatgacctccccccatagtacctgcagcattttggggtgtttgggtgaaggtggattgttgacagcacataaccagcatttagattttaaggatctgcctttagatatgggttcatggccaaaagaaaaaaaaagattctaaggtttagtagtcttatggagaatgcaacataaccttagtcttcgatgcttcatagatgtaaatctaaaggacgcctaatagttttatatatatattttttgtttgtttgttttgktttggtttggtttttttgtttgtttgtttgagacagtcttgctctgtcacccaggctggcgtgcagtggcgcaatctcagctcactgcaagctccgcctcccgggttcacgccattctcctgcctcagcctcccaagtagcaggactacaggcgcctgccaccacgcctggctaattttttgtatttttagtagagacgggggtttcaccatgttagccaggatggtcttgatctcctgacctggtgatccacccgcctcagcctcccaaagtgctgggattataggtgtgagccaccatgcccagccatatatttatatttttaatatataataatataaattatatactatattacatataaattttatatattatatgccataagttatgatataaattgtataatatataatatatgaaaatgtaatttatatattatacattatrtgaatttatatatgttttgttttgttttttagagacagagtcttgctctgtctcccaggctggagggcagtggcatgatcatagctcactacatcctgggctcaagttttcctcctgcctcaaactcytaagtagctgggactacaggtgcacatagccttgcccagcaaatgtttttattttttgtagaaacatgttcactgtgttgygcatgctggtcttgagcktctgacctcaagcaatcctctcaccttggcttcccaaagtgctagaattacaggtgtgagccactgtacctggccgtacccaatagttttaattcacttcagttgctttaaaaatacatttgtatttaatatctctgctatgttccctctataatgcaagagaagctcagtagcagttcagtggcaatttctaattgccacattaatgggaggaagtgcctggcatctggatctcttcctgccttcaaagacttgccatttgtgcatcatttgtaccctgaagatcttttttttttttttttgtcttgtgttttcgttgttttctgaatttaggagagatgcagttgctaagaaatgagataagttaggccagttgggatggctcatgcctgtaatctcagcactttgagaagctgaggcaggtggattgcttgagcccaggagtttgagaccagcctgggtaacatggcaaaaccccatctctacaaaaagtacaaaaattagctggatgcagtggcatgtaccactagtcccagctactcgggaggctgaggtgggagaattgcttaagcctaggaggtggaggttatagtgagctgagatcgtgccactgcactccaatytgggtgacagagtgagaccctgtctcaaaaaaaaaaaaaaaaaagtgagagaaattgaacaagatggtttgatatttgaccccataaagttgtcaacatttgcctagttgtagtaaaatagagtaccattttgtacttgttgtgaacatggtgcttttttctccctccaaatcttagtgcatgatccgtaaaggttattgaattgtttttcaacttcttaaaggaaaaatttcagttaaaattttaggcacttattctaaatgaattgagtttatatatttgtcactagaaaattactatctttaggtcaggcatggtggctcatgcctgtaatcccagcactttgggaggccgaggtgggtagatcacctgaggttaggagttcgagaccagcctggccaacatggtaaaaccccatctctactgaaaatacagaaattagccaggcatggtggtgcacgcctgtaatcccagctgcttgggaggctgaggcacgygaattgcttgaacctgggaagcagaggttgcagtgagcagagatggtgctccagcctaggcgacagagcaagaccctgtctgaacaacaacaacaaaaagccacgatttttagttcaatagtagcttgtaattgtagttatagtatttgtaagttgctatggttttgagtgttgcttttaagactgttgttagttacccactaagttttaattgcaaggaaatttcagagaatgtgaaaaagttttggttaagactggaaaatatctattcttgctttcctcaaaactggcttcagtgattacttaatgacagcagaatgctttgaaaatatgctctttaaagtctagctgttactaaaataccataataacttatatgtaagtgatagttgcttttttgttgttgctgcaactgtggtaagaggaaagcattattagcaaaatccttaagaaaaatatagtataaaaaactggtaaatagagaatttacaaaaatggaatgtgggtgagaacatgagacacatgtgtataggtttgacatctttatattcatttgaattctttgtttccttggactttgcaggtaaggttgttttttctttttgacaaactgtataataataataattatttttatttgagatggagtctcactctgtcacccaggctggagtgcagtggtgtgatcttggctcactgcaacttctgctgcctgagttcaagtgattstcctgcctcagcctcctgagtagctgggattacaggcacctgcaaccacacctggctaattttttgtatttttagtagagacggggtttcrccatgttggccaggctggtctcaaactcctgacctcaggtgatccacccgccttggcctcccaaagtgctgggattataggtgtgagccaccgcacccagcctttttttctttcttttaaaaaaaaagtttaatagagatgaggtctgtgttgcttaggctggtcttgaactcctgggctcaagccatccttctgcatcagcctcccaaagtgctaggattacaagcatgatctaccttgcccagcctgaccatttcttctaatggaagktcctatatgacagagagacatggatgatattaggatcttgtttattctcatcaaactttatactcaattatagtcagcaaataaactatttagagttttcttttcatttgctgactaccttaccgttaacttattatttagtaagcaagaacaaatttaaccagcaatttcgggaatgagaaaaggagtaaagaatatatatggcttctgtaatccgaaaacagaaaactcaccataacctgggtaattgaaagagttgcttttgtaaaatgtgccgttgaaatactctttaaaaagggggttgggagtgtgggctgcctcaaatcttaacatcgaagctaaagatamcatttaatttatcacatatttattgtatacttggataaaatgaaaactccattgagggagtcttaagaatttgggatgatatggttgttgtaactgagygataaatatagttatcttggtgtctttaatatttgagagtaaaagcatttttaaaatcaattgtatgattcttttaataaaaaggaacttgcaagtttatgtggaagaagaagcttttctttttgtttttcttttttcactttttgagacaatgtcttgctctgtcacccaggctggagggcagtggtgcaatcacggttcactgcaaccttaaactcccagactcaaacagtccttttgcatcagccttacaagtagctaggactacaggcatgaatcaccatacccagctaatttttaaatttattttttattttttatttttatttgagatggagtctcgctgtcgcccaggctggagtgcggtggcacgatctcagctcactgcaacctccgcctcccgggttcaagcgattctcctgcctcagcctcctgagtagctgggattacaggcatgcaccaccatgcctggctaatttttgtgtttttagagagatggggtttcaccatgttcaggctggtctcaaactcctgacctcatgatccacccacctcagcctcccaaattgttgggattacaggtgtgagccactacgcccagccaggatatatttatctgaacattatagctatraagaataaagatatccattaagcaaactggattatgggaaatatcttaaatttttctttattatttratatacaagcaaaacttctttattgtagaaaaattagaatatagaaattaacacaaaggaaaaaaagtatagtcctaccactgggttgaatgaattctgatatttttcctatgtgtgcttctttcagaaatatggctacacacacctttctgcaggagagctgcttcgtgatgaaaggaagaacccagattcacaktatggtgaacttattgaaaagtacattaaagaaggaaagattgtaccagttgagataaccatcagtttattaaagagggtaaggagtgtgaatgccaaccagttcaaaccagcgaggaaagaagaaattaaattcaccttttggccaggcagttgctcatgcttgtgatcccagcattttgggaagccaaagcaagaggatcacttgaggccaggaattcaagaccagcctggacaacctagtgaaaccccatctctacaaaaaaattttttaaaaagccatgcgtggtggcatatgcctgtagtcccagctgcttgtgagacagaggcagaaggattgcttgaccccagaagttcaagtccagcctgggaaacatagtgagacctcctctcaaaaataaataaataaacaacaataataataaaaataaatccacctttcatatgtgtaatgaaaaatatcaaagattttttgttttgttttgttttgagacagtgtctttgtcacccacgctggtgtgcagtgtcctgatcacagcttgctgcagcctcaaccttccaggcttaagccatcttcccacctcagcctcctgaatagctgggactacaggtgcatgccaccacacctagctaatttttttctattttttgtggagacagggtctcactatgttgtgtaggctaggctggaactcctgggctcaagtgatcctctcayctcggcctcccaaagtgctgggattacaggagaragccaccacacctagctcagagtattgaatttcttgcttgtggaaggtggttatgcttgagaatggcagaactggaaactttgctttcacctgggaagaaagcggacagtggcaaggattctctgctttgatttaggatcacctatagctcaacttaacatccatttatgtgcacttggtcctttcttcscaacattcagacagttattctcttccatttctgtttcatcttttttcctccctctcctgctccctttccttttttcttttttgctttctttcttttttttttgagatagagtctcgctctgtcgccaggctggagtgtagtggcgckatctcggctcactgcaacctctgcctcccgggttcaagagattctcctgtctcagcctcccgagtagctgggactacaggcgtgcaccaccatgcccagctaatttttgtatttttaatagagatagggtttcaccatgttggccatgatggtctcgatctcttgacctcatgatctgcctgcctcagcctcccaaagtgctgggattagaggtgtgagccaccgtgcccggcccccaatttttttttttttaaataaacctctttctttcttctttctctctctttttttttttttttttggcggggagacggagtttcgctctgtcgcccaggctggagtgcagtggcgtgaactcggctcactgcaagctccgcctcctgggttcacgccattctcctgtctcagccttccgagtagctgggagtacaggcgcccgccatcaagcctggataattttttgtgtattttttagtagagacggggtttcaccgtgttagccaggatggtctccatctcctgacctcacgatccacccgcttgggcctcccaaagtgctgggattacaggcgtgagacaccatgcccagccctttctctgttttttaacccacgtccctctcatcattgatgttcgctcagccatggtgtctacttttctggtgtatcaccatcttcaatgtgaaatgctaagacttaagaacttttaaaactaaaatatgtcacatctgaggctgggcgcagtggctcacgcctgtaatcccagcactttgggaggccgaggcagggggatcacttgaggtcaggagttcgagaccagtctggccaacatggtgaaaccccgtctctaccaaaaaatataaaaaattagccaagtgtggtggcacacacctgtaatcccagttacttgggaggctgaggcagaagaatcgcatgaacctgggaggcagaggttttggtgagccaagatcatgctactgcactccaggttgggtgacagagtgaaactctgtttcttaaaaaaaaaaaaatgtccgggtgtggtggctcacgcctgtaatcccagaactttaagaggccaaggtgggtgaattacgaggtcaggagttcaagaccaacatggccaacatggtgaaaccccatctctactaaaaatacaaaaaaaaaaaaaaaaaaattagtcggccgtggtggcaggcacctgtaatcccagctgctcgggaggctgaggcaggagaattgcttgaaccaaggaggcagaggcggaggttgcagtgagccaggatcgcaccattgtactccagcctgggcaacagggtgagattccgcctcaaaaaataaataaataaataaataaatgtcacatctgaaaaacagacaccctgtatttactaggtaactcttcattctagattcctagaactataatcattaacaggtattttcacatagaagaacagtgagggagaaaaagaaatgcaatattgggaacaacaagaaatggcygaagcctgatggaaaagagctatgtaagcatctggttggaactaaagacattggggatgaaaagtggcttgtacacacattcttacctcttgtctcagaggttggagtaacctgcttccattccaaaataaacaaatctctctccctattcactctttctaatgtcctttctctgctctataaagcagagaaagtattatgaaagagcatatggtttttactttttcactctctacttttccactctctacttttcaaccctttgcagtcagattctgtttccatctccattgcagctgctcttgcatgttaccaatgatgatctctatcaaataatacttttgtcattatttttcttgtagtatttaactttaatcagtctgtttgaaaatcattcctcctttgttctttatgacagcgtctctttttcttctctccctactgagtgactgctatttctctatcctctttaatagttattcttttgcaagtttccaaaaccatgatgcttctcagggttttatacttggtcttattcagctctcatttcatatgtttctttctggatggttttagccatacccaaagctttcactatgctmatgctgctaaagtctatagctctaaaacaaaatgtttgttttgaattccagacatatatttttaactacctaactactaggcctttatttgaatgtctcacaagtgtctcaaaatcaacatgtcagaggctgagtgtattgtctaaaatgtgatcttcctttacttcctgtcttggttaatggttctgccatctacctagctactcaaggcataaatctgggaatcatcctatattctcctgcctcttcctcactttcccaaatccattcagtgagcatatctttccagttatttttcttttaatcctcttctgttagtctcttctctgtcatcaccttagttcacatcctcttttttcctatttttttttttttttgagacagagtctctcactctgtccgccaggctggagtgctgtggcacgatctcggcttactgaaacctccacctcctgggttcaagcatttctctgcctcagcctccccagtagctgggattacaggtgccagccaccacgcccagctaatttttgtatttttagtagagacggggtttcaccatcttggccgggctggttcttttgttscctttgttttggggcagccagtgacatttgggtttaattagcttccgttaaaaagtattttatcctacattaataattaatgctaatggtcttttatatttgtccaaagctttgtgttgttggacttgaattatatgaatagcagagttgagcacctgtagaagtaatatactttccactatagcaaaacgacttgggaagagcaaagggaataaagagagggtctccagttgctggagcaaagataatggttaatggttattttcctcttattgccgctcttattgtttatttataactttgtgaatgtgtatgtgaaagtaacatatacttaactgtagaaaatttggaaaccacagaaaaaaattgtgtgtataaaatgaggtggttttgagaggggcatatacccataaccacaccaacttgaggcaaccatcttaatacattgatagatttccttctagtcttttttctttctttctttttttcttttctttttttttttgctatgtaccctccaccctttacttatggtttaaataataataataaaacacccatgtatacactaccatgcttgagaaatttcattttgttaatgttgtattgaacctaaatcttctttttcctttaggaaatggatcagacaatggctgccaatgctcagaagaataaattcttgattgatgggtttccaagaaatcaagacaaccttcaaggatggaacaagaccatggatgggaaggcagatgtatctttcgttctcttttttgactgtaataatgaggtaatgaaaatcttcatctgcccacataggctttaagcaactgttagtcaactattagaaaaaacaaaggattttttaacttatattttatattggcagcagtgttttttgaattggtagattggatggacggaacagcactgtcttgctgttggagtattaaaaactatttggcattagcagccttgtggagctaaattttcctttattttcaaaataacaagaatcagttttgatttttaaaaaataagaattgacatacataataatattaggtaatgaagctgaactactttcttaggtagacattattatcaaagagtattttgccttagggtgttgtttactggaagagaaacacgtttctgagaagttgggaaaactttctgttttaaagaaacatacagggctgggtgcggtggctcacgcttgtaatcctagcagtttgggaagccaaggtgggcgatcaccttatgtcaggagttcaagaccggcctggccaacatggtgaaaccccttctctactaaaaatacaaaaattagcctggcatggtggcatatgcctgtaatcccagctacttgggaggctgaggcaggagaattgcttgaacctgggaggcagaggttgcagtgagccaagatggcaccactgcactccagcctgggcgacagagcaagactgtctcaaaaaaaagaaaaaaaaaaagaaacatacaggatagcctgatttgtcttaagagtgaaatgatcttgaaaaaagtaaaaaaatgtacttttctttctggtagttctaataatgaagccagacatacttttgaataactaaatacatttctcagaatcatttaattaaaaagcctgaagtagttagtaccttgaaagaagttggctgttcttaggttgaattgtaaatgtgcccctggtggagaatcttgctgcagcctttgtgttgttttattttattttatttttttgagacagagtctcactctgttgcccaggctggagtacagtggcacgatcttagctcactgcaacctcccaggttcaagcagttctcctgcctcagcctcccaagtagctgggattacaggcatgtgcaccatgcctagttaatttttgtatttttagtagagacggggttttgccatgttggccaggctggtctcgaactcctgacctcaggtgatccacccgccttagccttccagagtgttggaattgcaggcmtgagccaccatgcctggccttttgcattgttttaaaacgtaactctcttcttccaacccccmaaaatatgttttcatttacccttcaaagttaactttagaatgttaccacagctttataacaaggaatgtttattcacaattaacaaaggatgctttattcaaatgcaaatatgttgactcaaatattttcaaatttatggaattatcaaaaagcagccaaaaatgaaacaaagtttgaggcatgtaattcatacctaataagttaataatatatctgagatggaatcatacacatacagatctttttattacagtttgaaaaaaaataagcaggaaaaactgagtcatgaatgaattcttattatgctctgtacttatttaacctagtttatataaattgaaccacatgtttacgtttaaaaggactttgcatgttgattaatgaattagacacattgggtttattgcagggtttttttggtcatctctttaaactcttgttttctttgcaggttaaaagaatggcaaattcatatctatatttttaataactttgtatctctttttagatttgtattgarcgatgtcttgagaggggaaagagtagtggtaggagtgatgacaacagagagagcttggaaaagaggtacttggcagtttttacatacaaccacttcaatcccagacctgccttatttggtacaggaataaaagagtcacatttaaacatgtaaaatggcttgtttaagatgttaggtcaatcagtcggggcagatccagtgttctgtgagctctcctataacatgtagaagaaaggatagatacctagaaccttgcaatatttacttcttttgcagaattcagacctaccttcagtcaacaaagccaattattgacttatatgaagaaatggggaaagtcaagaaaatagatgcttctaaatctgttgatgaagtaagtgttcctagcctgtctttaaaaaaatatgtcaaataaaaatgtgattatttgttttggggtaagcaggaaaaaaagaaatactatcacagattagttagtttttcaagacactggaagccagtcatggtggctyatgcytgtaatcccagcacaagtgttcaagaccagcctgggcaacatactgggactctgtctcttaaaaaaaaaagaagacactggggactaaatgaaaaattagggtttttttcctttctgagtaaaacctaaaatgaggtttataacttcaaacttgttcttcatgagaaatgggtggtttatgaattctaaatttgctcccaagcactagaaaactggtattttaagaaatgtgagttggatcacatgaatggcaagtcatctagctcaagagctccaggcttctttcttctgccacagaacaagtagcaccacaggtgaaggtttccatgacttatcacttctctttctttttcataaatagcsatctctaaattgtggtttgcaagcgcaacaaaatttctagtgtctcttaaggaacctaacctccctttccccgattccctgaatcttcatcctcttatagtcataagataaaaaagaaaggcccaggggaagaagattcagggaatctttttttmatccattgacactttgtatagaggtgaggtaatacatgagaaaactgtgttttagaatcagaactaagaagataagccacttcagttatattttatattttattttacattttatttacagtttatattttatcaaattattggtagcctctcaagaatattttgtcctaaaagcactaatcgaatgtaatatagtcataattttatatgtattatttatataatattactgtctaaagtaaaatagatgaaactaagtatgtgattcaaaaaaatgattcattttgaaaattaatgtaaatttgatttttttgtgtgtgaccctgtttggagatggagtctttattttttatattattttatttatatatattttttgagacagtgtctcactctgttgcccaggctggagtgcaatggtgtgatctcagctcactgcaacctccgtctcctgggttcaagtaattctcctgcctcagcctcctgggtagctgggattacaggtgcccgccaccacgcctggctgatttttgtatttttagtagagacggggttttgccatgttggccaggctggtcttgaactcctgaactcaagtgatctgcccgcctcgacctcccaaagtgctgggattacagatgtgagccaccgcgccccgccaaatttgattatttttaataagaacttagctgtatggtattttaacagtacctgcttttaaaattattatcatctttttcctttacaggtttttgatgaagttgtgcagatttttgacaaggaaggctaattctaaacctgaaagcatccttgaaatcatgcttgaatattgctttgatagctgctatcatgacccctttttaaggcaattctaatctttcataactacatctcaattagtggctggaaagtacatggtaaaacaaagtaaatttttttatgttcttttttttggtcacaggagtagacagtgaattcaggtttaacttcaccttagttatggtgctcaccaaacgaagggtatcagctattttttttwaaattcaaaaagaatatcccttttatagtttgtgccttctgtgagcaaaactttttagtacgcgtatatatccctctagtaatcacaacattttaggatttagggataccygcttcctctttttcttgcaagttttaaatttccaaccttaagtgaatttgtggaccaaatttcaaaggaactttttgtgtagtcagttcttgcacaatgtgtttggtaaacaaactcaaaatggattcttaggagcattttagtgtttattaaataactgaccatttgctgtagaaagatgagaaaacttaagctttgttttactacaacttgtacaaagttgtatgacagggcatattctttgcttccaagatttgggttgggggcactaggggttcagagcctggcagaattgtcagctttagtctgacataatctaagggtatggggcaaggatcacatctaatgcttgtgttccttatactctattatatagtgttattcatgattcagctgatcttaacaaaattcgtagcagtggaaccttgaaatgcatgtggctagatttatgctaaaatgattctcagttagcattttagtaacacttcaaaggtttttttttgtttgttttctagacttaataaaagcttaggattaattagaagaagcaatctagttaaatttcccatttgtatwttattttcttgaatacttttttcatagttatttgtttaaaaagatttaaaaatcattgcactttggtcagaaaaataataaatatatcttataaatgtttgattcccttccttgctatttttattcagtagatttttgtttggcatcatgttgaagcaccgaaagataaatgatttttaaaaggctatagagtccaaaggaatattcttttacaccaattcttcctttaaaaatctctgaggaatttgttttcgccttacttttttttcttctgtcacaatgctaagtggtatccgaggttcttaatatgagatttaaaatcttaaaatgtttcttattttcagcacttacatcatttggtacacagggtcaaatagggcaaataattttgtctttgtataatagatttgatatttaaagtcactggaaataggacaagttaatggatgtttttatattttaatagaatcatttatttctatgtgttatgaaattcacttaatgataaatttttcaacatacttgccattagaaaacaaagtattgctaagtactataacatattggccactaaaattcatattgagattatcttggtttcttggaagagataggaatgagttcttatctagtgttgcaggccagcaaatacagaggtggtttratcaaacagctctagtatgaagcaagagtaaagactaaggtttcgagagcattcctactcacataagtgaagaaatctgtcagataggaatctaaatatttatagtgagattgtgaaagcaaccttaaagttttgaagaagactgatgagactaggtgctttgcttcctttcatcaggtatctttctgtggcatttgagaacagaaaccaagaaacatggtaattactaaattatgaggctttgctttttgtttgcttttaagtagaaaaacatgttggcaacattgagttttggagttgattgagataatatgacttaactagttttgtcattccatttgttaaagatacagtcaccaagaatgttttgagttttttgaaagaccccaatttaagccttgcttatttttaaattatttccattcagtgatgttggatgtatatcarttatttagtaaataatctcaataaattttgtgctgtggcctttgctatttgttggtttagatttctgttctctaagcatattgaagatcaagaagtatcctatttaacatgtgggtcctcacactacaaaagcagagttcaggactgtcgatgcaaagagtcaaactctgtaaaatatttgaagagatttattctaagccaaatatgagtgatgagtggcttgtgacacagcccttaggagatcctgagaacaagtgcatacagtggtcggtgtgcagcttgtttttatacattttagggagacatgagacatcagacaatacatgtaagatgtatacatggttcagtccagaaaggtgggacaactggaagcaggtgtggggaaagcttccaagccttaggcagatttaaagattttctgattggcaattggttgaaagagttactataaatagaaaggaacgtctaggttgatacaaggtttgttggagaccaaggttttatcatgcagatgaagccttcaggtagcaggcttcagagaaaatagactgtaaatgcttcttattaagagtgtgttctatcagtaatttcaaaagggaggagaagtataatgaggcatgtctggctctcccttccccatgatggcctgaaactggtttttcagatgaactctggaatgcccttggcctagaggaagggtccattcagatggttgtgggggcgcttagaattttatttttgctttacaggattgaggaaaatttttcatcctgtttttgtgttttggcttaagcagaaagcatgattttatcccgttccttcaagaagtaatctccactgagacaaaagcagtctatttcattacctaccagcagcatcaatcacttatctcttttgggggaagatgacagtaagcaatgtatatcaggatgtgggctttttgtggacttttggctttactcttgtaatttaagtggttcacaaacattccagtggtccctggagataatagtggctgaaagtactggccagatgaggtcagcatcttctccccggaggtttggttgtcatcttcaaacacatactaattgcacaagcaaatagtgctacaaacactttttctggccgggcgcggtggctcatgcctgtaatccccagcactttgggaggccgaggcgggtggatcatgaggtcaggagtttgagaccagcctgaccaacatggtgaaaccctgtctctactaaaattacaaaaaagtagctgggcatggtggtgggcgcctgtagtcccagctactcaggaggctgaggcaggagaatggcgtgaacccgtgggcggagcttgcagtgagctgagactgcgccactgcacaccagcctgggcgacagagcgagactccgtctcaaacaaacaaaaaaaacaaaacaaaaaaatatattttctgccttccaggaggtgttttttttttttttttttttttttccgaaaacattctgatatagaccgaccttccagtgtcttctgttggttaactttaatcattcttatgttttctatttcagttctccctagcccacctgcatacttcagctaaattaagtattcgttaattatacacatttatttatttcttattttttattttttttgagacggagtctcgctctgtcgcccaggctggagtgcagtggcgcgatttcggctcattgcaacctccgcctcccgggttcacgccattctcctgcctcagccccccgagtagctgggactacaggcgcccgccaccacgcccggctaattttttgtatttttagtagagtcagggtttcaccgtgttagccaggatggtctcgatctcctgacctcgtgatccgtccgcctcggcttcccaaagtgctgggattacaggcgtgagccaccgcgcccggcctaaacatttatttttaatgaaagaaaggaagctcatttattttgtaccaaagagaaaggaaaacaatgatcctaatcacttactcctttatttcctcatccctgaagccagtgtaaatactctcttggattcaggtatgcttttctttggctgggtgtagttactgtgtttgtgatgttactcttggacctcagataagcctggaaggtcaccatctttcctgttgtgcagagagctgatggacaaagttgaatttctggctgccgccatatacctgatgtcaactgtaccatatctagattatcactcaggcccacacctttatgggaatgcctttatgggagttcatcagagcagaacctgcttctcttaggttcctcttcttcagtgaggcttttccttcatggctttgtcctcctgaaataaagagggtaagagaagaggttttaattattttgtcttatttagggagacatgggtaatacatcagaacatttctctaggtgaggttctttcagctacagaatataattttttatttatgatacatttcgaagtaactgtatgcgacttgtgaacactggcctttcacaccatccaaagtaaaagcatctgcagagacaggttaccagatactttcccacatcccagccctaatgttagaaaagcacagatacactctaagaattgccttccacacaatgaaatcaagcagttaagcagcataccacatatgcatcctcctttaattgaagaaccacatattaaaagagaaagtaagattttaaaaaagccatgaatgtgagctttgggtatgttcttacactactattttgaaggctttctggaagatatgtactctcagtagctatttctatgacattagaaaaaaaaatgatatgtagtctcaagatgagcttccaagaaaaaccctgaactgagtaagtttccttgctaatgtctaagactttgcagccctttgaggactgtgggttgaactggccttcttatagctgcttggctccaagaacttccaggagggaaagacaatgaataggttcattagttggtacttaaaaggacaaagctgtgtgcatggctaaacctaagttgtttattagttttatcaagaaggattttcacaaatggctccaaaacagctgccaacacttggccagtctagtaggtatgattgtgaagagactgcatcaaaacgtccttgacaaaatgtcacactgttttctttttaattaaccaggtgcacaataagcactaccattgttctatcctcagctgggataatagtcaaatgatacattatttacatgatttggaggggaaaatgctgaagtataaagactcattttttaggggctgggtgtggtggctcacgcctgtaatcccagcactttgggaggctgaggcccgcagatcacttgaggtcaggagtttgagaccagcctggccaacatggtgaaaccccgtctctactaaaaatacataaaattagccgggcatggtggcgtgcacctgtagtcccagctactcaggaggctgaggcaggagaatcacttgagcctgggaggtggaggttgcagtgagccgagatcatgccactgcactccagcttgggcgacagatcaagactccgcctctaaataaataaataaataaagactaattttttattagtctttaaacattaaaatgaacaagttgaaacagctacatcaaaatccccctggttccaaaataactgtcagaatgtctatgtcatattcagtatcaaagatgattgagcagagactgtatctatattccttccttcctttctctgtttaaggcctttacttaggtctggataagtgctgtctggggaaagaagataactcctggacttgcactgctgctactgtgtgcaaatggaaattctgaaatgcaggggatgtgatgggatgagagtaaaaccatttgtatagagaagcaggattttgttccatctagttctactttatacgtgatgtttcttttttattgttcttttcttttcttttctttttttttttttttaaatggtagcagcagaggaggagacacacagctcagccaccagccacaggggacatgatggttcttgctggaacttttttattctatcaataatcactcccacaaaacactgtgtcttaatctgttcaaaagtcttcaggttcacaggccacactcgcacttctctccacgagtattttgttgatgaaaatgggattaaggaatgtgatttccttaacaccatctatcttcatttatctttaacttgtggtttcagtaattttgtggctatttctgagttttgtttatgtatttgacttaagaaagtagctgtttatagtcagcagctaaatcattgttttatatgacacagattatggctagttggtgaaataatagctaggtacacataggaggtattaccacagtctgtaatcacattcatgcaagggtctgtcattttaatttagctaactggtcactagcaagccaattttcagagatgctgacccctgtgactggaatcagatttgttgcaggtagtccacatctgccttaggccacgtgactgtcactggaccaagggatgacaatagcaccaaaataatcacattacaaaatttggctggccattcattcaaaatatgtttgagacattgcggatacaacagtcagttaatgtacaaccactaccctcaacaggcttactagataagctcaaatccagtggtttcttagctgattgtgtttctgtgtagtgctttcattgctggcaaacttttttacctctgtgattttgttttcttttcccagcaattctgaggcaggttggaatggtgattttcctgtttcaaggatgattaaactgaggcccaaagagttcaagtcaattgccacaatctttatgctagagagtggtgggtttggaactagaacccagacctctgggccttaaagatctgcctcccaggttgggtgcggtgtctcatgcctgtaatcccagcactttgggaggctgaagagagcagatcacctgaggtcaggagtttgagaccagcctggccaacatggtgaaaccccatctctactaaaaatagaaaaattagctgggcatggtggcgtgcgcctgtaatcttagctacttgggaggctgaggcaggagaattggttgaacctgggaggtggaggttgcagtgagccaagattgcgccactgcactcctacctgagatggagactctgtatcaaaaaaaaaaaaaagatctgcctcctgtccagtagcccctgctgcctatctgtaataaggcaatgtgacctctaatataccccccgtgcttcccatcactagtctattacccttgtttattttctcagtgcatatatcaccatgtgaagttacttttacttattgttgatttcccctctagattttaagtgccagaagagcacttaccttgtttattcctgttttccaatacctagaccagtgcctgcacatagtaggcactcaatatttgttgaaaaaataaactgaaatggaaaaatatttttggcagtagctgtagctacaagttatatcactgaattttggatcccagtagagtctgcttgtgacctcttaggattctattttcgttccccctgaagattgggagctgataatcgtaaagtactgggaccccatcagcttccctctgttttcagtacacaactcatgaaaagacttacaatgtgactatcttggagaaaaaaaaagaaagggataagaaaacaatgtttgggcgaaaaatctcacccactcatccatagttcaatctatgttgatagatttgttttacctattgtacctctgtttcactatatgttaggacatgggaaatctctgctttctgaaggcttttgacagtttttgttcacgccacagatttgaaacgacttaatataaatttctacttgaagccttataagattatagtacatcctaagcactttagtatctatttattaaattcaaaaagaataaagttagatgcttttagcctgccttctcctctatagctgtgtgtt

SEQ ID NO: 93878 - DNA, 24575 bp, Homo sapiens
  misc_feature (1)...(24575): n = A,T,C or G
agttattaggcaattttcttaactctgcttctacaggagtttccttcaattactgaatacccattgtgtttttttctcaatcacctgggaggaaccatctattgtcctgtcctgaagggagttcctcctaggtctggttggaccttcgtatggtaattaagatttaaatcccccgtcaggaaatctgctgggggaagggaattttcagtggttaatgtgaaactattttttctaacagaatagccccatactttaagatttttgagttagcaacctaccctttttgcttttttgacttaggatagttctgaactggtgaggtggtcacaatgaggtttcctctaaaggctaattttctacttccttctgttaggaaagcagttgccacaaaatattgaatgcatgtgggccatctgcaggtttctgggttaaggatttttgataggaaggccactggttgtcagtggcctcagtgcttttgggctattcccttgtttacactgacaacaaagtggtattggagtgttacagggtcacagagaaaaccttaaattatcaattataggttttaaatttaccgtggcttttaaagaaatagggtacactgttttttctttactacttctatctttctccttctctttctcctttctgtctttgtagatggattttggaaacacagtggaaggatgttcgctggttgcccccatttgccactataggaatatgtgcctcccttttatttactcaatttgctttcatcctgatctagtatgttgttgtagacccaattccagttgttaaagtactaggttatcagttctaaggccctggcaagggtggtggggaacgggtcccacataactgcccatgtggagagctgtatgcctaaattgggagggacaccaggtataagactccctgggttcatagcctaggggcctgaggatgcagcatagagcttccttagatccctttggagatacaacctgctctaatacttgggagaggaagtgaaagcctgaagcattagtatctaggaggcagggatcagaggaagtcgattcagaagtaaggaggattttggggctacactttcaggaaagtcgtagtcaggacccaggaggtatggatcagtaggaaaggtaggggcacacgcatcggcctgttgtggggtggggggagggtggtgggatagcattaggagatatacttaatgtaaatgacgagttaatgggtgaagcactccaacatggcacatgtatacatatgtaacacacctgcgagttgtgcacatgtatcctagaacttaacgtataatataaaaaaaaaagaatgaaatcatgtcctcttcagcaacatggatacagctggaagccattaccctaagccgattaacacagtaacagaaagccaaatactgcatgttatcacttataactgggacctaaacattggatacacatagacacaaagatgggaatggcagacactgaggactccaaaaagggatgtgatggagggagggggaaaggatggaaaagctacctattaggtactgtgttcactacctgggctaggagcccaaacttcagcatcatgcgatatactcatgtaacaaacctgcacatgtaccctctgaatcaaaaatttaacaaataatattttacaaaaagagaaaaaaagaaataaagccatgcacctacagccatctgatcctcaacaattttgacaaaaataagcaatgggaaaaggactccctatacaataaatagtactgggaaaactgggtgaccatatgcaaaagaatgcaactggaccctgacttttcaccatataacaattaagttaagatggattaaaggggctgggcacggtggctcacgcttgtaatcccagcactttgggaggccgaggtgggcagatcacgaggttagaaggtcgagaccatcctggctaatatggtgaaaccccatctctactaaaaatacaaaaaattagctgggtgtggtggtgggcacctgtagtcccagctactcaggagggtgaggcaggagaatggcatgaacctgggaggctgagcttgcagtgagccaacatcaaaaaaaaaaaaaaaaaaagacaagatcgattaaaggtttaaatgtaagacctgaaactataagaatcctagatgaaaacctaggaaacatgatgatttacatcagccttgagaaagaatttataactaagtcctcaaaagcaattgcaaaaaagtaaaaattcacaagtgggacttaattaaactgcttctgtacagcaaaagaaacttgagcaaagtaaacagacaacctacagaatggaagaaaatattcataaactatgcatctgacaaaggtctaatatccagaatccctaaagaaattaaacaattcatttttttattatacttcaagttcggagatacatgtgcagaaagtgcaggtttgttacattggtatacatgtgccatggtggtttgctgcacccatcaacccgtcatctacattaggtatttctcctaatgctatccctcccctaaccccccatgccagataggtccctgtgtgtgatgttcccctccctgtgtccatgtgttctcattgttccactcccacttatgagtgagaacaagtggtgtttggttttctgttcttgtgttagtttgctgagaatgatggtttccagcttcatccatgtccctgcaaaggacatgacctcatcctcttttatggctgtatagtgttccatggtgtatacgtgccacagtttctttatctaatctatcattgatgggcatttgggttggctccaagtcttctattgtgaacagtgctgcaatgaacatacatgtgcatgtgtctttatagtagaatgatttataatcctttgggtatatacccagtaatgggattgctgggtcaaatggtatttctggttctagaccttcgaggaattgccacactgccttccacaatggttgaattaatttgcaatcccaccaacagtgtaaaagcattcctatttctccacatcctctccagcatctgtggtttcctgactttttaatgattgccattctaactggcatgagatggtatctcattgcggttttggtttgcatttctctaatgaccagtgatgatgagctttttttgctgtttttttggctgcataaatgtcttcttttgagaagtgtctgtgcatatcctttgcccactttttgatggggttgtttttttcttgtgaatttgtttaggttctttgtagattctcgatattagccctttgtcagatggatagatcgcaaaaattttctcccattctgtaggttgccttttcactctgatgatagtttcttttgctctgcagaaactctttagcttaatcagattccatttgtcaactttggcttttgttgccattgcttttgacgttttggacatgaagtccttgcccctgcctatgtcctgaatggtattgcctaggttttcttccaggctttttatggttttacatcttaagtttaagtttttaatccatcttgaaataatttttgtgtaaggtttaaggaagggtccagtttcagttttctgcatatggctagccagttttcccaacaccatatattaaatagggaaccctttccccattgcttgtttttgtcaggtttatcaaagatcagataattgtagataagtggtgttatttctgaggcctctgttctgttccattggtctgtatatctgttttggtaccagcaccatgctgttttgggtactgtagccttgtagtgtagtttgaagtcaggtagcatgatgcctccagctttgttctttctgcttaggattgccttggcaatgggggctctttttttattccatatgaaatttaaagtagttttttctaattctgtgaagaaagtcaatggtagcttgatgggaatagcattgaatctataaattactttgggcagtacggccatttttactatattgtttcttcctatccatgagcatggaatttttttccatttctttgtgtcctctttcattttgttgagcagtggcttgtagttctccttgtagaggtccttcacatcccttgtaagcagtattcctaggtattttattttctttgtagcaattgtgaatgggagttcactcatgatttggctttctgtttctctattattggtgtgtaggaatgcttgtgatttttgcacattgattttgtatcctgagactttgctgaagttgcttatcagcttagggagattttggactgagatgatggggttttctaaatatacagtcatgtcatctgcaaacagagacaatttgacttcctctcttcctatttgaataccctttacttctttctcttacctggccagaacttccaatacaagcgaaaaacaaacaaccccattaaagacacagacacttctctaaagaagacatatgagcagccaaaaaatatttttaaaaatgctcaacatcactaatgagaaatgtgaatcaaaaccacatctcacacaagtcagaatggctattattaaaaagtttcaaagcaacatatgctggctaagctgcagaaaaaaaacataatgtgtatacattgtttgtggaaatgtaaattagttccgccactgtggaaagcagtttggagatttctcaaagaacttaaaatagaactactatttgacccagcaatcccaatattagctatatatcaaaaagaaaataagttgctctaccaaaaagacacctctactcatacattcatcacagcactattcgcaatagcaaagacatggcatcaaccttggtgcccatcaatggtggactggataaagaaaatgtgatacatatacacagtggaatactagacagctataaaaaaataaagaaatcatgttctttgcagcaacatggatgaattgggaggcaataatcctaagcaaattaacacagcaacagaaaaccaaataccacatgttctcacttataagtgggaactacattttggatacttatggacataaatatgggaacaatagacactggggactactagaggggtaggtacagatatgagtaagcattggaaatttgactaatatataccatactcactacctgagtggcagaatcatttgtatccaaaccctcagcatcacacaatacaccagtgtaaaaaacctgcatacgtacctgaatctaaaataaaagttgaaattataaaaagaggaaaaaaagaatgctcatgcacagatatgcatgtaaaaatgccagggagggttaattcatagcaacagttgctatttaacctactttacttgaggttggcaaagcaatcattttttaaatattaatttctgtttagtacagattgtccttggtcaggactcctaaacagagtgcaaagttctgattgtgtaattacatactattgtagggtgaaagagaattggtaaacaggctcctgctgtgactatagtactagactgaagtaggactaaaattgctctaggacttactctggtagaaaaggtagacctatcaataggggaaaaagtcatacctaacatgatgtagaatttttttaaattgtcatgtatatgaattgagaaaaaaaatcatgctatgcatattatgagaccagtttccccaatggaataaaataaagtacttgaacagctgctatattagcatctgtttgtccatatcatcatccagttactagaaagacataattcccactcttcactcaatatatagatggaagtggtttttatggtaaataaaattagatttgcaataagacaaaagtaatgattcagggcttggttaatgttaagtttaaatgtacatatcatgttgagaattttctttgaacacataacaaaaaaaaagtgctactgaatgaacattattgcaatgtagtaaagcagaatgcaaattccttgaggtcagcattcaagtctgttttcctcgcagcggtgcccacacacctagcatactgcctggcacacagtaaatgctcattaaatatttgtgaggtacatggacaggggaatgtggtagacagctgatgaagcttttctcccactgttgccctaggtggatcatccatagtcaattgattctgaactctgaggtccaagttctgccctcctccttcactctccccacaagtgggcgggacaatcctccctggatttgagcacagggggacgggggtggtcagagagaggtaggggcactcagagatccagcaggtgctgcaccatgagtgtctctgtgctgagccccagcagactcctgggtgatgtctctggaatcctccaagcggcctccctgctcattctgcttctgctgctgatcaaggcagttcagctctacctgcacaggcagtggctgctcaaagccctccagcagttcccgtgccctccctcccactggctcttcgggcacatccaggaggtagggaggaactcaatgggggagtgggagggcaaagagggatggggctctgagaccctggtcacaaaatccatagagcaaagccttgttttgtaacaaatgtgaggactcaaaggaacacccagcctacctctctggtctcagcttttcccagtcatgaggagctcacttctcccatgaagcccatcctgctggtcctcagctctatcacccgtgccctccttctgcagatatcaagtgtgtcttggcagtcctgcatgtggagggcaatgcctgattgtctccagactgattaccccataagccttggctttcatcaaagaacaaggcttctagatgctctctgcccagtcactcaatgccatcactctgcctggccctgtgtttgccagggagcacagacacccatctgaggaatccatgccatgaggagtttatggtctgtgaagaatacaggcaggaatttgagaaggtgtcagactgcaggaaaggagctcactctgctggggtggatatctgaggcagagatctgctggtataggggaccaactggctaagtaagtttccccaagactcacggaatttccacaacaggtgatttaggatctgaaaacctgacaattatgggtacacatgargggggcagcctgcacaatgttctccaggtgaggagactggtgtttgagttgcacattgaacagggtgtgttgacctcctggctctcctcccacayacccggactgtgagctccctggcggtgagcatgtcatccccttcctgtgccccggcaatcagcaaaatcctggcacagcttgatgatcagctcaggtgtgtagagcaagcttgtccaacccacgccccatggggctgcatgtagctcaggatggctttgaatgtggcccaacacaaattcgtaaactttcttaaaacgttatgagattattttgcaatttttttgagytcatcagctatcattagtgttagtgtattttatgcatggctcaagacaattatttttcttccaatgtggcctaggaaagccaaaagattggacacaccaggtgtagaggaacagaggaagaagagaaaggagcagcaagagggctgaggagggacacagcccatcccctgtgcactgctatccctacaaggggaggggggcgggtaggaacagagcaggtaaacggctgcatggagagggactcaccaaggtgctatgaattgaacacacttaagtagagataggggttgcagggarctgaggcctattgtttctcagcaaaggaggcaacatagttctcagcagagcagaacaaatgtggggacctgccaaagttctaaccctatatggactggtcccaataccactctgccttctttcccattctcctcttttaccatatgttactcactacctcactacctgcctctgcatttcaacctttaggtctctgatcacactatgcttgctacctggaattatcttctcacgcatatctatctgtcaaggcccagcaccaagctacctcyttcaagaaggcctcctgggtctcccagtagtgaagggctgactcttttttccatgagctatccttctcaagaggccagagcagtgttaacttgactcagttattgttctgcagtgtcataagtgtgggattcttctgggagagaccatctctgatttatgtttgtaacccaatagtccctcagtaaatgatgactcagtgagtgaggaagagctttctaatgttcagttctgagttaggtccctcttcaaagcttccccagatgcttgtccttcattccatatcatgtccattatcccctactgcacagcctctaatctttcttaccccccaactagactgaaaattccacacagataaggaccacagctgtatcctaacgcagtgcctgagccacactgggcacatagtatgtgtgcagtaagcatgggctgaatgaaggagcctaccccacagtagggcaagctgcctcagagctggacaatatgattatcagaaggagatgggcagatattcgatacctatgtggtagacagttgctttgatttactagaagcagttgaaataaagaagagttggctacatggaacatcactaggacccaatgtctttgagggttccagatgagattaaagcaaagctgagtcttgaaagctgaggagaggtggctgctctgtggcagaggggaagggcattcaaggtagagaaaagagcaagtgccagggcccagaagagtgagcaggtgtagctggtgtgcgattcagcagcagtggtggcatcggcattggagctgaaacaaacgggtgatggtggaattgccagcagggctggaggcaagaaaagagaagttgaagccagaaagccaagggctttgtgatccacatcgaagagtttagaaagatgactgcaggcagcagggagctcataattcgttgataagtgaaaatgagaataagaaacccaaatctcaaaattattgtccaacaccagcaccatatgcatatactcagactccatcccataaatctgtacatattcaacatgtagaatactattatgcacacaattttatagttaatctttttttgcttaccaatacacatcccaaatgctattttatcttaacaaatatttaccgtatatgctgggataatattgaaaatataacaagtatgattatataaaggcattgtgtaatttaaaatgtttacattaattcattttattctctagatatactaaatgattttacaaatctacttatcaactaatatgagttatacacattgcccatggaaattgttgtatttatgacttccagagatgttacacaacatgaagacaatggctgacttaaatttctgctggcagcattgagcgagggctcatagcgcttggcctaaggtcaagtcctggggagagagcaagaatctggatcacagctcaggtcatcagaaacagatctaaatccctaacctgcgctacatggctcctgtagttgtcctgcccttcactcctgctgcaaagactagaagtaaatgaaagtgttcatctgtctacccttgttgacagctccaacaggaccaggagctacaacggattcagaaatgggtggagacattcccaagtgcctgtcctyattggctatggggaggcaaagttcgtgtccagctctatgaccctgactatatgaaggtgattctggggagatcaggtgagatcgaacccccatcccaactgcaatgtgtcttccctcttgacacatgcycctgggtctgtaaaattccagaagagagtggctgttcaaacatcaatatctgaaacctctcccacgcatccaccaagcccaccatgcccaggctatagtcaaaaatagttactgaactccgaatgtttaaaacaatatgtggggctgaattttctattcttttttctatttctctattaagaaaattgaggttttctgaaatgtaaattgtcccagatctgtaaaacaaatttcatacccacattgacctgggtttcaaagctctaattgttgcctgtcttggtcaggaggtgactaggaaatcatcaatgtagaaaaacccatggctctatgttattcattgtcattgaagacctagcctatgtttctcaccaattcaccttcctaaccctctggatgttttcctgctggaacactgagtctgtcttcctgagcccacactgaccttcaggacagaaatagaagtggatgggagtcaagtgggaggtgacatgggtcaaactgccaactgacagacaccaagaaytgatgcagcctctaagactgccttcttagtaactcctagtttcctataaagccctttcttgcctttcagacccgaaatcccatggwtcctacarattcctggctccayggattggtatgtgtgcaaactaggactgcagcccactccctagtcaggtttgagttatttatttggctcacagagaacaacagattagaggccaccactatcatgaccttatccccaaatcaagcctcacttccttcttctaacaagaccctcaccccttcctaatgctggtacaaaccttcctgaggctcagcttcttctatttcatgtctcagttctctccagacatccttggcctcacatttattttacatctgcccacaacccttttcaacttytatctcacagctgtcataatcacatgcatgtagcagctcaatcagaatattcacatgcctgaaatatacctccttttcctgcatttgcccatgacgtggcttcttctggatagttctccccttgagaagccacctttctccctcccaaattgtcaccagtcatccctagctccttgcagcccctgcacacacacacacacacacacacacaaacacayattcatgtctctcttagggtacggcttgctcctgttgaatgggcagacatggttccagcatcgacggatgctgaccccagccttccacwatgacatcctgaagccctatgtggggctcatggcagactctgtacgagtgatgctggtgagtccatgtctctctcctctccccacacccactcacagcacacactctcaccaactccactctcaaccctgtgtcccacaggcagmcatagacatagacacatggaacaacactctcaggtcattgctgtgagagtagagggttccccagagttgtataaggtaggagaacacccaggcatcaggtcatatccacgctttgttccccaccataggaatagagattcatggtgaatgcaaggcccttctcctcccactttggaaccttcagcacaagggactggaggartatgcaatcttgctggacagtaggacttcctatgctggctggcctgggcaatggcagcttcagtggcagcatggacaggccaagatgtcacccacccaggctctggcctggggccccgggtttctgcatggatttaagccaccctgggaaggaaatgaacaccaggtctatgttctcagagcaataccttccatagatagcatcatctccagtcaggactctgatttctcacccaactgtgcccagcacattttgatgaatggaaaagaattgaagtccctgttttctctacaacagagtgcccattccggcccctcaagctatctttggcactgaaactttcctactagtccctcagaactagctcagctctcagaacactgaagagtcccccattatttatcccagaacaacaatagcaatacaattttcacaaccatatgtcctaactgaatctcaaaattcaatacttaatccatgctattgtgagaggatctgttgaatgttgtattaaaagtgtgtgagaattaggcgtcagtttaccaacactggctttacagtctcagtttctacaatgcrtctgctctgtaaagtgaggaatcccaaccaagatatctgcawgctacaggaaaaaacaggatatctgcaggtacatgaaaaagccaggccttattagcaaagcacttcttggagattaagaaggtccatgccccctcccaccacaggacaaatgggaagagctccttggccaggattcccctctggagktctttcagcacgtctccttgatgaccctggacaccatcatgaagagtgccttcagccatcagggcagcatccaggtggacaggtcagtgacaaccctccagctgcagrgcccttgttcttatcaagtggagtgcacatacctgaggggcaggtggggcagcgtgaaggctcaccgccacacaaaggaagagtcagtccctgaccaaactctaattcctgtccagaccaaacaaagtctcaggaacagatgcctaattcctagcacaggtggaccctggatgttcataccatctgataaaggccaaaggataatagggctgtaagatagaagaaacattgcctcaaggctgcttgtccccattatccgaggctgcctcctctcagaccccattctacttccgggtaatgggcccacccctactgcggtctcttcttcatactctccctcaggaattctcagtcctacatccaggccattagtgacctgaacagcctggttttttgcygtatgaggaatgcctttcatgagaatgacaccatctacagcctgacctctgctggccgctggacacaccgcgcctgccagctggcccatcagcacacaggttctgtctyttcctcttrtctcccagcctttcccaggcacagtgaaagtacctgccctgactcctcaggcagagaaggyccctagtaaycctgcagaasscagaacacactcagcctggggaattcccttgctcaggggctgggagctgagatgtgaggggccagattctgtgccttggtttatcaatgtccccacatggagataactgaatgagaccctgtccaaacagcattcaagaggagcctccatgaactgtgccactggygggaggggtgccctgcctcacacagtactagagcttccacccctgaccctgcacccacactcacattcatgctgagatctaccaggcamccacactggggcagttgggcagctaggcctcctgggggctgctgacggtctcagctctgcctggtaaccattgttctggtacagaccaagtgatccaactgaggaaggctcaactacagaaggagggggagctggagaagatcaagaggaagaggcacttggattttctggacatcctcctcttggccaaagtgagtatgtgtaggagaggcctgagtctttgcccagaagtacatagcaagagacaagccctgcactttcaccacggtcttcccagatggagaatgggagcatcttgtcagacaaggacctccgtgctgaggtggacacgttcatgtttgagggccangacaccacagccagtgggatctcctggatcctctatgctctggccacacaccccaagcatcaggagaggtgccgggaggagatccayngcctcctgggtgatggagcctccatcacctggtgagtgagggctcaaaagatggggttccctgccttctccacaggggcccctggtctgcccaggccttgctggtgttcaggatggaattgtttcaggaaccacctggaccagatgccctacaccaccatgtgcattaaggaggcactgaggctctacccacyggtgccaggcattggmagagagctcagcactcccgtcaccttccctgatgggcgctccttgcccaaaggtatgaagttyccccaccctctcaccyaaagtctccacrgggacgtgtggagggtgagaaatccatgtgtgcttcagarttctgcacatctctgggtctcccttttgttctaaaaamatcaaaaacatactttgtayttrggatgaatttgaaaagtctggcygagagcttgaacccaccraaagttcaagaaataaatkttaatctctgaatgtggccttgggtcagtaactgtaaaatcctattccttgagatgtgcagggctggaaagagaatcagacaagggcagagagggatgtgtttctttcctcatggggtcagtgcaaaagaggcttatcaggaatctcatttcctgggtcagctgttgtccagtctctgaggaaccctcaggttgatggcagagagcagccaatgaccagatctggggccaccaagcctcaactcccccagttctggtcccagtcctgctataacctagttgtgtgaacacagacaagacaattggtctctctgatactcagrtatctcccctgaaaactgagagcaaaagaatgtcttccttggrgcattgttgtattgagtgagttcatgtatattctccaatgacccttggagaatatttgatgaatgtgaaatgtcactggacttactctaaagagtaatgctctgattcttttttgcttctcattcctgcataaatgrttgtctattcatcatctgaactcacatgctttgtcaagcctaacccacctgcataatggcagaatcatcctagtcaaagtgacaatttatagaaagtaggtgttttgggccttcttttgcccctgcaggctgaagtaccaggccaccccatgcaaatgatcggtcttctctctctttccaacctgcaccacaggtatcatggtcctcctctccatttatggccttcaccacaacccaaaagtgtggcccaaccyagaggtatgtggtccttgagaggaggaaatgrggtgatcyctcaagaccaataccttctcctgcttccacctctgggagtmctgtmccctcatgggtggcaagtaggtgctggatccttaactatcctggctctggtgctctctctgcaggtgtttgacccttcccgttttgcaccgggttctgctcaacacagccacgctttcctgcccttctcaggaggatcaaggtgagacgtcctgtgtggtaattsgaatagagraatgagggaagtctctggtcaaccctctgatctttgtgagccygatgttcatatgtggcatcttcaggtgtgctcttaaatrttggtatttgtgggaaagtcaggcacctggtgtgggcgtctctgtgtacaaaaggaaggtggcattcagagcaccccatggagactttgytccctctgcttcttcaaatgggcagcctgaattcactgtcagtgcatgttccaaacttcagtatattcatgtattttcctcactttaaggatatgaattctcaaaattagatattctccagtaaattcaacttcagctgtttgcttttctcagttgtcaggaatagtaaactgtagatttctctccccccacacatcctcaatgcagcacactaccttccctatttaattcactagtctgtcrtagagatgaatcattgaagtctttgcatctgtttataatacagatgacctgcaagtcctacctttcaagtcatataagggagaggttaaggtagccctttgaagaaagttttacaacagtgtgtgtcatatcatacattcttctgtcttgcccaatgaaatttttactgcattatatagtgttcacatatttacatctattttcccgtttgacaaattctgtacatgccttgagatctttatacyatagtcctgtaatccacttagcacaatattggccaaaaacataaaaatgtgaacagtacactgtcttggagagaaaagcccaataattatcatataacgcacaacatttgaagcctcctggtatgtgaaatataaaacacacttgaaattgctrttgagctggagaggaaaactccagaatggctgcggtggagatcattgtggcatcaggaatcgtcctgtgacatacacacaggcaaaaacgatataaattcttagtagaaacaaagtttgttcaaagaaataattatgtgactttttcaaacggtgagtccacttacacrgaacaggctaagaaaaagcttcctcctgaaactccttctccagcactggtctgtctatcccagcatgagaaagtccttgtaaacattgcctgcaaatcatgtcgctgccactagagaaccggagagcattcctaagctccatttctagctcagaactaatattttactctcagtgtatttcattctattttattcattttaaaacttaaataacatcattcaaatatwaaagtatttcttaagctacctctctgggtcaagtcctatgcagcatgatgagaaaacagagataaaaagtacaaaaatgtgttgtacagaaatatatcctgtgctccagacacacatcgttccatcaaccatcctttcactcattcactcactgagtggcgtgttgagtgtccctgtccctggtgctgtccttggcactggactgtgagtgttcatggataaatcgtgaatgctacctgggggcctgggagggagaggcccrgctggcagggagtgagaggcagctgggctgtgactttagccttgaggatgtggcaggcagaggtggagggaggacattctcagccatctccacatgaacagggctaggatgtgggctggacaggtaaaatgtgggtgaggcaagagcccacggagggcttgtctgccggctgaggcattgggatgctgtcccacctgtgatgaagagcgtgggagggtctgagctgggctgtggcttcagtgtgcagggaggggaagcagaaatccagaaagtccaagtgacaagactgaggaaggacaaggatggacgtttctggagtagagttagaaggctacaggggctggtggatggaggagtgaggttagacaggagcccggaccctggggtgggaggcaggtggggcaacactgaggatcacccacccagttctcctccaggaagcctcccactgcccttctgactcccttaatacacccatcggggaccccctatgaggattcaggtccctgtgtgtcccactacgtgggaagcacctgagagtgtggcccaccctcaccctacaggacctgaactgacctccgcactggagaacaagaaatgtttgtggaggagtgaacaaaccattgattaactctttatttattcatgtgattagactctgtgccttagagccctggccctgtcttgatagagggtttcaggctgctgagagcagaggtagaaggtaggagttaggagytagcccaggaagacggctctgtccaaggwttgggayagtgtgaagccaggatggggtagaagtgtccgtgggctgtaagtgtgcaggggctggacacatgaggttgggcactgaatgtccasctcagggctggggtcaggggccaaaacctgctcagatcagaatggggcctgaggacacgtctcaattcattgtctccgcctggcccaggaactgcatygggaaacaatttgccatgaaccagctgaaggtggccagggccctgaccctgctccgctttgagctgctgcctgatcccaccaggatccccatccccatkgcacgacttgtgttgaaatccaaaaatggaatccacctgcgtytcaggaggytccctaacccttgtgaagacaaggaccagctttgagggcctccacctgccrtcctgtcttcctgacccccactcctatctcctgcctgtctgcctctgtcctgctttctgtctgcccaccttcccttcttcccacctgcctgctgtcccccagtctgcctgcccttctctctctcacctttctccargctccctacctgcttgtmtacctgtctcctacccacctgtatmtcttgttgggagaaaagctgagtgttgggagaagctgaggccragcttgcatgtctgacataatgtaaaagagtcttgratcatgtccaggatccagggtctaaaaccccttgtggcctttggaacaccaagctctgtgctgaagggtggaaggctaccctgacgcaccataatctaagcccggggcataaaacccctcgtggcttggatagaatccagggctcgtggctctggaatgtgtctggacttgctgsctcctygctccttgctctcccaggatcaattgtatcttgagttaaaagaacctgctctccattatctcaagtaacagagcagatgctaaaccgtcacagctgtaaatyrtgtgcttaatgcaacatgccctttcgacccaccccccattctcaccacctgtttctttgtttgatcaccaataaataatctgcacttccagagctcggggccttcacagcctccatccttagctttggcgccctggacccactttctctctcaaactgtcttttctcactgctttgactctgccggactttgtcacccccacgacctggtgttgggtctgaacaccccaacatccctgaatctccacccacctcccaaactcctgcctgccctccagactgtctgcccatacacctgtctccttcttcctgcctgcttgtctgttcctatattagtttcctrttactgctgtaataaactatcacaatctcagtgattttaaataacgacttttattctcttacagttatggaggtcaaagtcagatatatgggtttcactgaattaaaacaagttctggagagggccagacccccacccccagaaggtttcagggagagccctgccccttggcttttcagctccagagctgccttttttgcattccttggtacggtcccctccttcctctttaaagccaatggcatcttcaaatctctctctctgtgactgtcttcacatctctttccctcttataaggacccttgtggttagttacatcaagcttattaagataatcaaggataatgtcaccacctcaagatccgttacttactcaaaagtccattgtgacatatgcagtcccacaatcacaggtttcatgaattaggatgtggacaacatggagacccattgttcatcctagcacagcccctaccggattgtcatccaatgtgtccatctaaatctctcctgtatgctacctacctacatacatgattgtcagccagacaatccctctatcttccctcttctctagaataaggttcacaagcttgcatgctttgtccagcttcacatggaaggtgatagggttagaagaggagacactaaggcagggagataaatccctactgaagagggaaaatggagatgaggtgtgcccaattgtgccagaaccctagcagggcctggtttgatccatccccctgcacacagcctcataccatgtctcccctggtgcccacaccctctccagctcctgaggctcccatggtagctgagtttagacaaacgatatttatctaggagatcagagggagaagctcacacctgtagggaaaagactccaggcctccattccattcaagatttagattcaagatgaatcacagcaaggctgagctaagggcctgccttgctgtgttttgtgttactgtaactgaatacccaaggctgggtaattgatctagaaaagaagtttattttgctcatgatctggtggctgaaaagtttaagttttggcagctaaatcagatgaaggcctcatgcagcttccacacatggcagaaagcaaaaggggagtggcacgtgctgagattgcatggtgacagaggaagcaggagagagaccaaggaagcaagactctgttttgatcccgatgtcttggaaacctgtccattccagatacagctaaaactcaagcctgtgaggtggaagggggcactaatctcttcataaaggatctgtctccacgatctaaatatctcccactaggacccacctcccaacactactgtgttggggatcaaggctcaggagtttggttgggaacatcccacatcccagctatagtgaggctgcactgagctgagcaagaaagcctcaaaggcctggtctgtcatgaggatcttgtaaattcagctatccacagccccagtgaggtgtagaaagagaccccagcctagcaacgtcaccaggtacctgtcaaccttcctcacatacggaacctgcaggcttctctggaagctcatggagtgggcagctgtccagtcaggggtgggaggagcccaggtaggcaaatgggtctggctggtggaagaggctgtcagaccccaagcagctccttcccaacagcacaacttcttggttgtcgtctgcctctctggctggccaccctgatggggtaggggcatcctcaaccctgtccacacttggtgactgcctgggtgctggtagtgctgaccctgggccctgttccagcacccaggccccatgtactacccctgggatagtgtcactgattgtcccagcctctctcaatgcagaccttgcttctcttcctaaatctgaacccaggtgttcctctcacctattgcccattcctagcccaggaccttggatgccatagagaggaattcctctgcctgaggtctgaaagctcattctgttaccctgaaagagcttctcttctagtttgtgcctgcaactaggacatccctccaagtcccctgagttccccggtcattggattaattcagccctgctctgagaacaggcaggaaaggggagggctggacagtcggtaatcagccaggagtggagggagatggaaacactgggaaaggagagtgacctgggaacctcatggacaggatggccagccagtcacctggcatcaggggatttacaagggctcatgttggccatactcaaagaccacaggacagtgtgcactcactcccattactacccctaatacctggttgaaaagatgaggggaagggaatcatataagtgaaagtctcattgcaattggagaggtggagacctcagagtgatcaaagagatagggaaggtgcacaaggagggagaacctgaatatctctatgtaaaagaatgatgttgaagttttacatacatgatatacaaactaaaaaaaaaatggatagaaggattgaaagatagcccacagaatggcagaatatattcacaaatcaaatgagaacatgtaaaggactccaacacacaacaacaaaatactacaatcccattcaaaaattcaaaggacttcaatagaaacttctgcaaagaagatatgcaagtgatccataagtgcacctggaaagatgctcaacttcattagtcattggggaaatgcaaatcaaaaccacagtgagataccacttcatatcctttagaaaggctataattattttttaatggaaaatatgaaatattggacagaatatggagaaattgaaactcttatgaattactggtgaatgtaaattggcatggtcaatttgcaaaacaatttgtggttcctcagaaaaataaaatcacaatttccatgggacccagtaattccacttttggatgtatatatacccaatggatttgaaagcagggatttgaacagatccttgtaaaccaatgttcacagcaacattattcatagtagttaccaggttgaagagcccaagtgtccatcaacagatgaatgggttcacaaaatgtggtatacagacaatggaatattattcagtcgtaaaaagaatgaagttctgatacacactacagcaggaatgatagtgataacagcatgctaaataaaatttgacagacataaaaggaaaaatatcatgtgattccactcttaagtagtagattaggcaaatccatagattagacaaagtagtagagaataacaaggactgggagaaggcagagttatcatataatgattacagagtttctttagagtgatgaaaaccttttggaaataggtagtgatgatggttgtaaaacactgtaggatctactgccaaggtggccaaataggaacagctctggtctgcagctcccagcaagaccgacacagaaggtgggtgatttctgcatttccaattgaggtagactgttcatctctttgggactggttaggcagtcagtgcaggccacagagggtgagcagaagcagggtggggcacaacctcaccggggaaatgcaaggagtggggggcctccatttcccaaccaagggaagccatgagggactgtgctatccagcccaaatactacacttttctcatggctttgcaatctgcagaccaggagatcccctcatgtgcctacaccaccaggcccctgggtttcaagcacaaaactgtgcagctgttcaggcagacactatgctagctgcaggaggtttttttttcataccctagtggtgcctggaaccccagtgagacagaatcattcactcccctggaaagggggctgaagccagggaacgaagtggtctcgctcagtgggttccattcccacaaggcccagcaagctaagaacaactggcttgaaattttcactgatagcgcagcagtctgaagtcaacctgggacgattgagcttggttgggggaggggcgtctgccattactgaggcttgagtaggcagttttcccctgacagtgctaaaatgacctgaaagtttggactgggaaaaactcaacacagtgagacaaagcggctgtggccagtctgcctctctagagtcctcctcactgggcaggacatctctgaaagaaaggaagcaaccccagccaggggcttatagataaaattcccatctcactgtgggcatagcttcagcagacttaaactttcctgcctgctggctctgaagacagtggtggatcctgacaagcagggttctaccaacacagtgcttgagctctgctaagggactgcctcctcaagtgggtccctgatccccatgcctcctgactgccagagacctcccaacaggggttgactgacacctcatacaggagagctccgactggcatctggtagatgccagcttcatcctctgggatgaagcttccagaggaagaagcaggcagcaatctttgctgttctgcagcctccactggtgatactcaggcagatagagtccagagtggactgctaacaaactgcagcagacctacagaaaaggggcctgttagaagaaaaactaacaaacagaaagcaataacatcaacatcaacaaaaacaaccttcacacggaaaccccatccaaaggtcatcagactcaaagatcaaagttagataaatccacgaagatgaggaaaaaccagtgcaaaaatgccaaaaattcaaaaaaccagaatgcctcttctcccccaaatgatcacaactcctctccagcaagaacacaaaactggacagcgaatgaatttgatggattgacagaagtaggcttcagaagatgggtaatagcaaactcctctgaactaacagagcatgttctaacccaatgcaaggaggctaagaatcttgaaaaagggttacaagaactgctaactagaataaccagtttagagaagaataaaaatgacctgatggagttgaaaaacacaccaaaatcactttgtgaagcatatacaagtatcagtagctgaatgaatcaatcgaaaggaaggatagcagagattgaagatcatcttaatgaaataaagtatgaagacaagattggagaaaaaagatggaaaggaaaaaacaaagcctccaagaaatatgggactatgtgaaaagaacaaacctatgattgattagggtccctgaaactgttggggagaatagacccaagctggaaaatgcacttcaggatattatccaggagaacttccccaacctagcaagacaggccaacattcaaattcaggaaatacggagaacaccacaaagatactcctcgagaagagctaccccaagacatataatcatcagatttccaaagttgaaatgaaggaaaaaatgttaaggacagccagagagaaaagccaggttacctacaaaggaaagcccatcagactaacagtggatctctctacagaaaccctacaagccagaagagagtggggaccaatattcaacattcttaaagaaaagaattttcaacccagaattttatatccagccaaactaagcttcataagtgaaggagaaatcaaatcctttacaaacaagcaaatgctgagggattttgtcaccaccaggcctaccttacaagagctcctgaaggaagcactaactatggaaaggagaaaaccggtaccagccactgcaaaaatacaccaaaatataaagaccaatgacactatgaaaataatgcatcaactaaagtgcagaataaccagctagtatcataatgacaggatcaaattgacacataacaatattaaccttaaatgaaaatggacgaaatgccccaattaaaggatacagactggcaaattggataaagagtcaagacccatcagtatgctgtattcaggagacccatctcacgtccaaagaaacataaaggctcaaaataaagggatggaggaatatttactaaataaatggaaagcaaaaaaaaagcaggggttgcaatcctagtctctcataaaacagactttaagccgacaaagattaaaaaaaagacaaagaaggacat

SEQ ID NO: 93879 - DNA, 45897 bp, Homo sapiens
  misc_feature (1)...(45897): n = A,T,C or G
agtttttggtgtgtttattattgcctcaattgttcttttttgtcccaggaatcagtgctagttcttttgcctctcaatgtttttgaggaacacttccctgccctgagagaattctgagttaggtaaaacataggaaagcccttgtccttcagaaaacccacacagaagtcaaaacaaacaaaattccttgagaacaaggaccattctgctttctctaggatccaggaaacagaacccactgagaatgcaggctgccatcttcaagattgccatggtactggagagggatgtggggcaaggctaaattgcaatgccaccaatcttttctatcctttttcagtggccttttttgtgattaagtgtgcacctggttgctgtaaacaattaactgtcttccagaaatnnnnnnnnnnnnnnnnnnnnnnnnnnnnnnnnnnnnnnnnnnnnnnnnnnnnnnnnnnnnnnnnnnnnnnnnnnnnnnnnnnnnnnnnnnnnnnnnnnnnnnnnnnnnnnnnnnnnnnnnnnnnnnnnnnnnnnnnnnnnnnnnnnnnnnnnnnnnnnnnnnnnnnnnnnnnnnnnnnnnnnnnnnnnnnnnnnnnnnnnnnnnnnnnnnnnnnnnnnnnnnnnnnnnnnnnnnnnnnnnnnnnnnnnnnnnnnnnnnnnnnnnnnnnnnnnnnnnnnnnnnnnnnnnnnnnnnnnnnnnnnnnnnnnnnnnnnnnnnnnnnnnnnnnnnnnnnnnnnnnnnnnnnnnnnnnnnnnnnnnnnnnnnnnnnnnnnnnnnnnnnnnnnnnnnnnnnnnnnnnnnnnnnnnnnnnnnnnnnnnnnnnnnnnnnnnnnnnnnnnnnnnnnnnnnnnnnnnnnnnnnnnnnnnnnnnnnnnnnnnnnnnnnnnnnnnnnnnnnnnnnnnnnnnnnnnnnnnnnnnnnnnnnnnnnnnnnnnnnnnnnnnnnnnnnnnnnnnnnnnnnnnnnnnnnnnnnnnnnnnnnnnnnnnnnnnnnnnnnnnnnnnnnnnnnnnnnnnnnnnnnnnnnnnnnnnnnnnnnnnnnnnnnnnnnnnnnnnnnnnnnnnnnnnnnnnnnnnnnnnnnnnnnnnnnnnnnnnnnnnnnnnnnnnnnnnnnnnnnnnnnnnnnnnnnnnnnnnnnnnnnnnnnnnnnnnnnnnnnnnnnnnnnnnnnnnnnnnnnnnnnnnnnnnnnnnnnnnnnnnnnnnnnnnnnnnnnnnnnnnnnnnnnnnnnnnnnnnnnnnnnnnnnnnnnnnnnnnnnnnnnnnnnnnnnnnnnnnnnnnnnnnnnnnnnnnnnnnnnnnnnnnnnnnnnnnnnnnnnnnnnnnnnnnnnnnnnnnnnnnnnnnnnnnnnnnnnnnnnnnnnnnnnnnnnnnnnnnnnnnnnnnnnnnnnnnnnnnnnnnnnnnnnnnnnnnnnnnnnnnnnnnnnnnnnnnnnnnnnnnnnnnnnnnnnnnnnnnnnnnnnnnnnnnnnnnnnnnnnnnnnnnnnnnnnnnnnnnnnnnnnnnnnnnnnnnnnnnnnnnnnnnnnnnnnnnnnnnnnnnnnnnnnnnnnnnnnnnnnnnnnnnnnnnnnnnnnnnnnnnnnnnnnnnnnnnnnnnnnnnnnnnnnnnnnnnnnnnnnnnnnnnnnnnnnnnnnnnnnnnnnnnnnnnnnnnnnnnnnnnnnnnnnnnnnnnnnnnnnnnnnnnnnnnnnnnnnnnnnnnnnnnnnnnnnnnnnnnnnnnnnnnnnnnnnnnnnnnnnnnnnnnnnnnnnnnnnnnnnnnnnnnnnnnnnnnnnnnnnnnnnnnnnnnnnnnnnnnnnnnnnnnnnnnnnnnnnnnnnnnnnnnnnnnnnnnnnnnnnnnnnnnnnnnnnnnnnnnnnnnnnnnnnnnnnnnnnnnnnnnnnnnnnnnnnnnnnnnnnnnnnnnnnnnnnnnnnnnnnnnnnnnnnnnnnnnnnnnnnnnnnnnnnnnnnnnnnnnnnnnnnnnnnnnnnnnnnnnnnnnnnnnnnnnnnnnnnnnnnnnnnnnnnnnnnnnnnnnnnnnnnnnnnnnnnnnnnnnnnnnnnnnnnnnnnnnnnnnnnnnnnnnnnnnnnnnnnnnnnnnnnnnnnnnnnnnnnnnnnnnnnnnnnnnnnnnnnnnnnnnnnnnnnnnnnnnnnnnnnnnnnnnnnnnnnnnnnnnnnnnnnnnnnnnnnnnnnnnnnnnnnnnnnnnnnnnnnnnnnnnnnnnnnnnnnnnnnnnnnnnnnnnnnnnnnnnnnnnnnnnnnnnnnnnnnnnnnnnnnnnnnnnnnnnnnnnnnnnnnnnnnnnnnnnnnnnnnnnnnnnnnnnnnnnnnnnnnnnnnnnnnnnnnnnnnnnnnnnnnnnnnnnnnnnnnnnnnnnnnnnnnnnnnnnnnnnnnnnnnnnnnnnnnnnnnnnnnnnnnnnnnnnnnnnnnnnnnnnnnnnnnnnnnnnnnnnnnnnnnnnnnnnnnnnnnnnnnnnnnnnnnnnnnnnnnnnnnnnnnnnnnnnnnnnnnnnnnnnnnnnnnnnnnnnnnnnnnnnnnnnnnnnnnnnnnnnnnnnnnnnnnnnnnnnnnnnnnnnnnnnnnnnnnnnnnnnnnnnnnnnnnnnnnnnnnnnnnnnnnnnnnnnnnnnnnnnnnnnnnnnnnnnnnnnnnnnnnnnnnnnnnnnnnnnnnnnnnnnnnnnnnnnnnnnnnnnnnnnnnnnnnnnnnnnnnnnnnnnnnnnnnnnnnnnnnnnnnnnnnnnnnnnnnnnnnnnnnnnnnnnnnnnnnnnnnnnnnnnnnnnnnnnnnnnnnnnnnnnnnnnnnnnnnnnnnnnnnnnnnnnnnnnnnnnnnnnnnnnnnnnnnnnnnnnnnnnnnnnnnnnnnnnnnnnnnnnnnnnnnnnnnnnnnnnnnnnnnnnnnnnnnnnnnnnnnnnnnnnnnnnnnnnnnnnnnnnnnnnnnnnnnnnnnnnnnnnnnnnnnnnnnnnnnnnnnnnnnnnnnnnnnnnnnnnnnnnnnnnnnnnnnnnnnnnnnnnnnnnnnnnnnnnnnnnnnnnnnnnnnnnnnnnnnnnnnnnnnnnnnnnnnnnnnnnnnnnnnnnnnnnnnnnnnnnnnnnnnnnnnnnnnnnnnnnnnnnnnnnnnnnnnnnnnnnnnnnnnnnnnnnnnnnnnnnnnnnnnnnnnnnnnnnnnnnnnnnnnnnnnnnnnnnnnnnnnnnnnnnnnnnnnnnnnnnnnnnnnnnnnnnnnnnnnnnnnnnnnnnnnnnnnnnnnnnnnnnnnnnnnnnnnnnnnnnnnnnnnnnnnnnnnnnnnnnnnnnnnnnnnnnnnnnnnnnnnnnnnnnnnnnnnnnnnnnnnnnnnnnnnnnnnnnnnnnnnnnnnnnnnnnnnnnnnnnnnnnnnnnnnnnnnnnnnnnnnnnnnnnnnnnnnnnnnnnnnnnnnnnnnnnnnnnnnnnnnnnnnnnnnnnnnnnnnnnnnnnnnnnnnnnnnnnnnnnnnnnnnnnnnnnnnnnnnnnnnnnnnnnnnnnnnnnnnnnnnnnnnnnnnnnnnnnnnnnnnnnnnnnnnnnnnnnnnnnnnnnnnnnnnnnnnnnnnnnnnnnnnnnnnnnnnnnnnnnnnnnnnnnnnnnnnnnnnnnnnnnnnnnnnnnnnnnnnnnnnnnnnnnnnnnnnnnnnnnnnnnnnnnnnnnnnnnnnnnnnnnnnnnnnnnnnnnnnnnnnnnnnnnnnnnnnnnnnnnnnnnnnnnnnnnnnnnnnnnnnnnnnnnnnnnnnnnnnnnnnnnnnnnnnnnnnnnnnnnnnnnnnnnnnnnnnnnnnnnnnnnnnnnnnnnnnnnnnnnnnnnnnnnnnnnnnnnnnnnnnnnnnnnnnnnnnnnnnnnnnnnnnnnnnnnnnnnnnnnnnnnnnnnnnnnnnnnnnnnnnnnnnnnnnnnnnnnnnnnnnnnnnnnnnnnnnnnnnnnnnnnnnnnnnnnnnnnnnnnnnnnnnnnnnnnnnnnnnnnnnnnnnnnnnnnnnnnnnnnnnnnnnnnnnnnnnnnnnnnnnnnnnnnnnnnnnnnnnnnnnnnnnnnnnnnnnnnnnnnnnnnnnnnnnnnnnnnnnnnnnnnnnnnnnnnnnnnnnnnnnnnnnnnnnnnnnnnnnnnnnnnnnnnnnnnnnnnnnnnnnnnnnnnnnnnnnnnnnnnnnnnnnnnnnnnnnnnnnnnnnnnnnnnnnnnnnnnnnnnnnnnnnnnnnnnnnnnnnnnnnnnnnnnnnnnnnnnnnnnnnnnnnnnnnnnnnnnnnnnnnnnnnnnnnnnnnnnnnnnnnnnnnnnnnnnnnnnnnnnnnnnnnnnnnnnnnnnnnnnnnnnnnnnnnnnnnnnnnnnnnnnnnnnnnnnnnnnnnnnnnnnnnnnnnnnnnnnnnnnnnnnnnnnnnnnnnnnnnnnnnnnnnnnnnnnnnnnnnnnnnnnnnnnnnnnnnnnnnnnnnnnnnnnnnnnnnnnnnnnnnnnnnnnnnnnnnnnnnnnnnnnnnnnnnnnnnnnnnnnnnnnnnnnnnnnnnnnnnnnnnnnnnnnnnnnnnnnnnnnnnnnnnnnnnnnnnnnnnnnnnnnnnnnnnnnnnnnnnnnnnnnnnnnnnnnnnnnnnnnnnnnnnnnnnnnnnnnnnnnnnnnnnnnnnnnnnnnnnnnnnnnnnnnnnnnnnnnnnnnnnnnnnnnnnnnnnnnnnnnnnnnnnnnnnnnnnnnnnnnnnnnnnnnnnnnnnnnnnnnnnnnnnnnnnnnnnnnnnnnnnnnnnnnnnnnnnnnnnnnnnnnnnnnnnnnnnnnnnnnnnnnnnnnnnnnnnnnnnnnnnnnnnnnnnnnnnnnnnnnnnnnnnnnnnnnnnnnnnnnnnnnnnnnnnnnnnnnnnnnnnnnnnnnnnnnnnnnnnnnnnnnnnnnnnnnnnnnnnnnnnnnnnnnnnnnnnnnnnnnnnnnnnnnnnnnnnnnnnnnnnnnnnnnnnnnnnnnnnnnnnnnnnnnnnnnnnnnnnnnnnnnnnnnnnnnnnnnnnnnnnnnnnnnnnnnnnnnnnnnnnnnnnnnnnnnnnnnnnnnnnnnnnnnnnnnnnnnnnnnnnnnnnnnnnnnnnnnnnnnnnnnnnnnnnnnnnnnnnnnnnnnnnnnnnnnnnnnnnnnnnnnnnnnnnnnnnnnnnnnnnnnnnnnnnnnnnnnnnnnnnnnnnnnnnnnnnnnnnnnnnnnnnnnnnnnnnnnnnnnnnnnnnnnnnnnnnnnnnnnnnnnnnnnnnnnnnnnnnnnnnnnnnnnnnnnnnnnnnnnnnnnnnnnnnnnnnnnnnnnnnnnntgcagtggctcatgcctgtaatcccagcactttgggaggccaaggtgggcggatggcttgagcccaggagttcaagaccagcctggccaacatggccaaaccccatctctactaaaaatacatgatcataaggcagattagaggaagagttgagttcaaactcaagcttccttgagttggaagagcacaccctgaactgatgcacctctcttcgagtctaaggctccttcctgatgatgcccccttcagcctgctccaaccactgcctctccttgcaatgcccttacccacatccaaacagacaccacccccattatcacctacctcatgctctttctctactcttcttggctccatgacagttgcaatctttcagaacatctgattttagtaacatgtttggaaaaaagctttcaaattgaattaattaattaattcacattacagagttaataacagcttaacagtgtataaatatttatattgaaatggagaacttcgtctcaataaacatttggcttttgacaaagtgaaattttctgggatattggcaggtatgtccaagggggtaaatacatctgaattctaatatatagttgagggttttctgtcttgactcttaactgcaaactctttgagaacaagaactatctctaattcctttctaaattctcaatggatctgggaaaaaacttgtcaagtactaaatatttttagggatcttttcctagaatcaaaaacctctgtttatttatgctctctacagatgtttttgaattcttatttattttttattccatgttttgtcagcttagtttttccatgataaaagtcatataaattgtactaatgaaacttgaaaaagagggaaaaatagctatttccccacccttacaaagtcacaaatagcatctaaggcacagtatcattttcagtactgacaaggtgtttyattttatatggttgtcataataaggcaaattcattttgtacrctttatattttcaaaccccagcaarctctaaaagggacataaaataacttagaaattgggaaaagatgggcatgtgtatgatcatgatattcatcccctgccccagaacaaatgggaggaacacattgcccaaaactcacgtctggagctctttcaacatgtctccctgatgaccctggacagcatcatgaagtgtgccttcagccaccagggcagcatccagttggacaggtcagtgryaaaaggaaggtaattgtttgccaataactgtgtcacccactaacatgttgttccatcttccctattccagtaccctggactcatacctgaaagcagtgttcaaccttagcaaaatctccaaccagcgcatgaacaattttctacatcacaacgacctggttttcaaattcagctctcaaggccaaatcttttctaaatttaaccaagaacttcatcagttcacaggttagtcctgggatttacatggccagagtccactatsagacatctcattgtctgagacattgactctggttatggctgcttctactatggacatatggcatggtcatcattcagaartgctaatttgtacctcttaaatgaatgtgctacataaatgctatgtagagggtattatattattgactatatatagctgyattttaatgtttggwgttagaactaatacaataagcaaaacatctgtctattttgcttcatttcttatggagcagcttcagatgtgaagaaaagtaaaagtgaaaggaagtacatttctgtaggaagacagagcaggacatctgagcaagtactgaacatgagtgggtactgcctactatgcacagttcatcaaacaacacagcacaccactgagkattccttttgcatgggtttttggggacttaggacatagataactttgagggaccatarrtctacctatgacaatagccatttacaattggaatatatttctgatttatcattttatcttgataaaattggcctctttttctctaataatgcttctagtcttaagatctactctatctgctactagtatgataacctctgctttcctttggttagtattttgatagtatattattccatactcttttttttccatttctgtgcccttatatttgcggtttatgtctttttttctttttcttttccttttttttattattatactttaagttctaggatacatgtgcacaacgtgcaggtttgttacatatgtatacatgtgccatattgatgtgttgyacccattaacttgtcatttaccttaggtatatctcctaatgctatcccacccccctccccccaccccacaacaggccccagtgtgtgatgttccccttcctgtgtccaagtgttctcattgttcaattcccacctatgagtgagaacatgcggtgtctggttttttgtccttgtgatagtttgctgagaatgatggcttccagcttcatccatgtccctacaaaggacatgaactcatccttttttatggctgcatagtattccatggtgtatatgtgccacattttcttaatccagtctatcattgttggacatttggcttggttccaagtctttgctattgtgaaaagtgccacagtaaacacacgtgtgcatgtgtctttatagcagcatgatttataatcctttgggtatatacccagtaatgggatggctgggtcaaatggtatttctacttctagatccttgaggaatcgccacactgtcttccacaatggatgaactagtttacagtcccaccaacagtgtaaaagtgttcctatttctccacatcctctccagcacctgttstttcctgactttttaatgatcgcctttctaactggtgtgagatggtatctcattgtggttttgatttgcatttctctgatggccagtgatgatgagcattttttcatgtgtctgttggctgcacaaatgtcttcttttgagaagtgtctgttcatatcctttgcccactttttgatggggttgtttgtttttttcttgtaaatttgtttgagttctttgtagattctggatattagccctttgtcagatgaggagattgcaaaaattttctcccatctgtaggctgtctgttcactctgatggtagtttcttttgctgtgcagaagctctttagtttaataagatcccatttgtcaattttggtttctgttgccattgcttttggtgttttagacatgaagtccttgcccatgcctatgtcctgaatggtattgcctaggttttcttctagggtttttatggttttatgtctaacatttaaatctttaatccatcttgaattaatttttgtataaggtgtaaggaagggatccagtttcagctttctacatatggctagccagttttcccagcaccatttattaaatagggaatcctttcctcatttcatgtttttgtcaggtttgtcaaatatcagatgggtgtacatgtgtggtattatttctgagggctctgttctgttccattggtctatatctctgttttggtaccagtatcatgctgttttggttactgtagccttgtagtatagtttgaagtcaggtagygtgatgcttccaggtttgttcttttggcttacrattgacttggcaatgagggctcttttttggttccatatgaactttaaagtagtttttttccaattctgtgaagaaagtcattggtagcttgatggggatggcattgaatgtataaattaccttgggcagtatggccattttcacgatattgattcttcctacccatkagcatggaatgttcttccatttgtttgtatcctcttttatttcattgagcagtagtttatagttctccttgaagaggtccttcacatcccttgtaagttggattcctaggtattttattctctttgaagsaattgtaaatgggagttcactcatgatttgctctctgtttgtctgttattggtgtataagaatgcttgtgatttttgcacattgattttgtatcctgagactttgctgaagttgcttatcagcttaaggagattttgggctgacacaatggggttttctaaatatacaataacgtcatctgcaaacagggacaatgtgacatcctctttccctaattgaatgccctttatttctttctcttgcctgattgccctggccagaacttccaacactacattgaataggagtggtgagagagggcatccctgtcttgtgccagttttcaaatgtaatgcttccaggttttgcccattcagtatgatattagctgtgggtttgtcataaatagctcttattattttgagatacatcccatcaatacctaatttattgagagattttagcatgaagggctgttgaattttgtcaaaggccttttctgcatctattgggaaaatcatgtggtttttgtctttggttctctttatatgctggattacgttgattgatttgcgtatgttgaaccagccttgcatcccagggatgaagcccacttgatcatggtggataagctttttgatgtgctgctggattccgtttgccagtattttattaaggatttttgcatcaatgttcatcagggatattggtctaaaattctctttttttgttgtgtctctgccaggctttggtatcaggatgatgctggcctcataaaatgagttagggaggattccctctttttctatcgattggaatagtttcagaaggaatggtaccagctcctccttgtccctctggtagaatttggctgtgaatccatctggtcctgtactttttttggttggtaggctattaattattgcctcaatttcagagcctgtyattggtctattcagagattcaacttcttcctggtttagtcttgggagggtgtatgcgtccagtaatttatccatttcttctagatttactagtttatttgcttagaggygtttatagtattctctgatrgtagtttgtatttctgtgggattggtggtgacatccctttatcatttttttttcgtctatttgattcttcaaatgtgtctatttgattctccaatttttttttgttttttgtttttgttttgttttgagacagggtctcaccttatcacccaggctgcagtgtggtggcactatctcagctcactgcagattcaacctcctgggttcaagtgatcctcctgcctcagccccccaagcagctgggactacaggtgtgtgccaccacacccggctaaatattgtattttttttttactagaggcagggtttcaccattttgtgcaggctggtttcgaactcctgagctcaagcaatttgcctgcgtcagcctcccaaagtgctaggattacaggcgtgagccactgtgctcagccaaggtttatttctcatatgcagcatttatttagattttgcttatgtagtctgaaaatmtttgtgctttggttagagcatttaaaccacttatatttaatgtaatcactagaatatttggatttcaacatgccgtgtaactatttgttttctatttaaccgatttttatcccttcttttattaattgctggatcattttatattattattttttctgttttagatcataagtttagttttcatgggtatgctagaaattacaacatgtagtctttatttattagaatctaacatatgtaattacattatacttccctgaaaatgcaaggatcttacaccatttgaacctctatttactacttctcatatttttaaatattgttgtgatgggtttttttaataatttttttttaagttccgaggtatatgtgcaggatgtgcaggatacggataataattaggcaaaatattacagcaattagaattttacaaccagaattccacattgtggaagttattctctaatgacaagtcaagggggaaatgtatgcttttcttaagaaaaatgttacttttatgttaatgtttctggtaatgcacagcgacacctaatggasgcaaaccaatattgcaatccattggtgtaacaggtatcaaactctgttatggcctatagttatccccattaacagtgatactcttaatactcatattctaaccctatattttaaaccttcttgtaaaatttatctcttttcacctagaagcaatcaaactccaaacagtgctgcaggcagaaccacacatgaacaagctatttttttgagaacccttagatcaacctcaggaggaggcccaactgcctttctcccacacaacgccccttttcagcaggcagtagcaagaargaattgtcgtccaatgccccttcacagcagttaggtttgcttagagaataagttcaggcttaggccatttttataacttgcaatatgattgggagaaatatgatattggatgctaaaacaactttagygttaatctcacaattcctttyctttaattattaattttttctgactttcatagaccctcttacaacayacttaaamtttctgacatgtcctaaacattcttcctttaaacaaccagtcatcttttttaggacaagtatttaccatacaaaatcctttcttttataaaatcttcttctttataaccttctcttcatagcttaaagtggattatattatgaaccttcagtaaaaagtcctattaaacttaatgatagtaaaattttcatacttgtttcttrtccataactattactcctgccataagcaaaacaaccttgactaaatctttcctgcaattattaatcctgttataaggataataattaggcaagatattacagcaattagaattttataaccagagttccacattgtgggtgctacagtgtatacttcttttgcaaatagtagcatgactataacaattcccacaagagtggcatagtaaataatttcctttgaaaagtttacataacatttccctttggggatttacaaarttacaaatgcgattctacgaataattaaaatctccctgcaaatatgcgttaaaaagaggttttagtatctggtgatgatctttgagaggaaaggttagaaatagtgaaaagtatctggtgaggtaggagagggactgagtaagataagtagccgtcactcagttacttatctttcatgattttcagcttaagatcctctgtttcttcacattgatatggagacattcctctgagctgtcaggggttgctccctcagctcttcaggctttgacttgagtgtgatgtatccaggagttgattcctgtaacttttactgctgagggggttgaaagaagaacagtgtagggccttttccagcttgacttagggaaggagaaagagctgagagttttcaccaataccaaatttcctgggttaaataaaggtgtttctatttcttgggattgggttcttgttagttgtgttatcgtctattggaagtgagctagagagtttacatgcttaaccaatttagaggtttcctgcctgaaacaatctctgagcacattgataagtttttgtccttttccaagtgaaaagcttggcaaaggattttaaggactttccattggctggaggctggcaaatagagtttgccatcctgactgtaaccatcctgagaactgaaaagtatgcccttgagaagtggcctattttatttctgcaggggaatactgggrtttaatttctcttatgacgccttcctaaattagaaggggcttgaagcatgttgatgccctgaggcttccttgcctttgatttagctgcctgatcagctaacctattttcttcggctatcttatttgttcccttttgatgtcccctacaatgcatccctcctattgctcatggaagaaaaactgaggataataacctgctaattttgtggtgatattttataggaggtccattggcggttttccttttaaatggcagcatgagcatggagagctaagagagcrtacttggagtaggtataaatgttagctacctttccttgcttaattcaagtgctcttgtaagwgctattagctccgtcaattaagtgcttgtgcctggggagagacattatttagagtgactactgcttatcctgccttatgtacttcttgctttactggctgtttgttaactaagagctccccctacaggacagtgataatgccacatcatgtggagtgtaaacagttaaattatttcctagggttaacctggaggcttttttttgctagtagagctgttatgacgatggtttggaaacacgtgtaaacaataagttctaactgcaactaaggttgagaaaaatattggatcagagtttttcctgatatgccccttccggtcctgctgtgggaagaggggaggcctggagttaaaggggagaaaggagactggctctaatgttcagaaggaggtccgctttccttcctttaatttccagaatcacccagggctcccgtgctgtamtagcagtttgagccactggagtcggcatttgagtcycaggacccatcagtcctgctggaccatctgtgagagtggtcctgaacccagtgacctccacctctgggggcacttccatstccagtgatctgtgccacaggctggacagggtcacgctggctttgtcttgctgcctgggcactccttcttaaaatgccacaccgatagaaactagcggatgcaacttggggatcctggactttgcaagcctgcaaagttgktgctaccgtctctctccttctcctgagctttttctcttcttttgggcctccccctggtccctattataaaagaccaaagtggccacmttcaggaggttctctaaggtgctatctggtcctatagcttgcttctgtactttccttctaatantggggttctagtacagcctctctcagcctttctgtaaaggctacggaattcttatctggcttctggtctmttayagacagtttagagtaattgagagggttggtcctggttttccataggccttctaaaatgcatattaaaaagtgcttccttttccatttatcttctgagttattggggttgcaattaggggtctttaccagaattgcctctctcccaattgggaatggtgtttttgctatttcttyactttccctatctgctttcttcccttttggtgtattataggagatatattgctcatctccaacattttctgttgcttgcagagctgcctgmtttttagctgctgtgagggtctggtttaggancagcataacatccctccatggcaggtgaaatacctgagttaaattttggaaagcctctaaatacctatcagggtcattagaaaactggcctaagtctccatttatttgcctaaggtcctataatgagaagggaacttgaaggggccccaaataaggggaatcctcagatggtttccctggaggttacttctctaatttgggggaactattcttttttgggcctgcctgatatgattgttaaaagagttgggttgatcttacgatgtttgcaagggtttagtaaaaatgccatgcacttgtgcaaaagaaaatgagttgcttttctttttgaagtcctgaggttaaagaagttccagtgtttcagagtgcactccagaggggtgcaagctgaagataatctgttacccatctagaaaaagatgtgagagttcttttagtctccttcctttccatatgacccagggtgaaggacaagacaggggagcatccttctggctgttttctctccctggttcttgggtcccagcaccctgttaamtatgccacctatggtcgaaggcgtggtcctccaagctatggaaccagatgaactaagtgatgctttacccacacaaccttagcttatccaccttgtgtcattcctcttttcacttcctaaacctgtgtratctgcccggctccccaaaatatgagagactgtgtcatttttgggcaagcctcctttaatggaggcaatgtgccaaattgcctgctattatggcccatgctaaagcatttaccttagaaaaatggttccggttaacttccaaacttagaatccccttactaagtaccattttagtaggaaacagattggatgtcttaaaagaacataggaactgaggggctattttcatgctgatgggacaatatggagactaaaatttggctatggaagacattttactcctaactgctaaaggcagaactttcctgttcacagaagtagcttagagcctagtttccagtagaaaaggcacaaaaaggaaamgttggaaagccacaacgtactgyagagaacyaacaatgtgtgttatggagagaatttctgtttccactagtcatttatcagttccaggagccttttggcagagtcttcagggttttccaggcatagaactttgtcatctacaaagagagawagtttgatttcttattttcctatttggatgctttttatttctttctcttgcctgattgctgtggctagcattcccagtactatgttaaataggagtggtgagagtaggcttccttgtcttgttccagttctcaaggggaatattttcagtattcctctgccactcaatttgagcaccagtctctaccatgagatatgacatctcatctttttctttaaaaccaaagcctaggttgtacaaattaagctcagcgattggtaacagtaccctacatcacaaacaaattttacaacctttgaattaaatttatgtaccaagcacctctaagcatatatgtcaaacacctccaacctttacaacaactcggtgtgatacatttcaacattcttacttgaaggaagagaaattgtggctaaagggtgaagtacctgtaggtcagggatgggaccatttaaaaaaaaaagacagctggtggtactgtcccttaccaactcagaaacatgggggggggtgccagggggtmccgataaagcaccagcttctcagaactacatttggctttgattgactttccagtaaccttgataataacaaagatcataatttttccatctagagaaagtaatccaggaccggaaggagtctcttaaggataagctaaaacaagatactactcagaaaaggcgctaggattttctggacatacttttgagtgccaaagtaagtcttctaaacttctgaacacattcaactcaataattaaataataaagaaataggccgggcacagtgactagcacctgtaatccagcattttgggaggccaaggcgggcagatcacttgaggtcaggagtttgagacaagcctggccaacatagtgaaacctggtctctacaaaaaacacaaaaattagctgggcatggtggtgcatgcttgtagtcccagctacttgggaggctgaggtgggagagtcgtttgaacccaggaggtggtagagcatgactctgtctcaaaaaataaataaataagtaaaattaaaataacaaataaataaattagaaaaacttacttatatgataactgatrcatattgaacttcccttgtgaagatttkcctscttgtcctcccagggctttccctcatgcctccagtgtcacattttaattatctgggcacttgtctgtctttttccaagcccacaagctgctgaaaccttcttcctcracatgtggtctatagaccagcagcattggtaaaacctgggagcttgttagaaatgcagaatcttaggccctacctcagacctagtgggttagaatcttcatttcaacatatccctcggtgtttcatttgcaattaaagtttgaaaaaccccatcctagaagactaggatcatattttattcctgtttccctagtgattagcacagtgcttggtgactgkctcatgaggtgtccacgtgatgttcatgagaaaagtgaaggacttggcaatcracagtcactcaatatatgacaactattgttgcacaccaggctagcaatcctgtaaggataaaattagattatatgtgtaaagatactgacatgtggtgagaaaaacaatatttttattttattttgtagttattttatattttaatacatatttattcataatttttgcttatgtgccaagcatcttcaacctttattataacaacctgtggggtatttataaatatctttatgtaaggaagagaaattgtggctcaaaaagtgaagtgaactgctcaagatgacatacctaaaactaacaaagccaggatttaagacaattctggtttggtccaaatctcatgccatttccgttgtaccaaatggcaccatgtgaacataattttccatcatcatctccaagtgttcaataaatatttgctgaatttaattgtgctgaattatttgagggaacaaaaataaacaaatactctgtgagggaccaaaaataaatagatactctgtgagggaccaaaataaataaatactctgtgaactcaactttcattgtgttggctaccttgatcatgtgaaacacgactcttcctaaaccaggactactaagaacagggcactgcaaaatgaggtggatttggaagtgaaatagaattcccaggaactaatgacttgttaaaaaaaaatttaattttctgctgagcatggtggctcatacctgtaatccagcgactcagaagacagaggcaggaggatcacttaaggccaggagtctgagacaagcctgggcaacatagcaagaccccaactctataaaaaatttaaaaattatccaggtgtggcagcactgcctgtagccctagctactctggagactgaggtgggaggatcacttgaacaggaattcaaagctaatcatgccactgcactccagactgtgtgacagagcaagatatcgactctaaaaataatagtaaaaaataaaataacatttgctgattagaaaaatagtacacactgtttttattttgagttaataccttttttctttttgatttccaactcttaagttcaggggtacatgtggaggatgtgcaggtttgttacataggtaaacatgtgccatagtggtttgctgcacagatcatcccatcatctagatattatgcccagcattcatttgctcttctttttttttttttttttttaatggagcctcactctgtcgcccaggctggagtgcagtggcgcgatcttggctcactgcaaactccacctcccaggttcaaacgattctcctgcctcagcctcccaagttgcagggactacgggcattgccaccatgcctggctaatatttttgtatttttaatagagacggggtttcaccatattggccaggctggtctcaaactcctgacctcaaatgatctgcccgcctcagcctcccaaaatgctaggattacaggcgtgagccactgtgcctggcctcattagctattcttgatgctctccctcctcccagcccccaccctccaacaggccccaggtgtattgttcccgcaccacgtgtccatgtgttctcatcattcagctcccacttataagtgagaacatgtggtatttggttttctgttcctgtgttagttttctgaggataatggcttctagctccatccatgtccctgcaaacgacatgatctcattcctttttatgtctgcatagtattccatggtgtatatgtaccacattttctttatcccatctattattgacgggcatttaagttgattccatgtctttgctattgtgaatagtgctgcagtgaacatacatgtgcatgtatctttataatagaatgatttgtattcctttgggtatatacccagtaatggcatcgttgggtcaaatgctattgcttttgacatctttgtcatgaagtctttgcccatgcctatgtcctgaatggtattgcctagatttttgtctggggtttttatagttttgggttttacatttaagtctttaatccatcttgaggtgatttttgcacataatgtaaagaagtttccattttttccatatgactagccagttctcccagcatggtttattaaatagggaatcctttttccattgcttgttattgttgacttggctgaagatcagatgattgtaggtgtgcagttttatttctgggttccctattctgttccattggtctctgtgtctgttcttgtaccagtaccatgcttttttagttactgtagtcttgtggtataatttggagaggcctccagctttggtttgtttgtttgtttgtttgtttgttttcttaggattgtcttggctattcaggctctttttcagttccatatgatttttttttttttttttgagactgactctctgtcacccaggctggagtgcagtggtgtgctcctggctcactgcaacctccacctcccaggttcaagtgattctcatgtctcagtctcccgagtagctgggattacagatgccaaccatcatgcccagctaatttttgtattttcagtggagatgggggtttcaccatgttggccaggctggtcttgaacccctgaactcaagtgatcctcccaactcrgccttccaaagtgctgggattacamgcgtgagccgctgcacccagccccatatgaattttaaaagttttttctaattctatgaagaatctcaatagtagtttaatgggaacagcattgaatctataaatcgctttgggcaatatggccattttcatgatattgattcttcctatccatgagcatggaatgctttcccacttgtttgtgtcatcccagatttctctgagcagtggtttgtagttcttctcgaaaaggtccttcacttcccctgttagatgtattcctacatattttattcttttgtggcagttgtgaatggtagttcattcatgatttggctcttggattacctgttgttggtggaaaaatagtacatattaattgttaaacaaaattaaatagacactaaagaaaactaaaactgcctgcaatcccatttggtaatactactattttccttcaatattttgtctattcaacttgtatattttaaaattactattaactcacatattcatatgtaatacatttctaatactgctcttttcacctaataataaatcatgagctttccctttatcattaagaagttattcaaagacataattttagttactacatagtgtcccattttatggatggtccataatttattttacctttccctatttttggccacttgcggtctttccttcttttgactatggtattaaacattcttgtacataataaacattttcttagagtttattcccttaagtaaaattaataaatcataaaatatgaacktccataggactctcaatttattctgcccagttgaattctgttgagtcatttctttctacattgcctggtgttctgttaaggtttgaaaaaagtaaaatagaaaaatatatgccaaattagttgtattaattttgaattttacaacattaatctttttgtattatcattgctacaattgaaaaagataacaatccatagccagctttggataaagatcatcactgtattttttagagcgaaaacaccaaagatttctctgaagcagatctccaggctgaagtgaaaacgttcatgtttgcaggacatgacaccacatccagtgctatctcctggatcctttactgcttggcaaagtaccctgagcatcagcagagatgccgagatgaaatcagggaactcctaggggatgggtcttctattacctggtaagacctgtattcctatttcatcctgaattttccccttatacatttgattatttctctcttccggtatcagtaagttattgtgcattgagatagtctgtatgcatttggaaaggtaagggtgtaggctagagtcctacgttatttaaagattatcactagtttttatatagaaaaacactgtgtcaatcagacagtattcagtacaccctattttattactttcctcacttcaggcaatagtacaactgcggaaagaatagtctgcctaccttttttatgtcacggaaggcaggaatataacaaacccctctttctccaagatgtaaatggacttcttaggactccagcttttaccaccttagattgcccaagtaagatgttcaatcacttgacatgaaagagaattcacacccctcttccttatcaccatctctgaaccttaaacactgccaccccacaatgatgattaaccttgagctgctgggtatttcatggtgttaataaaaccaaactgatcatgttttaaaaactttaaaatggtgaaacatagaacacattcaaaaagtacagggaacagatgtatagcttaaaatgttgtctaacaaacagccatatagttgcaaccctggtttaaaagaaaaattgcwcrttaccagcactgctaawaacctcgtgcctgccttcccatcacaaaccccttctmtttctccaagatgtaaatgttttcctgactttaataacattcrttctttgtttttgtttatagtttgttgcctaagcttgcaactttaaatactagagtctagtttatcttctgtttgaagtacatatgaataaaatcatacattcttttgtttgrcttcttttgcacaggattcactcattttttagaggagcttcttttcggtcattttcattcctctatggaattccgttatgtataaatcatgaatcctatatccattctagtgttgatgaacatttaggctattctcaggttttgttttggttttgctattacaatagcgccctcttgtctgtgatttcactttccatgatttcactatccacagtcaacagcagtccaaaaatattaaatgaaaaatgccataaacaacaatttataagttttaaattgatgccattctgagtagcatgatgaaatctcctgccatctccctctgtcccatccaggatgtgaagcatttctttgtccagcatatccacactgtatatgctacctgccagttggtcacggttggtgttggttatcaaatcagttgtcatggtatcacagtgcttgtgttcaagtaactcttattttacttaataacggcctcaaagcacaaaaagcatctatgctggtgtagtgttataaactgttctattttattattagttattgttattaatctcttactgtgcctaatttatacattaaactttatcataagaatttatgtatatgaaaaaacagtatatacaaagttcagtactatccatggtttcaggcatccactgggggttttggaacgtatycctcacagataagtggggactaytgtataaataatgcttttaagaacaaccatccagtcctggaattttcttttttggaagactttttgttasygattcaatctcactactcatactggtctgttcaggttttctatttcttcccagttcagtctgggtaggttgaacgtttccaggaatttatccatttcttctaggttttctagtttgttagtgtgyagttgttcataatagtctctagtgaccttttgtacttctgtggtatcagttgaatgtcttctttttcatttctggttttatttggatcttctctctttttctcttcattagtctaacagtggtttattgattttacttatctttcaaaaaccaactttcattttattgatccttgcattgttcttttaacctctgtttcatttagttctgctctgatctttgttatttctttccttctactaatttggggtttggcttgttcctgtttttctacttcctagaggtgcctcattagattgcttatttgaaatctttctaggtttttgctgtaggcacttattactataatttccatcttagcactgcttttactgtatgtcataggttttggtatgttgtgtttcaactttcatttgtttcaagaaatttttttatttcctctttaatttctttcttgacccaattgttgttcaggagaatgttgttgaatttccatgtatttgtacagtttctagagttcctcttattattgatttctaattttagtcctttgtggtctaagaagacaattcatatgattttaattttttaaaaatgtgttgagacttttgtgtcctaacatacagtctatactggaaaatattccatgtgctgataagaaaaatatgtattcttcacctattggacaaaatattctgtaaatgtctgggaggtacatttagtccaacgtgcaatttaaatccaatgtttctttataaattaataaatttataaagaaatttgtctagatgactcgaataaagctgagagtagggggctgacgtctccaacgattatggtatgaaagtgtatctctttagatctaacaatatttgctttatatatctgggtcctccaatgttggatgcatacatgtttagactgttatagcctcttgctaaactgatccctttatcattatataataactttctatgtcttttttactactttttactttttctctgatataaacatagctcctcctactcatttttggtttctgtttgcatggactatctttttccattgctttactttcagtctatatgtgtctttacaggtgagatgagcttcttgtatacagcatatagttgggtcatgtttttcaatccattcagccaatgtataccttttaagtggaaattttaattccattacattcaaggttattactgatatgtgatggcatattcctgtcattttattaattgatttctggttgttttgtatatactttgttcttttctttctcccatcatttagcattgtggttaggttgtattctgtagtggtamcatttgagctttttctctgtcttgtttgtgtgttagttctaccagtggtttttatatcttcaagtattttcattatggcagttatcattctgttacttctgggtataggactcccttgagcatttctcataggttaaggccagtggtgatgaattccctcagcttctgcttgtttctccttcatttatgaaagataactttgctgggaatagtatccttgactaaccattgttttctttcagcacttcaaatgtatcatcccattctctcctggcctgaaaggcttctgctgagaaatctactgttagcctaatggaggtttctttataagtgactagtgactagacactgttctcttgttgtttttagcattttctcttcatctttgacttttgacagtttgactgtaatacgctgtagagaagaccttttgaattgtatctatttggggatttttaagcctccagtatgtggacgtgtaaatctcttattagacttatgaagttgttgtctattattttattaaatgggttttctaacccttttgtttcctcttcaccttctgggacaccaaaaatttgaatatttgatcatttgatggtgtcttatatgtcacataggctctgctcattcttttttattctttttttaaaaaaattgtataactgggttatttcaaaagacctgtcatcaaggtctgagattctttcttctgcttgatctactctaattgttgaagctttcaaatgtattttgtatttcattcaataaatttttcagctccagaatctctgttcagttccttttttttttaagagagagagtctcactctgttacccaggctggagtgtagtggcatgatcatagctcactgcagcctcaaactcctgggctcaagcagtcttcctgtttcagccttccaagtagctgggattacaggcatgtgccaccatgcctggctaatttttttttttaatagagataggatctcacaatgttgtccaagctggtcttgaactcctggcctcaagccatcttactgcctcagcctctcaaagtgctgaggttacaggtgtgagccatctttttctatgatatctatctctttggtggatttctcactcatatcctgaatttcttgtctgacttctttttagtgtttttctgcattctcttgtatctcaccttcttcttttttttttcttttttttctttttttttttttttttagacagagttttgctcttgttgcccatgctggagtgcaatggcacgatcttggctcactgcattctccacctcccgggttcaagcaattctcctgcctcagacatttgagtagctgggattacaggcacatgccaccacaaccagctaagtttttttatttttagtagagatagggtttcaccatgttggccaggctggcctcaaactcttgacctcaggttatcctcctgcctctgcctcccaaagtgctgggattacagacatgaggcaccacacccagcctcaatattttgcttctttagtgtcaatattttgaattcttttcccaggattttgtaaatttctttttgattgggatatgttgctggaaaattattgtgttgttttggaggtgtcatagttccttgcttttcatgtttcctgtgttcttacattggtatttgtgcatcttgtgtaacagttgctttttccaattttttgaatttgctttcataggggaggacttttcctgaaaatgtatgcatagtgttcattgggtaggatgctttggctttgattctgggcatgtgcagtagtgtaatcgctgtatgatttcttcaactataaacagcatcatttttgtctgtgatttactcagtggcttagcatgyggttgttagtggaagctgtggtgaagttttgttggggaatgggatacatgggccagtcttcgggtcccagcagtggctacagtaggctgagcatgcccgttcttgggcaccaaggtgatgtayactagcaccagtgttagctrctccaggcagaccaaytctttccaggtggcttgcctgggttctggaaatggcagtggtgggycaggtaggtgggtgagctcttgmgcacctrggcatcaggcatgtcggacaacctgcttgatactaagcagtccacgctggtattggtggtggcggtgatgggctgagcaggccagtccccagcccgcagttgacacatgtgggtggatamcagctgtggtggtagcagcagattgagtgagcccaacctcagaccccaggagaagtgctcaggtgccaatgatagactgggcagggcagtctctagggccctagacagcatgctcaggtactgggaggagtggagccagcctgagcagatctgccctcagaccccctagtagtgtatgcaggtgctggctatggtaggcagggacagggtgatccccaggctgctacaagaatgctcagatgagaatggcagcagctgagctatggccctgctactggagagggaggggctggggctgcttttttttttgaggcggagttttgctcttgttgcccaggctggagtgcaatggcacgatctaggctcaccacaagggaggcgctgctttcatttggagcagccataagcaaaaggcttttgtgggatgagggtgactcatgatttgctagcaccttggcccttgcagctacagttacaggcagtggaatttgtcctcagggtgcatgaaaatgtgtrcccacccctctgctgggggtgatagggtcactggcagtggctcccaccttggcmccagcagcagcagccacagcagctgtggtggggaatgtcactggggcttcagggatgtggagatgtagaggctgttgaaccccaaggcaagacacagtctgatggaggctgagctctccagatgatgccacactgcagctgctgaggactcaggggtttgtgggacccagtgtgagctctctctctggagtaatgtcttcatgcaatctccagccggctccttatgtyagtctcagggcctgcaaaggttagtgggctcttccatagctagtattgtaggagtccgtggtgggaaygtggatcactggagggctctcacttattcttttcccaaattaaagagcttctccagactcccagttgatccccgccaaacaggctgcctcacttccctctccttccttgcttttggtgctttccatcacttctctgttgaattccagcgttctcccttagatgatctatttgaagtgtaattatctacttgctatgttggttcctgtctgtggaagaggcgagtaccagatgccgctagtcagccatcttagagccacatccctattttatatttttttacaattctaaagaggcagaaatacttattcattcatagaagaggcactctggatataaatacagtccaygtctctaccaaattttcacagatgtgtgataytggtcacaggagccctggaataagtatgtctcaggataagagccctatatctgcgggggggggaraatcacttacagttacatgtgaaaagtggtaagtgttaacatttagcttttcctaagayatacttgatacatctgaagtcctcctttgggtaaagaacaaaatcattytcagttacaaaaatggagaaaagctgggctttcagtgcaatgcctaagtgactactcctccttttcctttcctcctgtgcttctacccagggaacacctgagccagatgccttacaccacgatgtgcatcaaggaatgcctccgcctctacgcaccggtagtaaacatatcccggttactcgacaaacccatcacytttccagatggacgctccttacctgcaggtcttaaaacttttttttttttttttamcaatgcagctgtgctggattgaaatgtcttaacayactcatgtctttaacagttatttatccttagactctgtggaacctagggycattcttatttcccagagagggagaaagaggakagagctctcaggactatccaaacaggcacaggattatcaaggtgcaaaggtacagaatcctgccatatggactgagggttgggtgagggggccttcrtgaagcatcayggctttaatgctgaamcttaaaggactagatttatatcagcaaagatgagagaggcagtaytgtgggcagagagaagagcagacacaaagcagcaggcagcctgccttctcccttccctcacgcacaccggcagggcatgtcactggagcaattgctgtaatccacagactccaggattcacagagggaaattgtgggactatacctggagccatgatgtagccagatcatagagttttctgaaggccaacctttgtgttcagtctttctcaatcaagcagcagacagatttaagacgtctaagctgggtggcaygattatagttattttttagaaagattaatacattggtggaatgcaagatggattgaaaggcaacattagagacataaaggaatragccagaatttatctttgacctatgtcgagatgtgtttctacaacttcctccaatttaaccgtctttcaaatattggatttgattgggcartctaattaaatgtagcaatatttaattgctactgtgctaccatagttgcccaatagcaattaaatatttgtttcctacaaaatcaactttactattgtaataacaaaaacaaaaactatttagtacttactagggactaagcattgttccatatgttttgcatgtrttaactcattttatccacccatcctcctgccccccagttctgctgtggaaatactagtgttatgcacattttagacaaacaggaacaaaaaggtaaaacttyatctctggtaaatggtggaactaggacttgaacccaagtagtgggactctagagtctgcgctcgtaactactacactaaagcaacaacttaagctttctctgggatctctccagagaaagatctttgctatcatggggatctttgcaatcatctagtatctaaagaagtttcctctttttaattcagtgttatttttcacatggtatttattgtaatatttattacctacataatattgcatccatacacataatattccrcccacctagttgctccaacaaaacagctcagagtcaacttttactaccttttcccttaatcttgcatttcaataatacctaaatcctgtcaataagctctggtttttttcaayatcaataaaatgatgatttattgctgccttccaacacaagaaaattattttctctacttccattctagatcacctaagccctgtaatccacagaatcttaaaatcccccgacccatacaaaagctacatgttgaaaatgtgagaatcagcatgccttctaatttttcccattcaggtcctttctgtttcatgttcctttcactttcctgatcttgtggcttttgcagctgctgcgggtaactttctgggcttcagacaatkctgttgagatcygcatggatgttggtggaagagctggctccacccggctgactcagttttaggckacttatacgtcatctctggtctcctgcagtctctgccctttcctccaagtgccttcaagggctgcaccttaatctccctcaagctacaatgaagggacaggaagtgcacacgcagagttgccttcacctcactttacattcctttccgccacaccttcttgccctccagagctttcaggccttcactgsacctcacgtgctcatctgtctcatttcctgttaccctgctttccttcctgcccctctcatacacacaggcactccacaacttcactttcttcaccccaggcttggatgcctggattcatcactccaacttccccyttggcaatgctgtcaacttccttgaatattttccctttctctactgtcactcatcagtaattcaaccagcattaaattcctctatacgctttctctgccctgctaatgggcccttgaatrcagctatagcacaacaaagcatgtgcaaatggatgcctcatatccgccagacccacctcttcccctgtattacccaaaaatcctgtttatttctaaaaagaaacatgtttatgatgcctgctttctctcccacacctcacagtatcacttacacattgtcatcactctctacctgtgcctgtgccatggtcccattcactcttggcaaaagacctactacattatgtgtgcccttctcttcatttgctggcccaacaagtgcatattaaacatytgctctaggcactttgctttgttctgagcatactatgatgtgcaaaatgtccaaaagaaagcatgtcatctacctccttcccctaaacctattcctcctcctggattgctacattaatgaatggcaycactgtctgtgagtaattttaagtgagaaagatagaagtcatcctcacacctccaccatcttccttacccagacagtatccaagtcctagaatatcagctatttccttctcaacaaccttgcttccatggtctcagttattgcctttgtcaatcttcaamtgccagagtcccctaagttttatatttccatacttagstatctacaaaccaatctacttataaaagataaatcataagtctaggtaaattctaagttccaactcaagaaagccacttgggtgattctgttgccacttgtccctcctaagatcctacttatacacatacactgaaatgcaaaaagaaataatcccataaaagtgaaaagaatggaaggaargtatttaacaaacaaaaagagagagagagattttaatgaatttatgaaattaaaaaagaaggtaggattgggctgccaaattaaacaagaagagaaattcccagttttaaaaggcaatgagrgggtggctgcagaaagacttgcagagagtagagggtggctctactttttaatcccatagaaaaggtttagaaattgtggtcttaataagctyagtaaggctgagctacttyaggaaaagtgtatattaatcacctaaaagaaatagtcaatcctaaaaattatattttatcttttaaaagttaacttttaatttagagcctagggtacaattaaagactctttattctggcagagaaaaggggatgtccactctgctracagattgtgacycaaatgatacacagattcctgggagagcagtcattttttctggacaatgcagatcccttttcactaatcttattaagagatattttgagccttgctcagaattacctagatttgtggaacaaagaaaytggagttaggaagacagatttagrgagaggatgaagataaaatcagatcagttgsaggcagtcattaatctgcttttcataagtttttttccagggaatcttcactgacattgagttagagtcattgaggtgttttcagattttctacrtggccaaaaaaaaaaaaaaagatgacaaaycaccaaaagttatgaattctatttcctttttgccctaaggctccatggagatttaagacctcaataaagtaggaaattttcaaattrtgtctttttctgacgtattcttggtttaaawatgtaattttgttagataatgtgcatgcttttttattataatgaatatgctcataaggtgtcagtgtgattctctggattaataaaacccatgccagaaaaacaaaaacaacagattccctcaatagccaataacagacctatcaatggcctagtrtgtgccatgaatctgatggtccagtaagcctcagtggagagggacatggcccaaaaaaatgggtgttcyatgaaatcycctaaataattcacaatcactaaatagarcaaaacacaatgggttttgtgccactcatgggagagatccatggcaatcaactagacactggctgtaagctagagcaagcagaaactcctaagaaagacaataacagacttaggaaatcaaaaatatctcatctgaggacactggcatgtgcctgtaatcccagctactcaggaggctgaggtgggaggatcactttagcctgggagtttgaggctgcagcaaactataatcacaccacttccctccagcctgggcaacatagtgagaccttrtctcaaaaaaattttttcattgaccatgakttgagactcacccaaaggagctaataattgatgagcctgtgaatcatacttcttaggtattagctactactgaacttcartgggcagtctgttctgatgatcttggtgagacttccagaaaccrtttaaaagagaacaaggcttctggaaccaaaaattgaaaaatgaaagaatgtgtactgccaggatataaacctaatccaaccatagargttagaccctatgattgaggcttgggagagttaaataacattgggtttttgaagctctaaacttcaaaatctctgacccatgttaagaaagcaaatttcttgaatgtccttgattagctagcaatatgtggattaatcacttaggaagaattcgttaacggtgacctggccatttgttttttgaaagtgatctttgctgtgtggatgcagcactgttayggtgtyccagwtgccattctaacccaaattaggtctttacctcagtcagtwagctagctggccatgtcaggattggtgaagttcaaaaattagtcttcataatgttaaaagccacarttcatcatgaacataagacagctattgatacctacctatrtatcaagttacacatctgcaattttttttttttgatggagtcttgctctgttgcccaggctggagtgcaatggtgcaatctctgctcccygcaaactctgcctcccagattcaagcaattctcctgcctccacctcccaagtagctggaactacaggcgcatgtcaccacgcctggctaattttttgtatttttagtggagacggggtttcaccgtgttagccacgatggtctcagtctcctgaccttgtgatccacccgcctgggcctttcaaagtgctgggactacaggggtgagccactgtgcccagccctgcaattttttaaagcaaactataggaaatgaaaaggaaaacagtcaaaggcaccctactaacagattttaactgcctttcaaagacctacgcaaaccaaacaaataaagtatacagacgatctaaacaatgtaattaataagatagactttatgcgtacaatattaaactttttccccactaatagaggacagactttccttttaagtacaccagcaacattgcttaaagttgactgtatactagaccacaataaaaaaacttaattactaaaagagaaacattacaaaatagtgttctttaaatgaagacaataaaaatggaaattagcaacaaaaatttttcaaaaagtttcattcatctggagttttttgtttwatccattaaaaactcttgggctaaagcaaaattacaaaatcaaatcatgaccctgaaaactctacatatgagaattaatggtytgccactaaagcagcattcattcagaagagaagctataatagtaaatgcgaaatatttttattaataaaagaattaaattaaacaytgaygtcgaaaacaactggaaataaatcagttggggaaagaataaaagagtaaactaaaaggaaacaggtgaattaacaaaggcgaaagcaaaaggtaatggtatggaaagcagaacggttgcaaaactagtcaaaaaacacaatagccagtgggggaggggctggtcaacaaagagacacaccacgaactaatattacacaagtgtatgcacagagacttgaaaaaccaggaaaaaaactagataattgtataatacataatttactaaaactgatgctggtagagataaatagtctaagcatgccaattttcacaggactagagaaaaattgtagagcccctgaaaaggaaccagacctatgcagtttttcacaaattttttcaaacctgtaaagaccatataatcccagtaatacttaaagttgtccagagcatagaaaaataaaaacttagaaagttatttaaggaagtatcacattgataacaaacctactaaaaattgaacaaaaatatatttagataaaaatcacttatgtatataagtacaaaaattttaaataaaatattagtacacataatccaatagctcattgaaataaatgtattggctgggcaggtggctcatgcctgtaatccgaacactttgtgaggtcaaggtgggaggatcgcttgagtctgggcaacacamgaccccatctctacaaaaagataaaataaaataaaacagtgcatcatggccaagtaagtaggtcatattccaaaactgmaaagattgttcaatattaggaatccattaatataatttattayatttataggtttcaggagaaacccatatcatctccaccctgatcaatggatattccataacatgataaaatattacttcagtgccatattggcactatatcccatatggttctatggctccaaagtataatacaatctcccaagtagctgactaggaaaggaaaaaaaaaaaagacaatactctcactctctgcttaaacttctcagtgatccataatggtttcaacctaaaatccttagcatgacctctttcccattttaaggtacaagcccagccaacctccacaggctgatctatggacactttgctccctgaatcctgttatacaacctcccagtcacccaaatttctcatgctttctcaagtattaaagcttggcttcatgcttttttatctgcctcaaattcctttctgaacattcttctctttacctggttttcccctaccgatttcattatactcagctcagcatgcctcgcctgggccttttctcttgcatacatccaaaggctctatacatgaggttcccctctcaattccccaagcatcctaggcttccttctgacttattaccatgtgttgcaattgcctgtctcttccaatggactgtgagctccttgaaggctagagtagatctcactgatcttcacagcacccatttaagtgtcatcataacagacgcttcttaaatggttaacgaaattatgattgtagaattctttccttggttatgaaatctatgaatagatgtgaaagaatctttgctcgtattttattgaggatcacaagcattcttatacaccaataacaggcaaacagasagccaaatcatgagcgaactcccattcacaattgcttcaaggagaataaaatatctaggaatccaacttacaagggatgtgaaggacctcttcaaggagaactacaaaccgctgctcaatgaaataaaagaggatacaaacaaatkgaagaacattccatgctcmtgggtaggaagaatcaatatcgtgaaaatggccatactgcccaaggtaatttatagtttcaatgccatccctatcaagctaccaatgactttcttcacagaattggaaaaaactactttaaagttcatatggcaccaaaaaagagtccgcatcgccaagtcaatcctaagccaaaagaacaaagctggaggcatcatgctacctgacttcaaactatactacaaggctacagtaaccaaaacagcatggtactggtaccaaaacagagatatagatcaatggaacagaacagagccctcagaaataatgccgcatatctacaactatctgatctttgacaacctgacaaaaacaagaaatggggaaacgattccctttttaataaatggtgctaggaaagctggctagccatatgcagaaagctgaaactggatcccttccttacaccttatacaaaaattaattcaagatggattaaagacttaaatgttagacctaaaaccataaaaaccctagaagaaaacctaggcaataccattcaggacataggcatgggcaaggacttcatgtctaaaacaccaaaagcaatggcaacaaaagccaaaattgacaaatgggatcttattaaactaaagagcttctgcacagcaaaagaaattaccatcagagtgaacaggcaacctacagaatgggagaaaatttttgcaatctcctcatctgacaaagggctaacatccagaatctacaatgaactcaaacaaatttacaagaaaaaaacaaacaaccccatcaacaagaaggtgaaggatatgaacagacacttctcaaaagaagacatttatgcagccaacagacacatgaaaaaatgctcatcatcactggccatcagagaaatgcaaatcaaaaccacaatgagataccatctcacaccagttagaaaggcgatcattaaaaagtcaggaaacaacaggtgctggagaggatgtggagaaatagggacacttttacactgttggtgggactgtaaactagttcaaccattgtggaagtcagtgtggcgatttctcagggatctagaactagaaataccatttgacccagccatcccattactaggtatatacccaaaggattataaatcgtgcygctataaagacacatgcacacgtatgtttattgtggcactattcacaatagcaaagacttggaaccaacccaaatgtccaacaatgatagactggattaagaaaatgtggctcatatacactatggaatactatgcagccataaaaaatgatgagttcatgtcctttgtagggacacrgatgaagctggaaaccatcattctcagcaaactatcgcaaggacaaaaaaccaaacgccgcatgttctcactcataggtgggaattgagcagtgagaacacattgacacaggaaggggaacatcacacaccagagcctgttgtggggtggagggaggggggatggatagcattaggagatatacctaatgttaaatgacgagttaatgggtgcagcacaccaacatggcacatgtatacatatgtaacaaaccttcatgttgtgcatatgtaccctaaaacttaaagtataattttwaaaaaaaagtaaaagagaaaaaaaaaaagacagaatcttcgctcatgcacttacctgctttttcttctgtttactcaggaataactgtgtttatcaatatttgggctcttcaccacaacccctatttctgggaagaccctcaggtatgattgtcccaactgcacccagtggcatctaagatagcaccaagagggaagagaagcatcttcacagttgagagagcagttaggataacgatctgtcatttagaaaagaacaaaacagaacaaaaaccctatgcttttaagagaaaactacatttgcatttataatcatcaccagagttccatgatgatgccttatcaacagaagcatatcatcccctgggaagtagaggggtgtgattagtcaactgacactgcactgtttaaccaccttgctctctgctttcattcatgtctgtagtcaatctagtcacagacttgtgaagtgtattgcaaatctcttgttactggtcataattaaagtagcaagattatggactctttgctttttttaagatttgagcatatttgaagttagtctctaggaatatcactctccttcacactcagtgctaacctgagagtgaaagggagagggggcctgggagagaacaagcacactcctgggctgcaaaccagcgctcagaccaaccccacagcccaggagatactaatcggcagcctctcacagagactttcgggcagaagctgaacaacttcagcttgtgacttcagcttgtgaattgccaccccttttttctttgcccaagtcactggctcagtccatttggaaaccaagacaaatagaaaagataataatttgatgctttgcccatttttatatgacagaggcacgggtttactgtgaagggaaaataatgaagtcactatttgctcaagtcagattgtctggatgatttgctgctgcttcttactatcggggcctgtttaatctatcactaggttatatagcctctgctttcttgggatatattttcagtggtaggcttttggggaacatcaagcaggacttgtagtctccagacattrtaagttcctaaaattagctttggaattctgttaacaatatctatggatttygtttttgtttttgtttttgttttttgtgggggtgggctggagggaktaggactgggatcttcactctcattacaggtctttaaccccttgagattctccagggaaaattctgaaaaaatacatccctatgccttcataccattctcagctggattaaggtaaagactcaagctggtgaacttgatggaaatgtgtaatagtgcttacctgacaagtgcttcttcccttcaggccctcagttagctgacactgctgttgctccccattattttacctggcttgtcttctcttgtgaccagtgcatttagttggtacccttttgagcccccaaagggaccggttaatgttacaaagaacaactctggtccttggcatatgggtgtgaattgatgaaggccatcctcatgacaggcccaaagactacacttaaacttgcaatggacaagcattgggaatgccatcttgttataggaacaaggcaacattggcacctcccagctcttgttcctacagagagcaatgttgttctaaagtccaagtttccctttggtttggtatgagagacacccgatttaccaaatgacaacacaatccactgagtatgccaggttattgttcttatgcctaaggcttcaactgcacagcctctaaataatagtaagaagtagcttttccttatcatgatataaggaaggttttcaagttacgtggaccttgcagaatcaaatgttgatagarctcactaccacttatttgtaagatgggccccaaaataatagagccacagtttgcaggtcttgacattaatggactttctgatcggggcttacttaacttaaaataaaacatttgctggattctgccacattggaatttgtttaaaacatggatcttggctgggtgcggtggctcttacctgtaatcccagcactttcggaggccaaggtaggcggattacttgagatcaggaatttgagaccagcctggccaacatggtaaaaccctgtctctaccaaaaatacaaaaatattagctgggcatcatggtgagcacctgtaatccagcaggatgacagaaaaaaaaatggatcttgtttccctacaaaagtcgtcatatataaaaagattggcgtatgttgttaataatatataaattcattagatgccatgttttctttcttggtatccccaggaactgcattgggcagcattttgccataattgagtgtaaagtggcagtggcattaactctgctccgcttcaagctggctccagaccactcaaggcctccccagcctgttcgtcaagttgtcctcaagtccaagaatggaatccatgtgtttgcaaaaaaagtttgctaattttaagtcctttcgtrtaagaattaatgagacaattttcctaccaaaggaagaacaaaaggataaatataatacaaaatatatgtatatggttgtttgacaaattatataacttaggatacttctgactggttttgacatccattaacagtaattttaatttctttgctgtatctggtgaaacccacaaaaacacctgaaaaaactcaagctgacttccactgcgaagggaaattattggtttgtgtaactagtggtagagtggctttcaagcatagtttgatcaaaactccactcagtatctgcattacttttatctctgcaaatatctgcatgatagctttattctcagttatctttccccataataaaaaatatctgccaccttctgagtcccatagtctctcattataccctgtagggaatggataaattgatgacaatgtattagaaagcctagacacttaagaggaattccaaatacagaaaagtctgatatatgaattcccatttggaatatttagaggaattccgaatacagaaaagtctgatatatgaattcccatttggaatatttagaggataccatgcagtacggaactcttgctcaacatggagtaacatgactatggaatgtttcagcagagacggggtccagatagaacaacctaatcccccatgctggtgtgtgctataatagagatacagaaattcccatatatctgcagtggaaaacacagaatcattaagagagccaagaagcatcacaagagagccaagaggaatcattaatccaggagtgagtgactgaaattaaactgtgctaaagtccatgcatcttttgaggttgtagggtgggcagtgggggagtggttaaaataccaaataactttagactttatcaagcatgaaaaataaaattctcaaacatagtaactaaagaatagaagtaaaatgtataaatttgaaatctgtagaggaaaatacagaataagaaaaaataggatataaagagccaaaaaaaaaaaaaaggccaaaacatactcccaaaaagaagggggaaaagaagcatagaaaaggaaccacaaagtaaaatagtagaaacatatgcaaatacatcaataattaatgagtagaagataatcaatggatagaagaactcacaagttaggacgcagaggttgtcagattggactttttaaattccagacattactaaaacgtaagactatgaaattactgaaagtaaaaaggtggtaaatatatgccagaaaaatactaatggaatcagagtaactatattagtattagataaaatagatgaaataaaaacaaaacattatcagtgatagtcactatgtgtgattcactatataaacagaattaaaaacaaaaaccatataatcatctcagtagacgcagaaaacgcttttgataaaatctaacatctcttcatgataaaaaaaccctcaacaaactagacattgaagaaatgtacctcgaattaataagagccatctatgacaaacccacagccaacatcatactgaatgggcaaaagtgagaagcattccccttgagaactggaacaagacaagatgcccactatcaccactcttattcaacatagcactggaagtcctagccagaacaatcaggcaacagaaaaaaataaaaggcatcaaaacaggaaaagaggtcaaactatctctcttcatggatgatatgattctataccttaaaaaccctaaagactctgccaaaaggcccttggaactgataaatgacttcagtaaagttttgggataccaaatcaatggccaaaaatcagtagcattgctatataccaatacatccaagctgagatcgaaatcaagaacacagtccctataccatagctacaaaaagaataaaatacctaggaatatatctaaccaattagctgaaaggtctctacaaggcgaactacaaaatgctgctgaaagaaatcagagataacacaaacaagtgggaaaatatttcatgctcatgaattggtagcatcaaaattgttaaaatgaccatacttcccaaagcaatctacagattcaatgctattcctatcaagccagcaatgtcctttttcacagaactaggaaaaaaaagagcctgaataatcaaagcaatcctaagcaaaaagaacaaagccagaggcatcacattacccacttcaaactacactacaaggctacagtagccaaaatagcatggtactggtacaaaataaacacatataccaatggaacagaatagagagcccagaaataaagccatacacctgcaaccttctgatcttcaacaagcttgacaaaataagcaatggggaaaaagactctgtatccattaaattgtgctgggataactggctatctatatgctgaagaatgaaactggaccccatctatatgctgaagaatgaaactggtccctttatacaaaaattaactcaagagggattaaagacttaaatgtaagacctcaaactataacaattctagaagaaaacctaggaaataaccttctccatttcagccctggcaaagaatttatggctaagtccccaaaagcaattgtgacaaaaacaaaaattgataagtaggacctaagcaaactaaagaaagagcttctgcacagcaagagaaactaccaagagagtaaacagacaacctgcagaatgagagaaaatatttgcaaaccatgcatccgacagaggtctaatatccagaatctataaggagtttaaacaaatcaagaagcaaaaagcaaagaactccatgaaaaagtggacatgcatgtctttttttctaaagaagaaagaagacacacatgtggccaacaagcatataaaaaaaaagctcaatacactgatcatcagagaaatgcaaatcaaaaccacagtaagataccatctcacaccagtcagaatggcttttgttaaaaagtcaaaaaataacagatgttggtgaggctgtggagaaaaagggacacttctacactgttggtaggaatgtaaattagttcagccactgtggagagcagtttggagatttctcaaagaactaagagctgaactaccattggacccagctatcccattactgggtatatacccaaaggaaaataaatcgttctaccaaaaggacacatgcacccaatgttcatcatcatgctattcacaatagcaaaagcatggcatcaatgcagatgcccatcaatggtggattggacaaagaaaatgtggcacatatacccaatggaatactatgcagccataaaaaagaacaaaatcatgtcctttgcagcaacatggatctagctggaggccattattctaagctaagtaacacataaacagaaaaccaaatatgacatgttcttacttataagtgggagctaaatattagacatatggacacatggacataaaaatgagaaatagacactggggactattagaagggatagagagagagtgacacaagggctgaaaaactacctattggctactatgttcactacgtgggtgacaggttctatcataccacaaacctgagcatcacacaatatgcccaagtaacaaacatgtactacactacaaggctacagtagccaaaacagcatggtactggtacaaaagtagacacgtagaccaatggaacaaaatagagagcccagaaataaatgcatacacctacaaccctctttaatttgacaccaaataaaagtggacccacaggaagaaataaagaccatcagatgcatacatacacgcatataaacgtgtgtatgtatatatacatatacatagaatatcttttaaatcttattttcttaatttcattaaacaatatatgactttaaagaaaaaatcaaactgtattgttgggcttattatatatgtttatatataatataatatgtaatacttatatattatataaatatattatgtatatttatatataatatattatgtatatttatataatatattatgtatatttatatataatatgatatattatattgtgatattttatatataatataatagtatatttatatataatataatatattatattatatataaaatatcaccaataatagtaaggatatgaaaaaggggaaatggaaatatacttttgcaaggttgctatattttacctgaaataatttaacataaacttaaagaaggtttaaaaccagttaaactgcatattgtaatccctaaagcaaccactaaaaagtaatccaaagagagagaactaataaatcagctgacacattaaaatgaaatattgaataatacttgattaatacaaataatggcatgaaaggataaatagggaaatatataataaccagatgagacgaacagaaaaaaatagcaaaatggcagacttgaattcaaccacatcaataattacattaaagattactagactaaccactccaatcaaagaaagagactgatgaactggattttttaaaaagcagggactgacagcctgtgtgttatactgaagagatgaacttcaaatagaaagacaaaaatagctttaaaataaaaacaatagagaaagctatgttatgcaaacagtgcgcaaaagaaatatggagtagctatactattatcagacaaaattaactaccgataaagaatattatcagagacaaggaggaacacttcatgataacagaggatcaatgcatcaggtagattatgtgcttcataacagagcttcaaattacatgcagcaaaactttcagaaataaggaaataaatacacaaattcaaactcacagatggagaatttagcaagtctttagaaatcgatatacaactaacaaaaatatagtaagaatactgaatatctgaataacactaccaatcaccttagtctaattgacgtttatagaacattaaacacaactgtagaatacaaattcttttatttttttatttttttattttattttattattatgctttaagttttagggtaaatgtgcacaatgtgcaggttagttacatatgtatacaagtgctatgtgggtgtgctgcacccattaacttgtcatttagcattaggtatatctcctaaagctatccctcccccctccacccaccccacaacaggccctggtgtgtgatgttccccttcctgtgtccatgtgttctcattgtttaattcccacttatgagtgagaacatgcagggtttggttttttgttcttgcaatagtttactgagaatgatgatttccaatttcatccatgtccctacaaaggacatgaactcatcatttttttatggctgcatagtattccatggtgtatatgagccacattttcttaatccagtctatcattgttggacatttgggttggttccaagtctttgctattgtgaatagtgccgcaataaatatacgtgtgcatgtgtctttatagcagcatgatttatagtcctttgggtatatacccagtaatgggatggctgggtcaaatggtatttctagttctagatccctgaggaatcgccacactgacttccacaatggttgaactagtttacagacccaccaacagtgtaaaagtgttcctgtttctccacatcctttccagcacctttgtttcctgactttttaatgatcaccattctaactggtgtgagatggtatctcattgtggttttgatttacatttctctgatagccagtgctggtaagcattttttcatgtgttttttggctgcataaatgtcttcttttgagaagtgtctgttcatgtcctgcgcccactttttgatggagttgtttgtttttttcttgcaaatttgtttgagttcattgtagattctggaggttagccctttgtcagatgagtaggttgcaaaaattttctcccattttgtaggttgcctgttcactctgatggtagtttcttttgctgtgcagaagctctttagtttaattagaccccattggtcaattttggcttttgttgccattgcttttggtgttttagacataaagtctttgcccatgcctatgtcctgaatggtaatgcctaggttttcttctagggtttttatggttttaggtctaatgtttaaatctttaatccatcttgaattaatttttgtataaagtgtaaggaagggatcca

SEQ ID NO: 93880 - DNA, 19314 bp, Homo sapiens
gagagagagagagattcagtgagtcaaagataaatgtcaaggaggacacagagacaaaagacaattcaaagaaacagagagagggagatagaagcagaaagaataaaagacaggaaaaaagtttcagtgagacagagactgagaaagtgacatacggctgagaagagaatcaagaggaacccaaagagtggacgcacccatggctcacagagaaatccaactagacaaaaagttggaggtggagatgaacaaagagaaaggcaacgaaacaaagagatacagggacaagagagaaacccaggtctaagtgggatagagagaaggagatttgtgctccagagggtgtgtgcatgaaatggaacctgggtcattttttgcctagtcacatggccctccttctgggactaagaaatgtgatgctgccagaatattttttttttttgagatggagtcttgctctgttgcccaggctagagtgcactggtgtgatcttggctcactgcaacctccacccccgcccccgggttcatactttgttttgtttttatttttaatgtttttgatttaaaatggtttttttttttttttcctgagacggagtctcgctctgtcgcctaggctggaatgcagtggcacgatctctgctcactgcaacctctgcctcccaggttcgagtggttctcctgccacagcctccccagtagctgggactacaggtgcacgcccggctaatttttgtatttttagtagagacagggtttcaccgtgttggccaggatggtctcgatctcctgaccttatgatccacccacctcagcctcccaaagtgctgggattacaggcatgaaccaccgttcccgcccggccttaaaatctgtttcaactggtataagttatagctactactgcttgctgttggtttttgtctacatggaatatctttttccatctatgtactttcagtctatatgcatctttacaggtaaaatgagtttcttataggcagcatatagttgcatcatgtttgtttgtttttgtttgtcttgtttttgagacagagtccctactaaaaatacaaaaaattagccgggcgtagtggtgggcgcctgtagtcccagctacttcagaggctgaggcaggagaatggcatgaacccgggaggtggagcttgcagtgagccaagattgtagcactccactccagcttgggcaacagagcaagactccatctcaaaaaaaaaaaaaaaaaaagattgcaccattgcattccagcctgggcaacagagcaagactccacctcaaaagaaaaaaaaaaaaaaagctgttcatccctatcatctatccaacttctttcccatctctgaactctaagtcctgccattttactggtagggaggaacttcatggccatggatgtgagctatccaaacactcagaaaaaaagaatcttgactgtcttctcttctttgaccttcttcactctattttcagccaacattcccacagccccaccccccaaatccttgtcatcaatctgaaatgtgaaacacagacatttcactctctggccacaacaactagtaccccaactcccccactgcttcattgccaatggcatgaggggtatactggccaactaggtctttggttaagcttccaaaaagtgcaaacactacagaaggtcaagtctccctcctattaaaagacttttttttctaacattttgaaatcctttgttacatgtttacatggaagtatttgaagaaacacaagagagtacaagcagtttttctaatgtttcataaagaaaaacaggtggggcctagcagtccaaagtggtgattaacagcatgaaacttacattcacagccaggcatggtagctcatgcctgtaatcccagcactttgggaggccgaagtgggcagatcacctgaggtcaggagtttgaaaccagcctgacaaacatggtgaaccccgtgtctactaaaaatacaaaaatgagctgcgtctggtggctataatcccagctactcgggaggctgaggctggagaatcacttgaacccaggaggcagaggttgcagtgagccaagatcgcaccattgcactcgagcctgggcaacaagagcaaaagagcgaaactccatctcaaaaaaaaaaaaatttaccatcacacaagaccatactaagactctacactcattagctgtgaaatgcagaagcaagtcacttatgaccggctttgggggaacttatctaactcatttgcaaaatggagatgataaagctaacctcagtcttgcaatcaggagttcaattaagattatgctcataaaaagcttcctgcagttctgggggttttttcaagcagataaatggagctgggataggactgttttaatccaaacacagatgagcacaggaaaatatcacatgttcacgtgtatgcaacatggcccacaagtctgcacacacacaccagaatgaacacatgaaaacatccacgtactggccgggcacggtggctcacacctgtaatcccagcaccttgggagtcccaggcgggcggatcacgaggtcaggagatcgagaccatcctggctaacatggtgaaaccccatctctactaaaaatacaaaaaattagccaggcatggtggcaggcgcctgtagccccagccactcagcaggctgaggcaggagaatggtgtaaatctgggaggcagaggttccagccgagaccatgccactgccccccagcgtggggacagagcaagactctgtctcaaaaaaaaaaaaaaacaaagaaaaaaacatccacatacttatatgtagtcacccaattgtgaatgtatacacacaaatatgaatatgcagcattcatcttgttctacacagaaatacacatcgtagacacccctaaatcatgtgtgcacacatgctgtatgcagagacagacacagattggcaagcattgagaaacagtgccacaccctgtcaggcacacacacacatgtgcatgtgcagacataagttggaatggatacccattatcaagcacaaacatacacaccacaaagcctggtgcacacataaattcatgtatcaacatgaacatgctgaaacatacatgcacgtagacactaaaagcatgcacccagaatgacacacacacagttgtataaatgaggataaacatggcagaggcatccaggagaacccactggacaaaatggcacaaaacaaagatgcacgagcacacagggtgattgaggggaacactgacttgcagggaaggagaaagagaaagatagaaagatgggatccaagacaagcatagacagacaggtgggcaaagtcctgtgcagggctccagggccaaccagaataacctgagagtctaatgctggcctgtccttccgcagatactgcctaactcagcaccacactccaggaggccatgaaggattaatttcctattcacagctccatggggtaaagcttggctgtgctgaggaagggatggcgaaggaggttcccaaagactctgtccctttcctccttcccaaaggaaaagatttgtgagctttagactagagaatgtaaaagcaaggaatgtgcttagggaacatctcatccatccgcttcatcctacagattaaagagaacaactaccattcattgagcacttactgccatgtacctcatctgcattaacacttatacttctcccctaaatagccaaagaggtaggagctgttcttggctccataagactcagagagatgaagtcagctgttcaaagccacacaacaaagaaaggataaggttaggattccaatccaggccttaatcattgcaccatccattcagaaagggaaactgaggcccagcaaaggaaagggatcttcctgggctcgccactaactcactctgaaagcctgttcccaagacactgcccactgggacaagtccctcccacatgatttcagacaccattctctcactccatgctctagggtaatcaacaagtccaaaattcattgacctctatgtccacaaatactagagttctcccaacctgtctctccccatcccctccctggccaggtcatggcaacctgctgatcactcagtgcacttcctagtgccaaccccagtgagaaacaaactccccagatttctgtctcccacctttttaagaaacacgaaggaaaaggaggagccaggcccaggtgcaggctggtgaacaggattagagcgattgatatctgccaagctggtgctaatcttccttcccacctcttcccctccaaaatcaacaaacaactttcctctctctgccttgttctctgacctttgttccctccacacaggtctcagagctcagcatcctagaacagtttgagcaagatgtcagtcctgggggtgccaacctcacccacctccacttgtccaaagttggtgacccagaggacaggtgcaaccctaaatggtccaaccaccacagcctgtcctgtggccatctggggcccctctcagggtctggctgaggctcatctcagacccacataggaccaatatcagcacctgcctcatgctcatgtcacagcccactgggaccaacctcagaccctatatggtgccacccttacgccctcctgaagcaggacactcttatgccctcaatgacacctgagacaacacacagagccctcttggcaccaaacatgacttcaatattctcctggtgtcaagttcagtgccaacttgtttcccatcctcgcatacacctgggggcagtcccaaagccaacacgatgcctttccctccctggccatacctgatgctgatatcagaacccrccaatgtcatcagtgtgtccactgctgatgccagtcccagcactcacctcctgctaaggctggcctgcacttgactcccagggtgatctaggccagtcaatgaaggggggtgaggagaaagttcacatcccagctccctcacttactccctgtgtgacctcactcaagaggatttatggagtctagatctgctcatcttcaaaatgaggatgatcatgatgaaccaacctcattgttacaaagattcaaccagatcatacacacctagacttaatcttcccgtatacgaccatgctcaccaaagggtaactgtcctgtttactaaggaagaatttccctgagggaaggacaggagggctactcatcccttctccactcacacccaccccaggatctgcctctgtgcctaatactggagtttaccccaatctcttctgccactgttccctctgcctgctaatagtagtagcccctgacaaagcaggaatcgcccttaaaggagacttaactcaccctcaaatgtgatcttctcttcccaaacactccctttccactggcaggaaaaccaaatccagaaaggggaactaagtacacagagcaggagagatgggagttcagggccactcacacatgtcccctgcccactgtctgttttctgtcctctgtagatctttatataaaatgagaaacataaacaacaatcataatattaatagggatgatacaatcaatctagtgggtttccctgaggatctgggttggaaaccagcggacaacccttgggacacttgagatttttccaccatttgggggttgttattactatttctccagacctagccaatccctctgccaaccgctaactccaggtactcttctccaggtgtggggaaagttcccctgaaatatggccctggtcttccacccctttcccaaccagagatgggcagtggaggttccatggcacccatcctggcctcactctgaggttccaatgaggattctgggcatcaagagatagctctgggcaaaagcaaaatcaagtcagcccctgggcccattgctgggctgctgggctttctgggagcacctgctggcttgctacacactcctcctcccagaaactccacacccacagccctgggtcttcctagccccgagactttcaagtccatatgcctggagtcccccctcctgagamccttaaccctgcatcctccrcaacagaagaccyccagatgcacagccacacttccatctcaccctaataaaacccagacctttggattcctctcccttggaatgcccaaatccacaactttggggtgcattctcactctcagaccccaaatccaaagcccaagtgctcccctatgcaaatattccaaactcttcagttctacagyttatckgttgccccctcctaaatccacagccctgcggcacccctcctgaagtaccacagatttagtctggaggccccctctctgttcagctgccctggggtccccttatcctcccttgctggctgtgtcccaagctaggtggcattcatggtggggcgtgtagttgggaggtgaaataaggtgattatgtaattagccaaagtccatccctctttttcaggcagtataaaggcaaaccaccccacccatcaccatctgtcatctcactaccaccatgctggcctcagggctgcttctggtggccttgctggcctgcctgactgtgatggtcttgatgtctgtctggcagcagaggaagagcagggggaagctgcctccgggacccaccccactgcccttcattggaaactacctccagctgaacacagagcacatatgtgactccatcatgaaggtgtcccaaggcaggaagatgggtggcacagggtgggggctgcctagttggctggggctttgtggcaggggattgaccagtgtggaccagagtcttaggaaagggagttttggagtttcagcatccgggtcctagccaggaaagacaggatcttgggatgtccagctccctgactgtgagaacctgggggtgaaggatcccagtacttgacatctcggtgctgggccccattcagagtgggggctgctccctctaaccactcccactcgcctccatcagatcagtgagcgctatggccccgtgttcaccattcacctggggccccggcgggtcgtggtgctgtgtggacatgatgccgtcagggaggctctggtggaccaggctgaggagttcagcgggcgaggcgagcaagccaccttcgactgggtcttcaaaggctatggtgagggggtgcccaagatggggaaggtggccaggcggacacgatggtctcagtgttgccagccttctccctgactctcctgcccactggaggctatggcagaacccccggtctggtcttatctccccatctcccttcactgtggcctctccatgtgtatccctcacctgtctccagcgtccctgtcctgatttctccctgcctctctctgccccacctccttattctctctcactggagtctcctctttcctctctctctccatctctgaggacatcctgggtttctgttttccagccctggtcctctgtcttcatttgtctttttgttgctctcagcttctgtgcttctccatgtttctcctctctccacttccctctctcactttttcctctcccttaggatttcatgctattcttacttccacatctccagcctccatctcctggtaacagtctctcttccttccagaccctctctgtttctgtctcagtatttttctctcttctccagctcagcttaagaatgtttcaccatttttatttcctcctcccagatctccccatatctcacttcccctccctccatcctcttcctccatctctctctttctctccccacttcctacccttcctccatggagtatccccttatccctctgtttctctgcgcatctctatctggcctttctgtttctcttctgattctcttattctttctacccggtctctctctctctctctctctctctctctctctctctctctctctctctctctctctctctctccctcgtgtttctctgactgagtttgcacctgtcctgggcactggcactgaatccatctctctcccaccccactacccctctgctccacccttggggagccccttggaactggtccgctcmtgccaccgccgccccctgacctctctccacccccgccttsacctccccaggcgtggygttcagcaacggggagcgcgccaagcagctcckgcgcttygccatcgccaccctgagggacttcggggtgggcaagcgaggcatcgaggagcgcatccaggaggagbcgggcttcctcatcgaggccatccggagcacgcacggtgagtaaggttccccgmgtgcgggggcaggagaaggaaaacacccaggacgaggaacccgcgcgcgttctgcctgcggatggggactaggtggggaaaggcgcccgcacttccagccctggagtctggcgctgggaatttggctcaacaaggccctgcctcctggaattctgattctcctcagacctctgagttgactctctccccaacccccttctccctccacacccgcaggcgccaatatcgakcccaccttcttcctgagccgcacagtctccaatgtcatcagctccattgtctttggggaccgctttgactatgaggacaaagagttcctgtcactgctgagcatgatgctaggaatcttccagttcacgtcaacctccacggggcaggtaactggctgcagcccggcccgtgacgcccctaccacaacctgccaactgctcccctacctggagacaggtgccccaaactcccaccccgctccagacagtgtcccctcaaaatcagcccccgatattggacaactggacagttgcaccagaagcctgtctccaaggacacctggatagctcaacagatgctccccaaaacagagcctgctggtaggatrcataccctcagctcagctctctcacctgggcacrtgttcccatccccaacttaccgtaatttctaacagatgctccctacccagttcttctgaatattttaacacctggacaartgactgcgtcaaccsgcctcctgcatrcctgaacacctggtgctgcaaaatccagcccatcataatcatttcacatctacacaaatgtcccagattagcccactggaatatctggccaagcgccctctacttcacccacttaaatrcctgaaaacatggacagctgccctaaccaacaccttaaacacacaaatatctagacagattgttccctgacacacaaataagtgttccccaaccctttccaatcacacaccttacagaggtgctccctgtgcatcgcacttggataggtaaacacctcaacaggtatcccctgcacttcaacatcttcaccagccccactttaatacctgaacacctgaacaaaagcccccaatccagacccagtaagtatctggacagctgtctccaaccaagcctacttgaatgcctaaatacctagacaggtgacactcacctcataccagccccacctgaagagctaaacacctggacaggtgtcttccaactcaacttcatttgaatatctgaacacttagatgtgtgctccaatccagcctcatttgcatacctgaaacctggatatatgcctcagttcttctcacctaaattactagaccgtggccctggtacctaaccttcctgaaaacttagatataagttcctatccgaccccactgaaatacctaaacaaygagacagatgcctttaactcagttccttccttgctatgaaacaaatcccattcccatcagctcctgccccgtgacagctgtccttcccttcccatcctctctctgcaaccccagctctatgagatgttctcttcggtgatgaaacacctgccaggaccacagcaacaggcctttaagttgctgcaagggctggaggacttcatagccaagaaggtggagcacaaccagcgcacgctggatcccaattccccacaggacttcatcgactcctttctcatccrcatgcaggaggtacaccccagcagccagtgcggggagrtgcaaagccaggcagagggaaatcagactgggagtggggcgggcagacgacacagacccgttcaaattagccctcatcataataatcctcacaattggctgggcgccgtggctaacagcctgtaatcccagcactttgggaggccgaggcaggtggatcacctgaggtcaggagttcaagaccagcctggccaacatggtcaaaccctgtctctactaaaaatccaaaaattagctgcacgtggtggcgcgaaggggggcagaggttgcaatgagccaagatcacggcactgcactccagcctgggtgacagaatgagaccctgtctcaaaaaaaattaattaattgtttaaaaagtaagtgagcctgcatggtcatgcgcgtgtgcagttccagctactcaggaggctaagggtggaggattgcttgagcccaggagttcgagtccagcctgtgcaacttagcaagaccaagtcagtrtaagaaaaaaaaaactgacagctaagttgataattraaggacagatggtcagcaasgtaaagaaggtgagaagraagagcattttgggcaragccagcagccagggcaagggctggaacctagagcgagtctggtagatctagggtccctctttccacctttggtcygraccaaagagaggtagatccaaaggaaaagccctagaagggccctgagggcaagaggagtgaggttggcctaaagccccctctccctgcaggaggagaagaaccccaacacggagttctacttgaagaacctgatgatgagcacgttgaacctcttcattgsrggcaccgagacggtcagcrccaccctgygctatggcttcttgctgctcatgaagcacccagaggtggagggtaaggctggagggggacggaagtggagggccccagaccctcaaaattccccttcgactggtgcaatrtccctacctgtcccagatcccaggaccctgagacgtgccttgctgtccagagacagggcaacattcagctggtaggcatcagctgagtctcattagctattaaaatattgaaaatgtctgcactgattggtcagtcacttctgtcccaagcccactgagtgcccgctgcccsttcccccgggtcatcycctaagttcctccctgtgcctcccctgtgattctggcacaacctggttaacaggatcctactccaacaatgcgaatggccgatgtctgttctgttatgaatgctctacctccgtctcataggkggagccgtatcatccaccccgttttacctattcrgactatcatttcctgctctgagacyccyagatacctaaacacattccccctcctcccccagccaaggtccatgaggagattgacagagtgatcggcaagaaccggcagcccaagtttgaggaccggaccaagatgccctacatggaggcagtgatccacgagatccaaagatttggagacgtgatccccaygagtttggcccgcagggttaaaaaggacaccaagtttcgggattttttcctccctaaggtgctatcctccccaccccctagactacggggacttccagcccttctctgtgtccccagaatcctgcccccattagaagctttctactcactgtcccactccctcaatcagtcaaaaaggacttccccaaccaccacatccattccacctttccacttagacactcctgagtcctgcatctccccagactctttgtgtcgggagaatcaaactcaagttccaaaacttcctatcttaagaaacagaagccccctttccattaggccttttgtcttagggacacaaatttcaggtcccccaaacaacctgcgtagcaagacatggaccccatgtctcccaaacttcctgtttcagagatgtgaaccttctattccccaaagctcctccttcacaggaccccaactcctccatgcctgccacttccccttayctggggcacmcyagttccctctccagcccctgtgtactttcaccaatccccyraccykcctcatcacacacaacttcctcctccctaccagggcaccgaagtgttccctatgctgggctccgtgctgagagaccccagcttcttctccaaccctcaggacttcaatccccagcatttcctggatgacaaggggcagtttaagaagagtgatgcttttgtgcccttttccatcggtaagagaccactgtttgctgccaggccactgctcacaccagcaggcgcctccctcacccacctcccctctctgcggtgtagcctggtatttctccagcttggaagttcctgttagaatctacccttgagccagcagctgatacttccttaactaccaagcacccagtacctgcacccaggtaaaaggaaaggaaacatctttccccgtagatgtatttctctagggtcacacagcagattcctcagatccgtaaaaaggagatgacggcacagcagtcatatttgcaagtgtatctggcaagaaggacatctaaacctcccattgctacacctggcatggatcaccccatctatgatggatgtgtgacattatgcctttttcaaaacccatagaactgtataacacagagtaaaccctartgtaaactatggactttgttagtaataatatatcaatattggttcaccattgttacatctcttrtagaaagaaactgaggctcagggaggatcagagcctcctctgaaactctctcaggccataatattccacccctcctccmtgggagagccgcagctggaggtcggtastggggcgaggctgcactgagagtgggcttcacctccacccctcccgcctctcctcctcaggaaagcggwactgtttcggagaaggcctggccagaatggagctctttctcttcttcaccaccgtcatgcagaacttccgcctcaagtcctcccagtmacctaaggacattgacgtgtcccccaaacacgtggkctttgccacgatcccacgaaactacaccatgagcttcctgccccgctgakcgagggctgtgccggtgmaggtctggtgggcggggccagggaaaggcrgggycargrcsgggttcgcggaagaggcgggyataagamtgggggsargatgcgggaaaggaaggggcgtggtggctagagggaagagaagaaacagaagsggctcagttcaccttgataaggtgcttccgagctgggatgagaggaagggaaaccttacattatgctatgaagagtagtaataatagcagctcttatttcctgagcacgtacccccgtgtcacctttgttcaaaaactattgcacgctcacctcacttaattgccacaaacctctgcgaaggggaaaagcgttcatgcccattttacacgtgacaaagctgaggcttagaaagttggctctatctgatgtctcacaaaacataagtgcccagaaaatctttgaacacagatctgtgcccatagccctctagacacattcttaaaaaccacccattcctcacgtaaaacagcttagtatagcatcacatggcctgaacatccctgtcctggggagttttccagagacctggcgggtggctgtcctgccttcactgcacacatgcccacactctcacctactcaacatgctttgaatacccgggtgtaatctgtgcttgctaccagataaggccactgtagcccattcagagtcagtccagggacacaacgagacatgaatggacatacagagtcagtccattaacaattttttgcagagcagaagtttttaattttaatgacattctgtcaatatatcccttaatgaagaagttgaaggaaagaatcacttacagagaatgagagaactctggatcaggacatagccatattcatgtgtgtgatcatgttcagacatgcatgtgagcatatgactgcatattctcctccgtgtatgcatgaaacatattccactatgggttctgaaggctgggctctcctgatggatctggggtctgttgtaagacccagctgagagtttcacaatcactgcccactctcaaagaagttagtgtgtgtcccccttagaagctcccttacggctttcacgaaaattaactccaagtttattgtagacctaaatgaatagtgagtacaaaacttctagaagataacgtaggagaaaatctagatgaccttaagtttggtgatgacttattagatacaacaccaaaagcacaatccttgaaagaagcaattgataagttctgtgtcattaaaattaaaagcttctgctctgcaaaagaattgtcaagagaatgacaatataagctacagactaggagaacatatttgcaggggacatacctgataagggacttacattcaaaatacacaaagaactgttaaaactcaacagtagaaaacaacccaattaaagaatgggcaaacgatctgagcagacacctcaccaaagaaaatatacacatagcaaataagcataaggaaagatgctccatatcatatgtcagtagccatttcaaattgaaacaataatgatgtaccactactcacctattagaatggctaaaatccaaagctgacaacatcaaatgctgacaaggaggtggctcaacaggaactgtcattcattgatggtgggaatgcaaaatggcacagctactttggaagacaaattggcggtttcttgcaaagctaaacatattcttaccatgtgctacagcaatcatgctcttcggtattaacccaaatgagttgaaaacatacagtcacacaaaaacctctgcacagatgtttatagcagctttattcataattgccaaatcttgtaagcaaccaagatgttcttcaacaagtgaatggataaatgaactgtgatatgttcatacaatgaaatatggcagggcatgatggctcacacctgtaattacagcactatcggaggccgaggcgggcagatcacttgaggtcaggattttgagaccagcctggccaacatggtgaaacccatctctactaaaaatacaaaaataagctgggcacggtggcatgcacctgcagttgcagctacttgggaggctgaggtgggagaattgcctgaacccatgaggcggaggttgcagtgagctgagatggagccactgcattccagcctgggtgacacagtgagattttgtctcaaaaaaaaaaaaaaaagccaaaaaaaagaaagaaagaaagaaaagaaatatgatttggcaataaaaagaaatcaggccacagaaggacatggaagaacctgaaatgtatgtagctaagtgaaagaagccagtctgaaaaggccacatactatatgattccaactatatgacattctggagaaatgaaactgtgaagacagtacaagatagtagttgccaggagtttagggaggagggaggtttttgttcttccctttggggtggtgagttcttccaggccccagggaggaatagagatgctgtccaggagccagggccttagcaatctacctggtgctctattctattgcaactgaggtggcacctcagatcaatcagtgtgatacatcataacaacagaatgaagaagaaaaaccatatgatcatctcaactgatgctgaaaaagcatttgatggaattcaacatccattcataataaaagccctcaaaaaactaggtatagcaggaagatatctcaacataataaaagccatgaatgacagacccacagctaatatcatattgaatggggaataactgaaagtcttcctctaagatctggaacatgacaaagatgcccactttcaccactgttatttgacatagtaccagaagtcctagctagagcaattagacaagagaaggaaaaaaaacgcatccaaattggaaagggagaagtcaaattatccttgtttgtagatgatatgatcctatatttggaaaaacctaaaggctccacaaaaaaactattagaactgataaacaaattcagtaaagttgcaggatacaaaatcaacatacaaaaatcactagcatttctatctgccaacagcaaacaatttaaaaaagaaatttttaaaaatccagcctgggcaacatgtcaaaaccccatctctactacaaatattttaaaaattagctgggcctggtggtgtgcgcctgtaatcccagctacctgggaggccaaagtaggagaatctcttgagcccaggaggtctaggctgcagtgagccaagatcacatcactgcactccagctctgcgtgacagagcaagaccttatctcaaaacaaaagtgatctcatttacagtagctgcaatacaatgaaatacctaggaattaaccaaagaagtaaaggatctctataatgaaaactataaaacactgataaaagaaattgaagaggacaccaaaaattgaaaagatattctgtgttcatggattagaagaagcaatattgtcaaaatgttcatactactcaaagcaatctgcagattcaatgcaattcctatcaaaataccaatgacattcttcacagaaatagaaaaaacaattctaaaatttaaacagaaccacaaaagatctagagtagccaaagctatcttaagcaaaaagaacaaaattggaggaatcccattatctgacttcaaatcgtattatagagctatagtaaccaaaacaacaaggtactagcataacaagttacgtagaccgatggaacataataaagagcccaaaaacaacttcatacatctacagtgaactcattttctacaaaggtgccaagaacattcatacattggggaaataatagtcccttcaataaatgatgccaagaaaattggacatctatatgcagaagaatgaaactagacccctattttttgacatatgcaaaaatcaaatcaaaatggatcatagacttaaatctatgacctcaaacatgaaactactaaagaaaacactgagaaagctctccaggacattgcactgggtaaagatttctcgagtaatacccaacaagcacaggcaaccaaagcaaaaatagacaaatgggatcacatcaagttaaaacgcttctgcacagcaaaggaaacaatcaacaaagtgaagagacaacctacagagtgggagaaaataaatatctgcaagttttccatctgacaaagaataattgacaaaaaaaataaggagctcaaacaactcaataggaaaaaaatctaataatccaatttaaaaatgagtaaaagatttgaatagacatttctcaaaagaagacatacaaatggcaaacaggtatatgaaaaggtgctagtattaatccgttctcacactgctataaagaaatacctgatggcacggtggctcatgcctgtaaccccagcactgtgggaggccaaagcgggcagatcgcctgaggtcaggagttcgaaaccagcctggccaacatggtgaaaccctgtctctactaaaaatacaaaagaattagccaggcgtggtgttgggcgcctgtagtcccagctacttgggaggctgaggcatgagaattgcttgaacctgggaggcggaggttgtagtgagccgagatcacaccactgcactcctgggcaacagagtgagactccatctcaaaaaaaaaagaaaagaaatacctgagacttgtattaatccgttctcatgctgctacagagaaatacctgagactgggtaatttataaagaaaagagttttaattggcttacagttttgtaggctgtataggaagcatagcagcttctgcttctggagaggcctcaagaaactgccaatcatggcagaaagcaaagagggagtaaggcatcttagatggcggaagcaggagcaagagagagtgagcggggaggtgctgtacgcttttaaataaccaaatctcatgagaactcactcactatcacaagaacagcaccaagaggacagtatgaaaccattcatgagaaatccaaccaccctccagcagaccccacctccaacactgggagctacaattcaacatgagatttggtggggacacagatccaaaccatatcagtgctcaacataattatcatcagasaaatgcaaatcaaaactacaatgagatgtcatctcaccctagttcaaatggtttttatccaaaagacaggcaataacaaatgctggcaagaatgtggagaaaagggaactctcatacatatctcttggtggaaatctaaatcagtacaaccactatggaaaacagtttggaggttccccaaaacactaaaaataaaatgaccctatgatccagcaatcccactgtatatatccaaagaaaagaaatcagtatatccaagatatatccacactcccatgtttactgcagcactattcacagtagccaagatttggaaataacctgactgtccatcaacagatgaatggataaagaaaatgtggtacattcacaaaaaggagtactattcagtcataaaaatgaatgagatcctgcatttacaacacagttgcaactgaaggacattatgttaagtgaaacaagccaggcacaggaagacaaaggccacatgttctcactcctatgggagagccaaaaaaaattgaactcatggaggtagaggtataatgatggttagcagaagctaaaaagggtagtggagaagggaggataaaaaggagatggttaatgggtacaaaaatacagttatatggaaagaataagatctagtgtttggtagcacaatagggtgaatgtagttaacaatgatttttagtatatttcaaaataactgagagtggaattggaatgtgcctaatacaaagaaatgataaatgcctgaagttatggatatccgaatttcttttattcgattattacacattgtgtctatgtgtcaaaatatcacatgtacttcataaatagtacaacttttatgaaagaaaaagaaaagattggccagatgcggtggctcacacctgtaatcccagcactttgggaggccaaggcaggcaggaccgcttgagctcaggagttcaagaccagccttggcaaaatggtgaaaccctgtctttacaaaaaatacaaaaattggctgggcatggtgatgtgcacctgtagtcccagctacttggaaggctaaggtgggaggatggcttgagcctgggaggacaaggctgcagtgagctgtgatcgtgccactgcactccagcctaaatgacagagggagactctgtcttaaaaaaaaaaaaaaga

SEQ ID NO: 93881 - DNA, 18898 bp, Homo sapiens
  misc_feature (1)...(18898): n = A,T,C or G
ggctcacccctgtaatcccagcactttgagaggccaaggtggggagaacacttgaggtcaggagtttgagagcagcctggccaacaaggcgaaaaaccccatctctactaaaaatacaaaagttagatgggcgtgatggtgggcgcctgtagtcccagctattcagcagcagaaggcaggcgtatcacttgaacctgggaggtggaggtcgctgtgagccgagatcacaccactgcactccagtctgggcaacagagcaagattctgtctcaataaataaataaataaataaaacaatataatcactgggtggggtggctcatgtctaaaatcttagcactttgggaggatgaggcaggagaatcacttgatcccaggagttcaagatcagcctgggcaacataaggagacctctctctacaagaaaaattttttaatgtgctatgcatggtggcatgcttcttgggagactgagataagaggataagaggatcatttgagcctcaggaagtcaaggctacagtgacccatgatcatgccactgcactgcagcctggcgatgaagcaagaccttgtctcaaaaaaataaaaatataaaacaatataacctaccacagagaaggtgatatagtttgggtctgtgtccctaccccaatctcatgttgaattgtaatcccgaatattggaagagaggcctggtgagagacgattgaatcagggggcagatgtcccccttgccattctcatgatagtgagttctcgtgagatctggtagtgtgtagctggccgggcacagtggttcacacctgtaatcccagcactttgcgaggccaaatgggcggatcacttaaggtcaggagttcaagaccagcctggccaacataatgaaaccctgtctctactaaaaatacaaacattagcccagcatggtggtgcacgtctatagtcccagctacttgggaggctgaggcaggagaattgcttgaacccgagaggcagaggttgcagtgagctgagatcgcaccactgcactccagcctgggcaacagagtgagactctgcctcaaaaaaaaaaattagtatgttgaggcactttcatgtttattgtagcactatttactaaatgtcccatctctgaactctaagtcctgccattttcctggtagggaggaacttcatggccatggatgtgagctatccaaacactcagaaaaaaagaatcttgactgtcttctcttctttgaccttcttcactctattttcagccaacattcccacagccccaccccccaaatccttgtcatcaatctgaaatgtgaaacacagacatttcactctctgaccacaaccactaataccccaactcccccactgcttcattgccaatggcatgagggctatactggccaactaggtctttgcttaaggttccaaagagtgcaaacactatagaaggtcaagtctccctcctattaaaagactttttttttctaacattttgaaatcttttgttacatgtttacacggaagtatttgaagaaatacaagggagtacaagcagtttttctaatgtttcataaagaaaaacaggtggggcctagcagtccaaagtggtgattaacagcatgaaacttacattcacagccaggcgtggtagctcatgcctgtaatcccagcactttgggaggccgaagtgggcagatcacctgaggtcaggagtttgaaaccagcctgacaaatatggtgaaccccgtgtctactaaaaatagaaaaatgagctgtgtctggtggctataatcccagctactcgggaggctgaggctggagaatcacttgaacccaggaggcagaggttgcagtgagccaagatcgcaccattgcactcgagcctgggcaacaagagcaaaagagcgaaactccatctcaaaaaaaaaaaatttaccatcacacaagaccatactaagactctacactcattagctgtgaaatgcagaagcaagtcacttatgaccggctttgggggaacttatctaactcatttgcaaaatggagatgataaagctaacctcagtcttgcaatcaggagttcaattaagattatgctcataaaaagcttcctgcagttctgggggttttttcaagcagataaatggagctgggataggactgttttaatccaaacacagatgagcacaggaaaatatcacatgttcacgtgtatgcaacatggcccacaagtctgcacacacacaccagaatgaacacatgaaaacatccacgtactggccgggcacggtggctcacacctgtaatcccagcactttgggagtccgaggcgggcggatcatgaggtcaggagatcgagaccatcctggctaacatggtgaaaccccatctctactaaaaatacaaaaaattagccgggcatggtggcaggcacctgtagccccagccactcagcaggctgaggcagatgaatggtgtaaacctgggaggcagaggttccagccgagaccatgccactgccccccagcgtggggacagagcaagactctgtctcaaaaaaaaaaacaaagaaaaaaacatccacatacttatatgtagtcacccaattgtgaatgtatacacacaaatatgaatatgcagcattcaccttgttctacacagaaatacacatcgtagacacccctaaatcatgtgtgcacacatgctgtatgcagagacagacacaaagattggcaagcattgagaaacagtgccacaccctgtcaggcacacacacacatgtgcatgtgcagacataagttggaatggatacccattatcaagcacaaacatacacaccacaaagcctggtgcacacataaattcatgtatcaacatgaacatgctgaaacatacatacacgtagacactaaaagcatgcacccagaatgacacacacacagttgtataaatgaggataaacatggcagaggcatccaggagaacccactggacaaaatggcacaaaacacaaagatgcaygagcacacagggtgattgaggggaacactgacttgcagggaaggagaaagagaaagatagaaagatgggatccaagacaagcatagacagacaggtgggcaaagtcctgtgcagggctccagggccaaccagaataacctgagagtctaatgctggcctgtccttccgcagatactgcctaactcagcaccacactccaggaggccatgaaggattaatttcctattcacagctccatggggtaaagcttggctgtgctgaggaagggatggcgaaggaggttcccaaagactctgtccctttcctccttcccaaaggaaaagatttgtgagctttagactagagaatgtaaaagcaaggaatgtgcttagggaacatctcatccatccgcttcatcctacagattaaagagaacaactaccattcattgagcacttactgccatgtacctcatctgcattaacacttatacttctcccctaaatagccaaagaggtaggagctgttcttggctccataagactcagagagatgaagtcagctgttcaaagccacacaacaaagaaaggataaggttaggattccaatccaggccttaatcattgcaccatccattcagaaagggaaactgaggcccagcaaaggaaagggatcttcctgggctcgccactaactcactctgaaagcctgttcccaagacactgcccactgggacaagtccctcccacatgatttcagacaccattctctcactccatgctctagggtaatcaacaagtccaaaattcattgacctctatgtccacaaatactagagttctcccaacctgtctctccccatcccctccctggccaggtcatggcaacctgctgatcactcagtgcacttcctagtgccaaccccagtgagaaacaaactccccagatttctgtctcccacctttttaagaaacacgaaggaaaaggaggagccaggcccaggtgcaggctggtgaacaggattagagcgattgatatctgccaagctggtgctaatcttccttcccacctcttcccctccaaaatcaacaaacaactttcctctctctgccttgttctctgacctttgttccctccacacaggtctcagagctcagcatcctagaacagtttgagcaagatgtcagtcctgggggtgccaacctcacccacctccacttgtccaaagttggtgacccagaggacaggtgcaaccctaaatggtccaaccaccacagcctgtcctgtggccatctggggcccctctcagggtctggctgaggctcatctcagacccacataggaccaatatcagcacctgcctcatgctcatgtcacagcccactgggaccaacctcagaccctatatggtgccacccttacgccctcctgaagcaggacactcttatgccctcaatgacacctgagacaacacacagagccctcttggcaccaaacatgacttcaatattctcctggtgtcaagttcagtgccaacttgtttcccatcctcgcatacacctgggggcagtcccaaagccaacacgatgcctttccctccctggccatacctgatgctgatatcagaacccgccaatgtcatcagtgtgtccactgctgatgccagtctcagcactcacctcctgctaaggctggcccgcacttgactcccagggtgatctaggccagtcaatgaaggggggcgaggagaaagttcacatcccagctccctcacttactccctgtgtgacctcactcaagaggatttatggagtctagatctgctcatcttcaaaatgaggatgatcatgatgaaccaacctcattgttacaaagattcaaccagatcatacacacctagacttatgctttcccgtatacgaccatgctcaccaaagggtaactgtgcctgtttactaaggaagaatnnnnnnnnnnnnnnnnnnnncctctgtagatctttatataaaatgagaaacataaacaacaatcataatattaatagggatgatacaatcaatctagtgggtttccctgaggatctgggttggaaaccagcggacaacccttgggacacttgagatttttccaccatttgggggttgttattactatttctccagacctagccaatccctctgccaaccgctaactccaggtactcttctccaggtgtggggaaagttcccctgaaatatggctctggtcttcctccccttcccaatcagagatgggcagtggaggttctatggcacccatcctggcctcactctgaggttccaatgaggattctgggcatcaagagacagctctgggcaaaagcaaaatcaagtcagcccctggacccagtgctgggctgctgggctttctgggagaacccgctgggcttgctacacactcctcctcccagaaactccacacccacagccctgggtcttcctagccccgagactttcaagtccatatgcctggaatcccccttcctgagacccttaaccctgcatcctccacaacagaagacccctaaatgcacagccacactttgtcttaccctaataaaacccagacctttggattcctctcccctggaacccccagatccacaactttggggtgcattctcactctcagaccccaaatccaaagcccaagtgctcccctatgcaaatattccaaactcctcagttctacagcttatctgttgccccctcctaaatccacagccctgcggcacccctcctgaagtaccacagatttagtctggaggccccctctctgttcagctgccctggggtccccttatcctcccttgctggctgtgtcccaagctaggcaggattcatggtggggcatgtagttgggaggtgaaatgaggtaattatgtaatcagccaaagtccatccctctttttcaggcagtataaaggcaaaccaccccagccgtcaccatctatcatcccactaccaccatgctggcctcagggatgcttctggtggccttgctggtctgcctgactgtratggtcttgatgtctgtttggcagcagaggaagagcaaggggaagctgcctccgggacccaccccattgcccttcattggaaactacctgcagctgaacacagagcagatgtacaactccctcatgaaggtgtcccaaggcagggagatgggtggcacggggtgggggctgcctagttggctggggctttgtggcagggggttgaccagtgtggaccagagtcttaggaaatggagttttggagtttcagcatcagaaagacaggatcttgggatgtccagctccctgactgtgagaacctgggtgcgaagcatcccagcacatgacatctcggtgctgggccccattcagagtggaggcttctccctctaaccactcccacccacctccatcagatcagtgagcgctatggccccgtgttcaccattcacttggggccccggcgggtcgtggtgctgtgtggacatgatgccgtcagggaggctctggtggaccaggctgaggagttcagcgggcgaggcgagcaagccaccttcgactgggtcttcaaaggctatggtgagggggtgcccaagagggggaaggtggccaggtggacacgaaggtctcagtgttcccagccttctccctgactctcctgccaactggaggctaaggcagagtccccagtctggtcttccctccccatctcccttcattgtggcctctccatgtgtatccctcacctgtctccagcgtccctgtcctgattcctccctgcctctctctgccccacctccttattctctctcactggagtctcctctttcccctctctctccatctctaaggacatcctgggtttctgttttccagccctggttctctgtcttcatttgtctttttgtccctcttagcttctgggcttctctgtgtttctcatctctccgcatccctttctcacttcttcctctgtcttaggatttcagggtattcctacttccacatcttcagcctccatctcctggtaacagtctctcttccttccagaccctctctgtttctatctcaatatttttctctcttctccagctcagcttaagaatctttcaccatttttatttcctcctcccagatctccccatatctcacttcccctccctccatcctcttcctccatcactctctttctctccccacttccttcccttcctccatggagtgtccccttatccctctgtttctatgtgcatctctctgtctggcctttctgtttcttttctgattgtcttattctttaaacctggtctctctctctctctctctctctctctctctctctctctctctcctctctctcttctctctctctctcctctctctcttctctctctctctctctctctctcctctctctcttctctctctctctctctctctctctctctctctctacctcgacatcgtgtttctctgactgagtttgcagctctgctgggcaatggcgctgaatccatctctctcccaccctactccctctctcctccacccttggggagccccttggagctgctccgctcctgcccctgccgccccctggcctgtctccattcccgcgttcacctccccaggcgtggtattcagcaacggggagcgcgccaagcagctccggcgcttctccatcgccaccctgcgggacttcggggtgggcaagcgaggcatcgaggagcgcatccaggaggaggcgggcttcctcatcgacgcccwccggggcactggcggtgagcaggggaccccgagtgcgggggcaggagaaggaaaacacccaggacgaggaacccgcgcgcgttctgcctggggatggggactaggtggggaaaggcgcccgcacttccagccctggagtctggcgctgggaatttggctcaacaaggccctgcctcctggaattctgactctcctcagacctctgagttgactctctccccaacccccttctcccgccatacccgcaggcgccaatatcgatcccaccttcttcctgagccgcacagtctccaatgtcatcagctccattgtctttggggaccgctttgactataaggacaaagagttcctgtcactgttgcgcatgatgctaggaatcttccagttcacgtcaacctccacggggcaggtaactggctgcagcccggcccgtgacgcccctaccacaacctgccaactgctcccctacctggagacaggtgccccaaactcccaccgccctccagacagtgtcccctcaaaatcagtccccgatattggacaactggacagttgcaccagaacccaggatggatgtccaataccctgtctccaaggacacctggatagctcaacagatgctccccaaaacagagcctgctggcaggatgcataccctcagctcagctctctcacctgggcacrtgttcccatccccaacttaccgtaatttctaacagatgctccctacccagttcttctgaatattttaacacctggacaagtgactgcgtcaaccggcctcctgcatacctgaacacctggtgctgcaaaatccagcccatcataatcatttcacatctacacaaatgtcccagattagcccactggaatatctggccaagcgccctctacttcacccacttaaatacctgaaaacatggacagctgccctaaccaacaccttaaacacataaatatctagacagattgttccctgacacacaaataagtgttccccaaccctttccaatcacacaccttacagaggtgctcccagtgcatcccacttggataggtaaacacctcaacaggtatcccctccacttcaacatcttcaccagccccactttaatacctgagcacctgaacaaaagcccccaatccagacccagtaagtatctggacagctgtctccaaccaagcctacttgaatgcctaaatacctagacaggtgacactcacctcataccagccccacctgaagagctaaacacctggacaggtgtcttccaactcaacttcacttgaatatctgaacacctagatgtgtgctccaatccagcctcgtttaaatacctgaaacctggatatatgtctcagttcttctcacctaaattactagaccgtggccctggtacctaaccttcctgaaaacttagatataagttcctatccggccccactgaaatacctaaacaacgagacagatgcctttaactcagttccttccttgctatgaaacaaatcccattcccatcagctcctgccccgtgacagctgtccttcccttcccatcctctctctgcaaccccagctctatgagatgttctcttcggtgatgaaacacctgccaggaccrcagcaacaggcctttcagttgctgcaagggctggaggacttcatagccaagaaggtggagcacaaccagcgyacgctggatcccaattccccacgggacttcattgactcctttctcatccgcatgcaggaggtacaccccagcagccastgcggggagatgcaaagccaggcagagggaaatcagtctgggagtggggcaggcagatgacacaggcccattcaaattaaccctcatcataataatcctcacaattggctgggtgccgtggctaacagcctgtaatcccagcactttgggaggccgaggcaggtggatcacctgaggtcaggagttcgagaccagcctggccaacatggtcaaaccccgtctctactaaaaatccaaaaattagttgggcatggtggcgcgaaggggggcagaggttgcaatgagccaagatcacggcattgcactccagtctgggtgacagaatgaggccctgtgtcaaaaaaaattaattaattgtttaaaaagtaagtgagcctgcatggtcatgcgcatgtgcagttccagctactcaggaggctgaggctggaggattgcttgagctcaggagttggagtccggcctgtgcaacttagcaagaccaagtcagtataagaaaaaaaaaaacaaaaaaaaactgacagctaagttgataattraaggacagatggtcagcaaggtaaagaaggtgagaagraagagcattttgggcaaagccagcagccagggcaagggctggaacctagagcgagtctggtagatctagggtccctctttccacctttggtctgaaccaaagagaggtagatccaaaggaaaagccctagaagggccctgagggcaagaggagtgaggttggcctaaagccccctctccctgcaggaggagaagaaccccaacacggagttctacttgaaraacctgrtgatgaccacgttgaacctcttcattgggggcaccgagacsgtcagcaccaccctgcgctatggcttcttgctgctcatgaagcacccagaggtggagggtaaggctggagggggacggaagtggagggccccagaccctcaaaattccccttcgactggtgcaatgtccccacctgtcccagatcccgggaccctgagacgtgacttgctgtccagagacagggcaacattcagctggtaggcatcagctgagtctcattagatattaaaatattgaaaatgtctgcactgattggtcagtcacttctgtcccaagcccactgagtgcccrctgcccgttccmccgggtcatcycctaagttcctccctgtgcctcccctgtgattctggcacaacctggttaacaggatcctactccaacaatgcgaatggcygatgtctgttctgttatgaatgctctacttccgtctcataggcggagccatatcatccaccccattttrcctattcggactatcatttcctgctctgagacccctagatacctaaacacattccccctcctcccccagccaaggtccatgaggagattgacagagtgatcggcaagaaccggcagcccaagtttgaggaccgggccaagatgccctacatggaggcagtgatccacgagatccaaagatttggagacgtgatccccatgagtttggcccgcagagtcaaaaaggacaccaagtttcgggatttcttcctccctaaggtgctatccgcccccaccccccagactacggggacttccagcccctctctgtgtccccagcatcccacccacattagaagctttctagaccctgtcccactccctcaatcagtcaaaaaagacttccccaaccaccacatccgttccacctttccacttagacactcctgagtcctgcatctctccagactctttgtgtcaggagaatcaaacacatgttcccaaacttcctatcttaagaaacagaagccccctttccattcggccttttgtcatagggacagaaatctcaggtcccccaaactcctgcctagaaggacatggaccccatgtctcccaaacttcctgtttcagagatgtgaaccttctatcccccaaagctcctccatcagaggaccccaactcctccatgcctgccacttccccttacctggggcacactagttccccctccagcccctgtgtactttcaccaatcccccgaccctcctcatcacacacaacttcctcctccctaccagggcaccgaagtgtwccctatgctgggctctgtgctgagagaccccagtttcttctccaacccccaggacttcaatccccagcayttcctgaatgagaaggggcagtttaagaagagtgatgcttttgtgcccttttccatcggtaagagaccactgtttgctgccaggycacggctcacaccagcaggsgcctccctcaccctcctcccctctctgcggtgtagcctggtatttctccagcttggaagttcctgttagaatctacccttgagccagcagctgatacttccttaactaccaagcacccagtacctgcgcccaggtaaaatgaaaggaaacatctttccccgtagatgtatttctctagggtcacacagcagattcctcagatccctaaaaaggagatgacggcacagcagtcatatttgcaagtgtayctggcaggaaaggacatctaaacctcccattgctacacctggcatggatcaccccatctatgatggatgtgtgacattatgcctttttcaaaacccatagaactgtataacacagagtaaaccctaatgtaaactatggactttgttagtaataatatatcaatattggttcaccattgttacatctcttatagaaagaaaytgaggctcagggaggatcagagcctcctctgaaactctctcaggccataatattccacccytcctccctgggagagccgcagctggaggtcggtactggggcgaggctgcactgagagtgggcttcacctccacccctcccgcctctcctcctcaggaaagcggaactgtttcggagaaggcctggccagaatggagctctttctcttcttcaccaccgtcatgcagaacttccgcctcaagtcctcccagtcacctaaggacattgacgtgtcccccaaacacgtgggctttgccacgatcccacgaaactacaccatgagcttcctgccccgctgagcgagggctgtgccggtgcaggtctggtgggcggggccagggaaagggcagggccaagacggggcttgggagaggggcgcagctaagactgggggcaggatggcggaaaggaaggggcgtggtggctagagggaagagaagaaacagaagcggctcagttcaccttgataaggtgcttccgwgstgggatgagaggaaggaaacccttacattatgctatgaagagtagtaataatagcagctcttatttcctgagcacgtacccccgtgtcacctttgttcaaaaaccattgcacgctcacctaattgccacaaacctctgcgaagggcgttcatgcccattttacacgtgacaaaactgaggcttagaaagttgtctctgatgtctcacaaaacataagtgcccagaaaatctttgaacacagatctgtgcccatagccttctagacagattcttaaaaagcacctattcctcacgtaaaacagcttagtatagcatcacatggcctgaacatccctgtcctggggagttttccagagacctggcgggtggctgtcctgccttcactgcacacatgcccacactctcacctactcaacatgctttgaatacccgggtgtaatctgtgcttgctaccagataaggccactgtagcccattcagagtcagtccagggacacaacgagacatgaatggacatacagagtcagtccattaacaattttttgcagagcagaagtttttaattttaatgacattctgtcaatatatcccttaatgaagaagttgaaggaaagaatcacttacagagaatgagagaactctggatcaggacatagccatattcatgtgtgtgatcatgttcagacatgcatgtgagcatatgactgcatattctcctccgtgtatgcatgaaacatattccactatgggttctgaaggctgggctctcctgatggatctggggtctgttgtaagacccagctgagagtttcacaatcactgcccactctcaaagaagttagtgtgtgtcccccttagaagctcccttacggctttcacgaaaattaactccaagtttattgtagacctaaatgaatagtgagtacaaaacttctagaagataacgtaggagaaaatctagatgaccttaagtttggtgatgacttattagatacaacaccaaaagcacaatccttgaaagaagcaattgataagttctgtgtcattaaaattaaaagcttctgctctgcaaaagaattgtcaagagaatgacaatacaagctacagactaggagaacatatttgcaggggacatacctgataagggacttacattcaaaatacacaaagaactgttaaaactcaatagaaaacaacccaattaaagaatgggcaaacgatctgagcagacacctcaccaaagaaaatatacacatagcaaataagcataaggaaagatgctccatatcatatgtcagtagccatttcaaattgaaacaataatgatgtaccactactcacctattagaatggctaaaatccaaagctgacaacatcaaatgctgacaaggaggtggctcaacaggaactgtcattcattgatggtgggaatgcaaaatgacacagctactttgaaagacaatttggcggtttcttgcaaagctaaacatattcttaccatgtgctacagcaatcatgttcttcggtattaacccaaatgagttgaaaacatatagcaacacaaaaacctctgcacagatgtttatagcagctttattcataattgccaaatcttgtaagcaaccaagatgttcttcaacaagtgaatggataaatgaactgtaatatgttcatacaatgaaatacggcagggcttgatggctcatactgttaattatagcactatgggaggccgaggtgggcagatcacttgaggtcaggaattcgagaccagcctggccaacatggtgaaaccccatctctactaaaaatacaaaaattagccgggcacggtggcatgcgcctgcagttgcagccacttgggaggctgaggtgggagaattgcctgaacccataaggcagaggttgcagcgagctgagatggagccactgcactccagcctgggcgacacagtgagattagaagaagcaatattgttaaaatgttcatactactcaaagcaatctacagattcaatgcaattcctatcaaaataccaatgacattcttcacagaaacagaaaaaacaattctaaaatttaaacagaaccacaaaagatctagagtagccaaagctatcctaagcaaaaagaacaaaattggaggaatcccattatctgacttcaaatcgtattatagagctatagtaaccaaaacaacaaggtactagcataacaagttacgtagaccgatggaacataataaagagcccaaaaacaacttcatacatctacagtgaattcaatttcaacaaaggtgccaagaacattcatacactggggaaataacagtcacttcaataaacaatgccaagaaaactggacatctatatgcagaagaatgaaactagacccctattttttgacatatgcaaaaatcaaatcaaaatggatcatagacttaaatctatgacctcaaacatgaaactactaaagaaaacactgagaaagctctccaggacattgcactgggtaaagatttctcgagtaatacccaacaagcacagggaaccaaagcaaaaatggacaaatgggatcacatcaagttaaaacgcttctacacagcaaaggaaacaatcaacaaagtgaagagacaacctacagagtggaagaaaataaatatctgcaagttttccatctgacaaagaataattcacaaaaaaatataaggagctcaaacaactcaataggaaaaaaatctaataatccaatttaaaattaataaaagatttgaatagacatttctcaaaagaagacatacaaatggcaaacaggtatatgaaaaggtgctagtattaatccgttctcacactgctataaagaaatacctgatggcacggtggctcatgcctgtaaccccagcactgtgggaggccaaagcgggcagatcgcctgaggtcaggagttccaaaccagcctggccaacatggtgaaaccctgtctctactaaaaatacaaaaaaagttagtcaggcgtggtgctgggcacctgtagtcccagctacctgggaggctgaggcatgagaattgcttgaacctgggaggcagaggttgtagtgagccaagatcacaccactgcactccagcctgggcgacacagtgagactccatctcaaaaaaaagaaaagaaatacctgagacttgtattaatccattctcacgctgctataaagaaatacctgagactgggtaatttataaagaaaagagttttaattggcttacagttttgtaggctgtacaggaagcacagcagcttctgcttctggagaggcctcaagaaactgccaatcatggcagaaagcaaagagggagtaaggcatcttagacggcggaagcaggagcaagagagagtgagcggggaggtgctgtacgcttttgaataaccaaatctcatgagaactcactatcacaagaacagcaccaagaggacagtatgaaactattcatgagaaatccaaccaccctccagcagaccccacctccaacattgggagctacaattcaacatgagatttggtggggacacagatccaaaccatatcagtgctcaacataattatcatcagagaaatgcaaatcaaaactacaataagatgtcatctcaccctagttcaaatggcttttatccaaaagacaggcaataacaaatgctggcaagaatgtggagaaaagggaactctcatacatatctcttggtggaaatctaaatcagtacaaccactatggaaaacagtttggaggttccccaaaacactaaaaataaaatgaccctatgatccagcaatcccaccgtatatatccaaagaaaagacatcagtatatccaagatatatccacactcctatgtttactgcagcactattcacagtagccaagatttggaaataacctgactgtccatcaacagatgaatggataaagaaaatgtggatagaatggataaagaaaattcacaaaaaggagtactattcagtcataaaaatgaatgagatcctgcatttacaacacagttgcaactggaggacattacattaagtgaaacaagccaggcacaggaagacaaaggccacatgttctcactactatgggacagctaaaaaaaattgaactcatggaggtagaggtataatgatggttagcagaagctaaaaagggtagtggagaagggaggataaaaaggagatggttaatgggtacaaaaatacagttatatggaaagaataagatctagtgtttggtagcacaatagggtgaatgtagttaacaatgatttatagtatatttcaaaataactgagagtggaattggaatgtgcctaatacagagaaatgataaatgcctgaagttatggatatccgaatttctttgattcgattattacacattttgtctatgtgtcaaaacatcacatgtactccataaatagtacaactttcatgaaagaaaaagaaaagattggccaggtgcggtggctcacacctgtaatcccagcactttgggaggccaaggcaggcaggaccgcttgagctcaggagttcaagaccagccttggcaaaatggtgaaaccctgtctttacaaaaaatacaaaaattggctgggcatggtgatgtgcacctgtagtcccagctacttggaaggctaaggtgggaggatggcttgagcctgggaggacaaggctgcagtgagctgtgatcgtgccactgcactccagcctaaatgacagagggagactctgtcttaaaaaaaaaaaaaaagagagggagaaggaaggaaggaaggaaggaaaataaaagggagggagggaggaaaggaggaagagatggagaaaggaaggaaagaaagaaaggaaagaaagaaaaagaaagaaaggaaggaagaaaagaaagaaagaaaggaaagaaagaaagagaaaagagaaaagaaaagaaagagggagggaggaaggaaggaagggaaggaaggaaaaaattcctcaacatgacacagcaatgtttagcgggttttactgtgtagatcttacactaaatgtaagccaaatgtaatgctaggtatgccattttttgtgtcattgcttatggcatttttattttaatttccaaataaagaactatgatcgatttttccattttaaaaatctttgtctaccccaagttcacaaagattttctcctatgctttcttttgaagaattcatagttatagcttttacttttaagtctgagtcattatgagttaatttttaaatatagcgtgaaataagagcaaaagcatattttttccttaaggaaattcagttattccaacactttcgttaaaagactttcctttctcccattgaatagctttggcaccttaatcaaaaatcagttgattatataagtgtctgtttctagaccttcttttctgtttcattgatcagtatatgcctacactactttattgtaaaataaggtgagccctctgaattcgttactcttttttttttttttttttttttttgagatggagtcttgctctgtcgcccaggctggagtgcagtggcacaatctccgctcactgcaagctccgtctcccgggttcacgccattctcctgcctcagcctcccgagtagctgggactacaggcgcccgccatcacacccagctaattttttgtatttttagtagagacggggtttcaccatgttagccaggatggtcttgatctcctgacctcgtgatccgcccgcctcggcctcccaaagtgctgggattacaggcgtgagccaccgcgcccggcctgttactcttttataattactttgactagtagttgtaaaagatatacgtcctagaattttttttttttttttttttttgagacagagtctcgctctgtcgcccaggctggagtgcagtggcacgaactcggctcactgtaacctctgcctcccgggttcaagtgattctcctgcctcagcctcccaagtagctgggattacaagtgcccaacaccatgcccagctaatttttgtacttttagtagaaacagg

SEQ ID NO: 93882 - DNA, 18737 bp, Homo sapiens
  misc_feature (1)...(18737): n = A,T,C or G
acgctccctgcagtaactcttgcacttactgtaagtgctcggactgtcttgtgcttgacattaggacacacactcaggccagaattgggcaagattgtccctgagcggggcgtgcagagcgctctggcctgggaggtggggcgcagggctgcttcctcctgcaggccagctcactgtggggctggtgtctgcccagagcttggccaggcagtgccgccccctcccttcctgccgcctctaccagcagccttccctcaggctgctttccgggcctagtctgtggcaggtgtccagggcacagtcttccctctagcctgccatgaaactgtttcatttttcttttaaaaaaattgaagtgaaattgacatactatccaaccatttgaacgaccccagacagaggtggtggttgcatgaatgagcatgttgtggaaccaccacctccagttccatggcatttccccactcctaaaggaaaacctggccccagcaagcagctgctccccatgcctctctatcttatgactttgggtttcattttcatgtttttgtttttttgagatggagtcttgctctgtcacccaggctggagtgcagtggcatgatctctgctcactgcaacctccccgtcccgggttcaagcgattatcctgcctcagcctccctagtagctgggattacaggcacccgccaccacacccggctaatttttgcatttttagtacagacgggatttcaccatgtcggccaggctggtctccaactcctgaccataggtgatccgcccactttggcctcacaaagtgctgggattacaggtgtgagccatgtgcccgaccagtctgtgacttacttaaatacagactggatcatgtttctcccctgctctatgccctctcttcatctttcaagtcctaattcagagatcacctcttctgcgacccaccgagctagtcccagcacctccttcccttgtcccccctgcttctaggaaccacacttctggtgcggcattggctgtaccgttggggacgctactgctccctggtaggctgccaggtcttgagggtagggactctaacttgtctttgtctggcaggggcctcactcagcacctggcacaatagtaggtgctcagggaactgaatgaatggatcagggtctgaggcgggcaagggctgcggcggtgagccctgaccccctgggtggagtgtgaggaggccgtgttggccttcagggtgcaccctgaaaccagacatggggtccaggctgcctagggctgagcgtttatctgacacccgttctgaaaaacctggtcgtggtgcaggtgcagcccccggccctggtcatttggaagtttgtgtccaaaaaaacccaatggctactatagcacctgtgagccaatggggtcctccacctgcccacctgcctgcagaagaaacgccgaacactgctgcctagtggtcagggccggctggactccctgcccaccccactgggtcctcaaagaggagggcccactcaggcccttttccatcaaccctgaaagcttggggtgagcgagaagggggagctgccctgtccttggggtcattgcagtcgtctgcctccaacctcttgccccctcagtgcctgctgtccagcgggagcagctcagggctccacctcccctgccgccctcgactttggggagcctccttgcaccaagcagcttgtacggtgccgagtcctacttgcaccacgttgtctttacctctggcattttattttatttaaacatgggaggcagagcttgcggtgagctgagattgcgccactgcaatccagcctgggtgacagagtgagactccatctcaaaaacaaaaaacaaaaaacaaaaaacttcactgtatcattgtttaagccttaacttttaatgataagaaaataaagcacctttggtcatacccctgatggtacacctgtgttcttggcccatttcctccggccctgctggggccacacatggctctcctggaagcaggtcaagagtgcccagtgccatctcccagcattgtgcccctctgggtgtgtcctcagggcaactcagaaggatagctgtctccaggagcaggtgcctgcagggacactgtcatctgcagatgaggctgccccccagccctttgtgatggcttcttccggagaagttgatctccccagtcactcttgggactttattccttgtctctttatccccatcctcccctacccttgccggggtctctgcaaaatgctgctggtccctcctgcagaagcccaccctacatttctctacggcttctgttggggtctctgacctgagtttctcaaagcccctcccccagttcctggaaatccccgctgctgtagcagtgacaggccaggggctcgtgacttgtggtttcacgccaggggggacgtagctgtgagggaggagagagatgtgtgtccctggccatccccaccccagagtccactccaccctggggtcctgcccggtgctgggagaccaaggagaaggagatctgggtccttcctagacctgtcactggtcatcagtcatctgtggagcccaccacagaggcaggccctggagctccagtttcaggttcccttggcagctgctagctggatgcctggcaaggctcttaaccttctgaggcctgtttcgctgaccagaaaatgagggtcacggtgagagtgaggggtgacggtgcccagacagggcctggcccaccctggtgctcaggaaatctctcctgtgtgtgtctggcaccctaccaggtcaaggacacagaaaaagagtcacagcgaccctcagtgggggaggcagtgagcggaaaaaaaaaatcacagaggttgggcgtgggctcacgcctgtaatcccagcactttgggaggccgaggcaggtggatcacgaggtcagaagatcgagaccatcccggctaacacggtgaaaccccatctctactaaaaatacaaaaaattagccgggcgtggtggccggcgcctgtagtcccagctactccagaggctgaggcaggagaatcgcttgaacccgggaggtggaggttgcagtgagccaagatcgcgccactgcactccagcctgggtgacagagtgagacgccatctcaaaaaaaaaaaaaaaaaaatcacagagtgtgaggggagcatccagagaggcctgaagggggtgtctgaggaggaagaaggaggggaaggaaagtgggggcttcctggaggaggtggtgttctaaatactgagacccatttctttttttttttttttgagacagagtctcactctgtcgcccaggctggaatgcagtgaggctgtctcagctcactgcaacctccgcctcccgggttcaagcgattctcctgcctcagcctctgcagtagctgggattacaggtgtgtgccaccacgcccagctaattttttgtatttttagtagagacagggtttaactgtgttagccaggaggtctccatctcctgactcgtgatccacccgcctcggcctcccaaaatgttgggattataggcaccccgccaactgaggtgcatttcttaagtagggagtgaggaagagagttggtgcagacacaggtgatgcagacacgttggggggctggtgatgagaagcgggaggggaccagggagggctcttgaggggccgaaggattccaggatggaaagtgccctttggaaagaacctgtggctttaaggtgaagactcggttgattgggggtaggcgatgagaagacctaggccaggcagcggcaggggcaggggcgcgggcgcggacacaagctggggaggcaggatctcgggatcctgagtaatacagagtggggagggagcagtggcgtgacgtcaggctgcggggggatgggcgtgccttctgcgggaatggaaatagcccagtggaaggtggtggtgaaggggtgggggcgagctcagcttcagacacgccagcttgaagtgtcaggagccacactggagacccggtgtgacctctcacactagaacttaggcagaaaatgaatgggtaagaggccagtgagcacagctgacccactccctgctcctgcaagagggaagtctctccacgtccccatgtccccagtcctggtgtttcagccacaatggagttaggtgctctttgcccaccctacaatgttttgtttgagacgaggtctcactttgttgcccaggctggtcttaaactcctgggatcaagcaatcctcctgcctcggcctcccacagtgctgggattacaggcgggagccaccgtgcccagcccacccctgagcttggactgtgctgtttctccatggtgggctgctctgcgccacctttccttggtctgaattcggccccaggcacagccttcctggcctaggctttcctggagggcttggagttatgggggcaggcactggtgttgctctcactcagagggcggtcggggctggaatggtgcaggtgagggacaagacggcgtaagatgggggacaaagccagggaaaggatgggatcaagcaggggaagggcagagctaggggtagccctgggtatgccaggacctgcagcaaaattggggctacagggccttgtgactccaggaagaatgagggcgtctgagatttaggaagtccgcaggagagaggagagtgtgtggagagggtggcaggccacgcagcacagaggtccacttggacagcctgacagatgtccttctgcttagagaaatggcggtcaccagtgaccttggcaagggcaaggagctggagagggaagggcaggtgaggaggtggagacagagtgaagattcgtcttctcagaaacaagggccgggcaagaaagagggaggagcagaaagggcctctggccgtatctgttgcctcctctcctttgaaccaggacagacttagggactttcacgggctgcaagttccaagagtggcagacccaggctagcctggggaaggggcttgagggaggctcctgctggggaaggtggggctgagtccagcaggagggccagaccaggggccatgaccccattgcctacatagagaaggtgatgagccagcatccaggctactcagggagagctctaacccaggatgaggccttagagctcaaaggacactcaggcctggtggcagctgcccagggcccctgaaagggggaatggagatcaggcagagggggtgccagggactgccacacaggatcagtagggcagcgccagccctggctgggctgctttcacggctgcgggaaccgctccaactgctccagaaagacagaaagatggccctgaaggtgcaggctttgcgtgagtgggtggctgcaaggacaggtgggaggaccaggacgccagaacgtgcagagcccggggggcctccagaggtcgcagttccgacagggcttccaccagtcatgcctacatcttgaggggcagagacacaccccactaatgtttgggtccctgatgcaaaggcagagacaggtgcggggagggggtcctttttctccgaagcgagaggtgaagtcaccaactgctgggtcagaggcagtaggtctgggtctggaggagactggggacagggtggagggaggtgaccgcagccacgggctgggacttcacaggtgtgggctgggggcttttccggacgctgtggcagaggaggcccgcgcgccgcacatctgctgggacccttagctcgcccaggattggtagggagatcctggaagaccagcgcccggaggggtgaggccccgtcttgggggcaaggccgcgaaaccacggcctgcagcttcacgccaggggtacaaagaaaagcgtcgccgggaacccaacacctgcagacgacgcgcagccgcagaggaggcggggcgtccgaggccccgccccgtatgctaatgaagcacacaccacaccgccccgccccggcgcgagaccggtccaacgctgcggagatccagaggccggcggcgcccggaaacacccgcggaggccgaggcagggcggggccgggcgccggggccgggtcgctgggcgggcggcacagcccggnnnnnnnnnnnnnnnnnnnnnnnnnnnnnnnnnnnnnnnnnnnnnnnnnnnnnnnnnnnnnnnnnnnnnnnnnnnnnnnnnnnnnnnnnnnnnnnnnnnnnnnnnnnnttctgttgtcctctccgctgtgctcccgtgctcgccgtcgctcttttcgggctgctgggttcctgttttgtgcgtctctctccctccttctcttgccccccggttctgcgccggcctctcgtggcgcttcttcttcctcgcgcgcgttgttcgctcttgcccctccgcggtctttccgttcttgttcgggcgggcgctcgcgggcgggcgcgcccgccccggcgtcgcccgcgcgtgtcctcgtgccgctccgctccgggcgcctccgtccgccgcttccgtccccccgccgcccgccggttgccggcggcctggttggcgcgcgctgccccggcgtggtcgggtctcgtggtgggggtcccgtccgctctgctgcgctgcctggtggtggcccgctcgtgtcggccgccgctgtcgtgtttcgtccgtgccctggccggttcgcgtcgccgcttcgctgccccttcgtcctccggctccccctcctccggcctctctctctcttctcgcctcgcggcgctcgctgcccgcgcgtgggctgcttctgtttcggctccctccgcgtccctgcgctctgtctccgcgcgtccgctggcgcccctcgcggtctcgctcttgtgccctgctgttcgcttctctctctgctgcggcgttccgtttgttgctcttcctccgccgccgcctcgtgcttcgtctctgctccttctctcgtgccctctgtcctgtgtcctcgtcgcgtggctggctgctccctcctctgtgtctgtgtctgcgtgtcgcggcccccgctgcccgctcgcgctcccgccgcgtggggcttgtgtttgtgttgttgctgagcttggccgattctgcgggcaggtgacatcacacctcgaaggccccagtgcgcgggcggcggcgcgggtccggcccaggaacgcccagccggtcgctggagctttccggctggtggggagcccatgtcccccacgggaggtcctcagccctcgcccttatggcggccggccccgagggtcaggtgggtctcacccacaggcaggtacttccggttggagctggttacagttgcccaatacccgtgtcgctgtgtgggctgtttgggaaagctgggctgagggcttggttcggagagcccgcggagacccgggtgggagtgtgtggaagtggagggagcggggagacagcagcatcggcgctggcggggctgtgtagcttgcagagggtctgtgctctgaggtgggtgagagggtggcatgggtgtccgagtttatgggatccagtcgttgccctcaggactgaggcttccagttgtggtcctaatgaatggaggggtgaatgaatgaccttcctttccctccctgaggcctgaagttgggaggggcttccctgggcttggagaaggggccttctagggttcttggtggcaccctgcttttgaaattgggccttgacaggtcctgggcgtccaatttagtgacaattggtctccctgggagaatggcacttgggctagggctaggcccaggaatgtgggtccgacgagttaagttctggcccagtctcagcctccgtggactggcctggcctggtctgatttccgcctccgtggttaggtctggttttagctttgatgaccgtgccctgccccaccctgcctggtggcctggggaggctcctagtgcagatatgtggagggtttgaactccaaacagtctctgctgactgtaaacacctgtggggtgggggcttggagctctctgttctcttgcgggcctccttctgcctgggcctgtctgccattcgtgagtgagccctggccttcccgtcgtgtgcaagtaaggggtcatttgtggtggaagaagtggtctagacttctccttccccctaggcaccgcctgctctttccacagactcaaggcttctcccaacaggctgccgagcccttccccccagcctcctctgttctttgccctcagaatgccttcagagattccattttgcctggccacctgtggggtattagcttgtggctgtcactcattcatccaaacaatcttgattgagcgcttactatgtgccaggtactggtaggacagcagtgaacaaaatgggatccccgcccatgtggaacttaaattctagctgttgctgcttgcccttgaagccctgagtttgtccaccaagccctttttctgcacccagctcctttcctctctctccgtcaagacctacacaggtctttgggcagcctgaccagcaggtgtctggaaattgagaacacggtattgctggcctaggcctttcctgcttatccctggctcttcgggataaacgtggcttactgtggctctccaggagctgacctctgacttcacttggccaattcagacaactgcttttttttttttttttttttttctcccctcctcaagacagggtcttgctctgtttcccaggctggagtgcagtggtgtggtcatggctcactacagcctcaacctcccaggctcaagcaatcctcctgcctcagcctcctgaataactaggactacaggcacaggctaccatgcccagctaattttttttttttagagacagggtctcgccatgtggctcaggctggtctcaaactccttgttgcctcaaacgatccacctgcttctgcctcgtaaagggctgggattataggcatgagccaccatgactggctcaacttctgacttcatttctgccttctcagcatgctttcctccaggacctggcttcacctgctgtgccgacctaaacaagccccctgccctccagtggcctctgctgttgccacaacgccaacctccagctgtgtccccagctcctggcccttggcctgcctggcactgacggattggtcttaaaccgaatgaggtccacaaacctcttgcaggcccccgtcccagcttccccttttttttctcatgacaaatgtcctgttctttcttcatcatgtccttcaagaagttgtcatttgctccttttctgtatttcctgtgacttcctccctgctggcgagtgccttgtattttatgcttgtgtttctgcaactgctttctggccccccactctttctgtggctgctgagcctagtgccgctcacaggtctgccttctgcagtctggtcaggcttggcctccggactggagtccagggtgctcatggtattccgctcctggtggccatccctttcttccctgtgctcctcttggtgcctcctccccctgccagccacatgattcttcctgctgccctctgtagaaaagggcctggctcacttcctgcctctggtggactactggcctcacagggtccactacttgggttgctgagttccctgtattcagtctcctgccaacgtgtctgccatgctctggtctcttgtgcatacatgatgcagttggatgtggtcctgggcctgcagtgggagccccctaaaatgcactgtaattgctctatatgcttgccagggaaaaaatgcactgtaaccaggagttcaggacaggcgctgggacaggccctgggccccagtctgcaggtgcactgggtgttggcatggcatgtctgggcacctccaaggtggcgtggaggaggccgtgtggctccctggcccaggtcccagcctccttcctccctctatagtcactccctggatacccagcaccgtcgtcttgggtgcctctgcaggtgctatccagagcccttgtcttattgccttgtttttctgtgactcctctctcccgccaacttgggatacttgtctgtgaagcccttccccagcacccccttctccgctctcctggagcatgtctctgtgcctggaggtcaccgcgcctgtgtcctcacccctgctgagtgctgggacacagggtaggcaagttttgtggcccaaatatatcaataaaatatgaagaggaatggtaggggtagtcctggtcccttccacctctgacatatgtagtcttctgcaggtcaggctgtttgtgtgtgtgtgtgtgtgtgtgtgtgtgtgtgtgtgtgtctgtcagagattcactcttgttgtttgtttgagacggagtctctctgtgtcgcccaggctggagtgcagtggcgtgatcttgactcactgcaacctccactcctgggttcaggcgattctcctgcctcagcctccctagtaactgggatgacaggcatgcgccaccactcctggctaatttttgtatttttagtagagacgaggtttcaccatgttacccaggctaatctcgaacttctgacaccaggtgatccgcccgccttggcctcctaaagtgctgggattacaggcgtgagccactgcgcctggccaagtcaggctggttattgatctgctcccctaaaagaccatggcatgagttctgtgggcagagagggggcagggagttgccagtgcagtccccacaagcagctcagtaggcccctgtggtggccctggagggcagctggcagaagtcagaaaggcaaatgagcccccgtgacactgctgtgtccacagaattctccactttgagaatagggcccaggagaggggaactgaaaagaaaggcaacattctcttgggagaggaaggagggacagctctggaggagacaggccaccctggagcccagcccaccagcactgttgcggtgggaggcttgggccctctggccaggctcctgtgtgcttggagccaccccgtgtgcaggggagacctctctgggaggtcagctgaggcctcgtagttggactgttgatgatccccgtcgtcttctctgcccccatcctcttcttggctcaccctgtctcctgtctggtagagaagattctccaatctgtcaagggttcaggcctgctgtgtggctgagggtgctgagagctgccctttctggcagaatgtttggccctcctaggttaatatttggggctgggagcgttggggagcttggcctgggcagtgagtcaagggagctctggcctgggtgacaagagtggccaggtcagctgcttctgaccctccggtcacaccctgtagcagtggctttgccatccccaagacctttggtggcttttccagcatgttgtcctgggcagtagccccaagggtcgactgaccctgaccccacatgggggctgctgaggctgcactgaggctccctggggtgacaggtgggttcactgcagagccaggagccccagatgggtcacgccgccccaagagctgctgctggaggaagagctggactctgagggtgggggcctcacgtagaggaaggaggagtggctgtcctggcctccttttgcttgcccgtggctgttcctcctgggtcctcttgccctgggctggatgccttcttcggctccccctctgcatgtgataacttggggtggcccttggagctgtgccaaagctacacctcggggtcctagtctcaactggcctgcgtactgctgtgggctcaccccrccttcctcccacagccctgggcgctgcctatggcacagccaagagcggtaccggcattgcggccatgtctgtcatgcggccggagcagatcatgaagtccatcatcccagtggtcatggctggcatcatcgccatctacggcctggtggtggcagtcctcatcgccaactccctgaatgacgacatcagcctctacaagtgagcactggggtcaggcccctgcccagggctggaggactgcagggaggggggcggttcacctgtgggtggtgacccggacccttgtctccccctggttggcaggctgctgatgtcagtcctctcttctcgcccccaggagcttcctccagctgggcgccggcctgagcgtgggcctgagcggcctggcagccggctttgccatcggcatcgtgggggacgctggcgtgcggggcaccgcccagcagccccgactattcgtgggcatgatcctgattctcatcttcgccgaggtgctcggcctctacggtctcatcgtcgccctcatcctctccacaaagtagaccctctccgagcccaccagccacagaatattatgtaaagaccacccctmctcattccagaacgaacagcctgacacatacgcacggggccgccgcccccagtagttggtcttgtacatgcgcagtgtcctagtgcccatcgtctgtttccccggccttgcccccgcccgccccgtgccgtggacatctgggcccactcatcgcccctccaggcccccggcgccccaccccctagagtgctctgtgtatgcggatgatttagaattgtcatttctctttactggatgtttatttataaagatctggcctgttcctgcgtctgcggagcggcccttgtctcccagctatctataaccttagctagagtgtcgccttgtgggttcctgttgctgagacttcctggatggagccgccctcaccgccgggcccgtggccctgcgcggagctgtgtccaataaagttcttggatgtgacgggcctgtgtctgctcagcttgttgggggcgggggcgggcgggcgggcgggcgggcgccgggcgctgccggtcacgtgggctggctcgatcacgtgggcgcggcggtcacgtggcgcgccgcttcagtcagctgaaggtcacgtgggcgcggtctcagctctcggctggggttcgtcactgggcgcgggatttggccgccgcggggctccggagccgctcgctcccgacacggctcacgatgcgcggcgagcagggcgcggcgggggcccgcgtgctccagttcactaactgccggatcctgcgcggagggaaactgctcaggtgggcgcgggccggggactgcggggctggggaccgggcggggtgcagggtgcggggccggggaccgggcggggtgcagggtgcggggccggggacagggcggggtgcagggtgcggggccggggaccgggcggggtgcagggtgcggggccggggaccgggcggggtgcagggtgcggggccgaggtcaggcccgcgatgcgagcgcccacccactgcgtccccagggaggatctgtgggtgcgcggaggccgcatcttggacccagagaagctgttctttgaggagcggcgcgtggccgacgagcggcgggactgcgggggccgcatcttggctcccggattcatcgacgtgcagatcaacggtgcggcccggggccggcaggggaacccaggggaggagctctgagctccatgcgacacttccttttctgtggctgcaggtggatttggtgttgacttctctcaagccacggaggacgtgggttcgggggttgccctcgtggcccggaggatcctgtcgcacggcgtcacctccttctgccccaccctggtcacttccccaccggaggtttatcacaaggtgaggtgaggctccctggctgaggtggagggggctcccggagcaaccagcgccctcattttcaaactcacgccccaccccccacccccagcacgtattccatggtcctgagtctggcctcctttgatgaccggatctgggcctgggtcccgcccctgtgcttctttatcagttgtcgctctgcctggcctccctagaccctctgtcctccgcagctgtctccacactgctggctcagcaccgtctgagccataggccgtccccaccccctgcactgcactctggctgcctccaggcttcagaaaccatccccttaaccaaggccgcaggggattctgtgattggcacagcgatagtccctggtcaggctcttcctccctaacctgtctgatgtgtgactcagtggaacacgccttccagaagagactccccctgctcctgtactgcttgccccacgcttccattttctttcctgcccggaagaaatttggttgtccttggtctttttttattttaatttttacttaggttctacagggttaactttttgctgtatgttactactattcaggctcctcttggctgtacctgtgctactgttttttactgaactatttgagagtaggttgtatccaacatgctttttttttttgtttagttttttttttttttttttttgagacggagtctcgctctgtcgcccaggctggagtgcagtggcacaatcttggctcactgcaggctccgccccccagggttcacgccattctcctgcttcagcctcccaagtagctgggactacaggtgcccgccacctcgcccggctaattttttgtatttttcgtagagacggggtttcaccgtgttagccaggatggtctcgatctcctgacctcgtgatccgcccgccttggcctcccaaagtgctgggattacaggcgtgagccaccgcgcccggccagtttttgttatttttaagagacagggtttctctctgtggcccaggttggagtagagtggtgtggtcatagcccattgcagcctcattcttctctgctcaagcgatcctcttgcttcagcctcttgagtaggtaggactacaggtgtgtgccaccatgcccagccaattttaacattttttgtagagaaagtctcactgtgttgcccaggctggttctgaactcctgggctcaagagatcctcctgtcttagtcccccagagtagctggcactacgggcttgtgccaccacacccgactaatttaaaaagctttttcggccgggcgcggtggctcacgcctgtaatccctttgggaggccgaggcaggcggaccacgaagtcaggagatcgagaccatcttggctaacacagtgaaaccccgtctctactaaaaatacaaaaaattagctgggagtggttgcgcctacctgtagtcccagctacttgggaggctgaggcaggagaaccgcttgaacccaggaggcagaggttgcagtgagccgagattgcgccactgcactccagcctgggcaacagatcgagactccatctcaaaaaaaaaaagttttttgtagagacagggatctcattatgttgatcaggctggtctcaaactcctaggctcaggagatctactgcctcggcctcccatagtgctgggattataggcgagagccactgtgcctggcccatcatgcctgtttattccttagtacttaactttttttttttttttttgagacatagtctccctttgttgaccaggctggagtgcagtggtgcgatctcggctcactacaacctccgcctcctgggttcaagcgattctcctgcctcagtcgcccgagtagctgggactacaggcgcccgccaccatgcccggctaatttttgtatttttagtagagacggggtttcaccatactggccaggctgatcttgaaatcctgacctcacgatctgcccatctcagcctcccaaagtgctaggattacaggcgtgagccatggtgcccaaccaatacttaactatttcttaagataatgaatattttcttatggagccacaagagttagtgagtttagaaaatgaaccctgttaacagtactttaattgagccgtctgtgttctagttctgtccagagcccccgccgttttcccctccagcacaggattcatttcaggatcatcacttgcgttatatgcccaaggggtccctctcttggtgtgtgggcagagccagagctgggaacaatgggggtggtgtgtgggttctgggctcaggcttcctggatttggcattggcctcctgatgtcatgtatcggctggaagactcaggacaaccttctgcctttctgagcctccgtttcctcaaacctgaagtgaggatgaaggcagcgtgcatggcttaggggcgttgggtgctcagcatcgtgcgtgagatgctgagtgttcaccactcagtattagccatggatgtctttttggaaatttcccacagccctccccacacagagtcaaatgtcaaaaacctgctgccaactggcacctggttctcacagctgctctctggggctctggggcctgtcagagccacctgtccaagattcaggattcagcacatcacctctgccccacccctaccggcagcattcctttcctacctgtccagcctcttctctgtccccagccacattccccactcctgcccccaaactcttggcctagaaggccctggcctgctccccaggcctcctctgctaagccttgcctacctgtccccactgtgccccccactgcctgcgcatctctggccagcacaggcgtgggaggaactatggctcttcttccttaggaagagtctctgacaagtaggactttgttttcttcccagcatgcactgcagtgcaggtgtcttaacccttggcgcacacacaggatgaaggcagagagccaactattgagggtgggaattgggaagcctcctgcctggatcatcttagaaactggaggccccttttcactcgggtctcccctgtgccgtgcacgccacctcttccagggcccactcaccctgggtggaattggatggccactttgccagaagcttcttcggtcttttgttgtcctgttctggtccattaagaccaccttctcttttctggggggtttccgcctgtcctttgctacggtacttggagacaggtgagctcactttgttctttgctttaagtctgttacctcctgagccaaggtgaggcacctccagggggcagccaggcccctgcctctggccccgcacaccctctacactttgacctttccggctgtttacctgcctggagtgtgcctcactcccctcccctcagttgatcttttactgtgctctctctatgtagcgccctcttgctcccttctaaaactccattctggaaaaactcagccattgtctttttttgtttgtttttttcctgttttaatctttagtgagcctgtgtatccatagggcttgtgaggaaaaacagcggccctttgccccaaccagcatccaccctagggacaatcactttcaactcagtggactcttggaatttgcgcccgtagctctaaaaactgtgctggctgcttctcagtctttcagctcagggcagaatccattgccttccaccaggagagctgaacatcagtgctctcgtggctccgtgagtcctcttagcccctttctctcctctcatctttcctggtagttccccataattgtgatgagaatacctgtgtaggtcagtcatcggagtggtgtgaagggatgtgtggcccagtgacatctcagctgccatttctgcttgctttgccgtgagtgttctttgctttgtttcttggctctaacccaattccaggcttcctcctgattgtttcactcttctctctggccacttatttatttatttttcgagatggagtctccctctgtcacccaggctggagtgcaatggtgtgatctctgctcactgcaacctctgcctcctgagtttaagtgattctcctgcttcagcctccggagtagctgggattacaagcacctgccgccatgccctgctaatttttgtaatttttagtagagatgggcttgctccatgttggcaaggctggtctcgaactcctgacctcaggtgatccaactgccttggccttccaaagtgctgggattacatgtgtgagtcactgtgcccagccaaatgttgctttttttttttttttttgagatggagtttcgctcttgttgcccgggctggagcgcaatggcacaatctcggcttactgcaacctctgcctcctgggttcaagcaattctcctacctcagcctcctgagtagctgggactacaggcgtgtgccactatgcctggctaatttatttatttttatttatttatttttttgagatggagtctcactctgtcacccaggctggagtgcagtggcgcgatctcggctcactgcaagctccgcctcccaggttcacgccattctcctacctcagcctcccaggtagctgggactacaggtgctcgccaccacgcacggctaattttttgtatttttagtagagatgcggtttcaccacattagccaggatggtctcgatctcctgacctcgtgatccgcctgccttggcctccccaggtgctgggattactggcgtgagccaccgcgcctggccaatttttgtatttttagtagagatggggtttctccatgttggtaaggctggtctcaaactcctgacctcaggtgatctgctcgccttggcctcccaaagtgctgggattacaggtgtgagctactgtgcccagcccagtgttcctttttctgccatcctattcttgtttcagggacagaagacctcttattggctggagggtgtccgtgatggcccttttccctgtccatctctcctcgtggtctctgcttccctgcctggccctgtcctcttttgttcgggctccttttcgaggcttgcccaggctgcctgctgaccttggtggtgtgctttctttcagaagaggtgtcagcaggccagctgggggcacccag

SEQ ID NO: 93883 - DNA, 13268 bp, Homo sapiens
  misc_feature (1)...(13268): n = A,T,C or G
nnnnnnnnnnnnnnnnnnnnnnnnnnnnnncattccggcatcccagaccgggaaactgaggctcagaggggaccaggctccggccaaggtcacgcccgaggtagcggcggagctgtgctcgaacccggaactcggattccggagccggctctgcgtaaactcagaggcgcaactttgctagtttcacaactaacaagcgttcacggaaggaaatctgggctatcaagtcacattcacggccgggcacggtggctcactttgggaggcggaggtcgaggcgggcggatcacttgaggtgaggagttcgaggccagcctgccaacatggagaaaccctgtctctactaaaaatatacaattagccgggcgccttgtagttgttaatgtcgataatgtttttttgtgtttttttgttttgggtttttggtttttttgagatggaaatttgctctgttgcccaggctggagtgcagtggctcgatctctgctcactgcaacctccgcctcccgggttgaagcgattctcctgcctcagcctcccgagtagctgggactacaggcatgtgccaccacacacaggcaaatgtttgtatttttttgtagagacagggtttcaccatgttggccaggggctggtctccaactccagtgatctgtctgtctccgcctcccaaagtgctgggattacaggtgtgagtcaccacgcccggccaactttatttttttttgagacagagtctctgtcgcccaggctggagtgcagtggcgcgatctcggctcactgcaagctccgcctcccgggttcactccattctcctgcctcagcctctccgagtagctgggactacaggcgcccgccaccacgcccagctaatttttttgtatttttagtagagacagggtttcaccgtggtctcaatctcctgacctcgtgatccgcccgcctctgcctcccaaagtgctgggattacaagcgtgagccaccgcgcccggccaactttatttttttttatactgacacatgcccatgcagttcttgagtaatgcacagaaaaatcggaagcagtgaaggacaaacagcttgaggaactagtacacagtgaactctagaacacggagcccagggtggaggagcctcggggcaggggccaagggccaagggtcaagggtcacaagaagaaagcatctgagcaggcaccaggggacaggggagagaggggcagctgaaggtcaaagaagaaaggacagttctcagttgtcctgggggccccagtggcagccagaatgcttggccaagcccaaggcaagctagaccaggaaacccctcgccctctggcgacacagacaaatctccccatgggtcaggtccagtggctcatcccaggacaccgcacagacagcggatgtctcacctggcccagcacggttctcccgacccgggctggaggaaagagactgacccctctctttatctcaccctttcctgccgagaacctctgtctatggccaatggatgacctcaggccaagaatgcaataacttggcctgacgttgtgaggtcacggtccatccagggaggggcaagaaaatgaccacaaccatcccgggaggggctggaaagctgcctcatgtgcgtggcactgtgctgcgtctacgtgttcctcactcgcctctacaatgctcatggcacgagggaggaaacgggggtgcagaggctaaggaacgtgcccaaagccctacagctggtgtattagttatatactgctgtgtaacaaattgcctcaaaactttgatgtgtaaaacaacaaagaaactcatggctcctgcgggtctggaatccaggagaggccaggctgggtggtctggctcaggctctcttgtgaagttgccatcaagatgctgccaggactgagtcatctaaaggctagagcagggccgaaagattcacttcctaaaaggttcattcccacgttcccacagctgtgggctggaggcctccgtccctcaccagtgcggcctcttcccaggcgtgtgtgttttcaagccccagcagctggctttccccagagcgagtggcccaagaaaaagagaacacacacaagatagaagccgctgcgtctttaatgacctaacctcagaagtgacacaccatcacttccaacacatctgctggtcacacacaaccctggtagaaagtgaacgggcgtgttttgggaggctgaggcaggagcactgcttgaggctaggtgtttgagagcagcctgggcaacaaagtgagaccctgtctctaacaaaaaaaaaactttttaaataaaatcttttaaaaagtgaaacaaggttacacaagggtatgaaatccagaaggggccattcctgggggccccccttcaagctagttgaggacagagccaggattccaatctcagggagagacacagagaagctagaagcacaggcccagcctggaccctgcaggtgtgcacaccagaaggccctgagttacaaagccagggaaggaagggctctcccagcaaggatcccaacctggattgcatctctagactgaccctgaagctactcagtagcgtctggaaaggagactaaaggggaaaatagggggcagggagatcaggtgagagaaaagggggctctcaaaagacaagagcactggctaggcgctgtggctcacacctgtaagcccagcactttgggagagtgaggtgggtggatcacttgaggtcaggagttggagaccagcctggccaacatggtgaaaccccgtctctactaaaaatacaaaaattagccaggcatggtgatggacgcctgtaattccagctactcaggaagctaaggcagaagaatctcttgaactcgggaggcagaggttgcagtgaaccaagatcgcaccactgcactccagcctgggtgacagagggagactctgtcttaaaaaaaaaaaaaaaaaaaaggtctcctggctgcctctggcccacaaggccctggtcacatgtctgaggctcccaatatacattcgctgggctgcggatacatggatggatggaagatacaaagtcattcagtggtttccaagccaccaggtaaatatcctcccatataagccataccaagggagaatcagacttgactgggagtcaggaaacagaaagttgcatgagatcttaggcaagtaatttcccctccttaaacctcaattatccccgctgtaaaatgggctggctcaacaactgctaaaagtcccaaaagtggaaaatatccagtgttggtaggaatgcagagaaaggggcacgttcatgtaccgatgatgggaacatcatatttcctttaaacctgagcactgggaattcctgtcctaggcccttctctctaaaaggcagaataatgtcctctccaaagatgttctcatcttaatctcccaacctgtgaatatgttattatatagagagacgaattaatcagctgaccttatagctggataattatggctaggcatggtcgttcaagcctgtaatcccagcactttgggaggcagaagcaggaggatgatttgagcccagcggttcaagaccagcctgggcaacacagtgagatcccatctccgtaaaaaactaacaaaaactgggcgcagaccaggcgcggtggctcacgcctgtaatcccagcccttcgggaggccgaggaaggtggatcacgaggccaggagtttgagaccagcctggccaatgtggtgaaatcccatttatactaaaaatacaaaaattagccaggcacagtgacaaaaatttagcccaggacttcaagatcagcctgggcaacatagtgagatcccgtctctttaaaaaacaaacaaaaactgggcgcagacaaggcgcagtggctcacgcctgtaatcccagcacttcgggaggccgaggtgggtggattacttgaggccaggaattacagaccagcctggccaacacgatgaaaccccgtttatacgaaaactaaaaaaattagccaggaactggaggctgaggcaggaggatcacttgaacctgagaggttcagtgagtttgcagtcagctgaggtagcatcactgcactccagcctggacgacagagtgagactctgtctcaaaaaaaaccaaacaaacaaaaaaaactgggcgtggtggctcacaccagtaatcccagcactttgggaagccgaggcacgcacatcacgtgaggtcaggagttcgagactagcctggctaacatggtaaaaccctgtctctactaaaaaaaaaaaaaaaaaaaaaaaaaaaaaaaatctgggcgtgttggtgcatgcctgtaatcccagctactgggaaggctgaggcaggagaatcacttgaacccaggaggctgaggttgcagtgagccaggatcgcgccgggctgggcaacagaatgagactccgtgttaaaaaaaaaaaaaaaaaaaggctgggcacagtggctcacgcctgtaatcccagcactttcagaggcctaggcgggcgaatcaattgaggtcaggaattcaagaccagcctggccaacatagtgaaaccctgtctctaccaaaaatacaaaaaaattagtcaggtgtggtggcgtgcgcctgtaatcccagctactaagggggctgaggcggagaatcgcttgaacccgggaggcggaagctgcagtgagcagagatcgcaccactgcactccagcctgcgcaacacagccaggctccgtcacacacacacaaaccgaactgcaaagtaatagcaaaagtgtaaacccatttagaaaaaacgtgtgtgacataaatgtgataaaaggaacagggccagtctgggagggagtacccggacgctccggagctgtcccagactccaggggcggaaaagccgggctgaagaggtgcccttcctccacgcttctggtgccaatctcccctgctgcgcccaccctgggtccctagcctgggctccaaaccaactccgagctagggaagctccgagccagggtgcttctagagtgtccggcccacccctccgcttcatttcccaagacagtgagggcggggctagaggccaggtgcggaggtgcgggacaggagccaagctgggtcgtagtgggatccacctgtgcgtgatacgtaacagaagggagaggcgaggcgcggggaggtccgcagggatgtgggagacgcgacggggaggactgggacgaaacaaactaggtccgcaagggtataaggggagcagctcggagggttggggcgaggcggggtctacaggggtgtggggggcttggcagggagcgctggggcgacgcggagctccgcagcgttggcggggagcgttgtggggagacggggtctgcaggaatgtgagggcgcggtggggagcgtagcggggtatgcaaggttgtgagggttgtggatgggagggctggggcgaggcggggtccgcagagatgtggggggcgcagagatggggggggtccgcgggcccgccggggaccgcgcagcctcgggctctgtgcccggggccgcgcgggttaactagagaaggtgacgcgcgcccctgttgctcagccgcggcgcgtgccttccctgcggcgatcctaattggcccgacagaagcccgcccccagaagcccctcccacagtaggcaaggccccgcgtgccgcaacgctcccagagttgcgcgtcagcctggactcagcgcctgcgctacgaggctgggcggggcgcggccggatcggtcgagagcgtcctggctgatgacggtctcccgtgcccacgccccaaacgcagtctctggcctggatgtgctcggagcccacgaggtgcagaggctcggacggcgaaagggacctggctgagatctgggtcttaaaccgcgggctcggcccagcatcccggcagcgtgcgcccacaagtgacacccggccgggcgcggtctgcgggatcgcaggcgccgggtctcatctccagttcacacacgggacgaaacgggccacccctaccagctctgagagcatgcacctccaactccatccctccccacatgcccgaccccccaacccgtaactcaggcagacacctgggcgtcccccttcagcgaatgcccacaccgcgggcaggcctgcccctcaccccgcagtcagggcgccctgcatccttctttgtaaaacccatagctgtagagggagcggaatggtggggcagggctgggagcccagcgggagtgagtggtggggaatgatggtggccaaggtcacacaaagcagtgaattcacttcatgtcacagaactgctcaggttacgatagttacttttgttatgtattttaccacaatttttaaaaagcaaaccaaaaccaaccaagagtgcttcccccacacctcaaaatcatcctgcagcagctccctggcccagctctctctcaccctgaccctgggcccctctcccaccacscagggctagccctgtggaccaaccatctctgccagcccctccccgaccctccagccagggaggtggggcgctggccggtgaatggggcaggccaggcccaaaggctggcccagggctcaccagctctggactgggcgtcccgtctgaggtggggatgaccaacatgccagctctgggttttasctgaggatgggcacatcaagcactgacagccagcaagctgggcacaggcgatgctcaacctctaacacatcggctgagaacctcacctgcctctccctgcctgggagccctggcaagacagctcctctcccaggcccagcacaggcaggcgctggacagccacttcctaaggggtgcgcggccgtcaaggcagaggtgggtatccctgcacctcacacctctcaggaggtcaggatccacatccgtcgcctgctttcctgggctgcccctggggcttgtgggctgagatcaaccccttgtgccctgccccaggccctccctcaggcgaggccctgcccaggcaggtggttcttccctggctgttcccttccaacaggtggggcccagaccatcctatctctttggacctggagacatttccttaactgggctttgcagcagagggaagagaacagtggcagagccaggcgcgtacctcctgtgcccaggacagcacctgtaagcaagggggaagggagccacccaccccagaactcaaatggagagaaagtcaagacaatcacccctgacgtggggctgcaccaatccctgacgtctgaccccactgtggctgtcctcagagccaagagggctccagaagcccacccgcctcgaagctgttcagggagcctcacggcccgtgtttgccacatgggtgtgtgccagggccaaggggacacagaagatggcaggatgacactaatggggtgagcagggcacactggtgcctcccatactgccctccagcaccaggcagggtcaccacagccggcaagcactgggcctggggatgtgtgaagagatagggttattgagaagagaaaacagaacgctggtcatccgtggcactcagggctaggcagtccagggagcagaaaacaggggtcccgggcccagtctccctcctggaggtcagagcggagcccctggcactgtgccctggcccagaaccaggctgtgggctccacgctgcacaccccaactcaggagcagaaagcaaacccctgactgtccacactccctgtgactggtccccttcctgccggctcttcacccccagcccatggtggcttcaccccatggcaccagccactgactgcctgcccctccctcccatagtgacactttcctggggtctgcaggtctccggtccacttcatgcagacaggccctgtcccccactggggcccaaggcccaggctaaactacagcccagccatcccaccccaggccgtgaatgccttctccaggagggcaaccaaggatggtgccacatgtgagcacaagcaaaacccggagccaaggcgagtcctgctgggtgcacgtttatcccagccaccgcctccagggcggccgcacaggccctgggcatcaatccagcagggctcccgactcactccctggagaccagctccccaaccacccggccctgatggcatcccgctgcggccaggtgtcctctcagccgaggtccttgtcactgcctagctgcgtccgcctgccacaccagctcacccgagatgtaggtggcctggacgtgaagggagtcgtcgagcaccacgaagtctgggacagagccgggcaatgagtagggggcaggagtggggccgcccacctaccccagagctgctccccaacaacccgacgctggtggggaaactgaggcccagggacacgactagtgcaagacaccctgacccatcacagatggacagaggtactggacaatgctccctgcaaccccttgcctggccttgtctgcaacaccagaaagcccggcctgatggcaacacggggctacaactgaggctggcagccggcagcccacctgagaggagggagctagggaggacccaccctccctggccctgtccaggccgccccaggaacaacagagtctacaggcagggccaggctgcccggtgaccctgcgacaggccctcacctgcgtcagcaccaaagtccagggtccccttactcttctccagccccagcaactgggcggggtgcagggatgcagcctccagggccgactccatgctgcagcctgcttgggggacacagctaggtgacagtccccaagcccacatggctttgccaacagcccccaaccacaccagcactccctgtctcagggactctgcagcaggctaacaaggaccctgctggtctgcctgtcaccctgggcctgagtcaccaagtacccaatgcccaggagctcctgtgggcagagcttgggctacagtccgggcacccggtccagccccttggggacccaccactcacagaccacctaaacccgcacccgtgctgctcactgacctgtggcctgcaggaagtgccggacacagacgtccattggggctatgctgccactcagcgtcttggtgccttgagagcagagagggcaggctctgggggggtcgtgggccacctggcatgcgggctgggacctgggacccagtgggtcagggcgctcacctgccacgtaggccgtcagaccgtccacttccacttcctgctgtcccagcgtgtgccggccgttgcccaggcccaaggcagggatggcatcggtgaccagcaccagccctgggggagaagaggctcagaacctgctagcccagtcatcctacctgtcctggccacctgccgcagcttaccctggggatgggcacggtgggcgatccgcagggcggcggggttggtgtgcgtgccatctgcaatcatcccatagaagatgcagcggcctgcgggcagccggtcgctggtcaggagccccacgatgcctgggtcgcggtggtggaactgggcaggggcgagggaagggatggctgagcgacagcaggggctgctgggaccccagccccgcccctggggccccatagcactcacaggcagcatggcgttgaagaggtgggtgatgaaggtggctccgctccacacagcatcctctgccgcccgcaggtcagccactgagtgccctgcgggacctggattcagactttgcacctggcccaggtcccccaagcaggcccaccccgagccggcccctcacctagggacacgcagatgccacgggccgtcagcgcccggatcacttcgtggctacggcccaactctggggccagcgtcacgatgcggacattgtccaggggcccgtaggtggccagcaagtcctggaaggcatcggcctcgaaggagcggaggtgggcctcggggtgcgcgccccgcttctcccggctgatgaaggggccctccaggtgcagccctgggaggagggagcaagtggctccagcaggtccctgccccacccagcccttatcacctgccctccccaccagctgggcatctggaggggtgggggctgccaacaggtcccgcaggagcctcccagggtgggggcggggaggaggtcagccactcaccgaggacccctgccccatggggaccaccactcttcacagggatctgaggaacaacctggggggaaccagctgttaaagccctgtcccccacagcccattcccagaggccacagcctagccaaggccagagatctcaggtcagagttcagagcccagcacccagcccagccccggccgcctgtcccctcacaggggtcagggaaagcacagccggcagaattgaaggacccatggcaggagcaggaagaaatgataggtgtgtgggatgccagcggtccctggccatgtgggcaggcttgtgggcactgagggtggccctgggcacagcagcccagggagcagggctgggaggcaggaggctcctgggagcagcagggaccctggggcagagctcagtgtgggcatggccagggctcagcactgtgtgtggtccacaccatggccggagctggacgccatcaggaagaccgagtgtgtcagggaacggggggacacgggctcacaccacacatctcagaggctaacaggtgggcaggcagtccagtgcacactccctctctccaacacaggcatgggctgggggagccttcccagagagaagagcttcaggtgaggatggtggctggattgtaccctcccctgaactccccaacccacacaacagtaacactttttttgtttttttggaatggagtttccctcttgtcgcccaggctggagtgcaatggcaagatctcggctcactgcaacctctgcctcctgagttcaagcgattctcctgcctcagcctcccgagtagctgggattacaggcgtgcacgaccatgctcggctaattttgtatttttagtagaggcggggtttcaccatgtaggtcaggccagtttcaaactcctgaccaaacacccaccttagtctcccaaagtgctgggattacaggcgtgagccaccatgcctggccaacggtaagacttttaagagccctaaacctgggggcggggttgggggggtagcagatgatagaaagaagacagccagactttggaggcttggcaagagggacactgggcaggtctgggggagtgcacgcagtgggggaagtgacccccacaggctcaggatggtgccttgagaagtagggtgacgtggggaccaacggaagagtgcctgccctgagtgtgccggtcgggcccccggggaagtagagcagattggcaagggtaggtgtgggcacagcaggaacttgcgaaatgtgtgttctcaaggtgctcagcagggtgccagccaggcccagcccctctgagcactgctagactcttctcagggaacccagccagcccaagagaaaggagccagggaccccaacctacgagtacccccataatgcccctcctgcaggctgggtgcccccagctggcctgctgacacctcttctgaaagaaagcacaccaccaaggtcagcaggcagcctgggcaagcctcgaaaaggagcccgaacaaaagaggacagggccaggcagggaagcagagaccacgaggagagatggacagggaaaagggccatcacggacaccctccagccaataagaggtcttctgtccctgaaacaagaataggatggcagaaaaaggaacactgggctgggcacagtagctcacacctgtaatcccagcactttgggaggccaaggcgagcagatcacctgaggtcaggagtttgagaccagccttaccaacatggagaaaccccatctctactaaaaatacaaaaattggccaggcgcggtggctcacgccagtaatcccagcacctggggaggccaaggcaggcggatcacgaggtcaggagatcgagaccatcctggctaatgtggtgaaaccgcatctctactaaaaatacaaaaaattagccgtgcgtggtggcgagcacctgtagtcccagctacctgggaggctgaggtaggagaatggcgtgaacctgggaggcggagcttgcagtgagccgagatcgcgccactgcactccagcctgggtgacagagtgagactccatctcaaaaaaataaataaataaaaataaataaattagccaggcatagtggcacacgcctgtagtcccagctactcaggaggctgaggtaggagaattgcttgaacccaggaggcagaggttgcagtaagccgagattgtgccattgcgctccagcccgggcaacaagagcgaaactccatctcaaaaaaaaaaaaaaaaagcaacatttggctgggcacagtgactcacacatgtaatcccagcactttggaaggccaaggcagttggatcacctgaggtcaggagttcgagaccagccttgccaacatggagcaagcccatctctactaaaaattacaaaaattagcagggcatggcggcaggtgcttgtaatcccagctactccggaggctgaagcaggagaatcacttaaactcaggaggcagaggttgcagtgagcagagatcacaccattgcactccagcctgggtgacagagggagactccatctcgaaaaataaataaataagtggccagagagaagagtgaaacaatcaggaggaagcctggaattgggttagagccaagaaacaaagcaaagaacactcacggcaaagcaagcagaaatggcagctgagatgtcactgggccacacatcccttcacaccactccgatgactgacctacacaggtattctcatcacaattatggggaactaccaggaaagatgagaggagagaaaggggctaagaggactcacggagccacgagagcactgatgttcagctctcctggtggaaggcaatggattctgccctgagctgaaagactgagaagcagccagcacagtttttagagctacgggcgcaaattccaagagtccactgagttgaaagtgattgtccctagggtggatgctggttggggcaaagggccgctgtttttcctcacaagccctatggatacacaggctcactaaagattaaaacaggaaaaaaacaaacaaaaaaagacaatggctgagtttttccagaatggagttttagaagggagcaagagggcgctacatagagagagcacagtaaaagatcaactgaggggaggggagtg

SEQ ID NO: 93884 - DNA, 26823 bp, Homo sapiens
ttcctttctctcctgggtcgcacctctgtggagtctgggttagacaaatgcaatatgtgacctttcagtgaatttatttataaaactgcaccttgatttttcctcactatttaaagcctagggatgatttgatgatgaatgattaaacccatggtgggcttagagacgacagagctcacacacgctccatcaagaaaaggaaagctactatgttaatatttattttctaaaaatattaaggctctcagttgtttcattaattctaaagggttaaaaagggctgaaatttgtttatagcactaaatgtttttaayaggaaatttactcacataaaaaatttaagcagaagtagtagaatacagattatcataaaacatattttctatgaaaggcatttcttcctcatcttcaataaatatgaagaagttagaggagaggaaaaagcaatcactctaagacaacttttcgtctttgagggacattatgataagcctgaaattaatacgcacaggctattgcatttttctgtgagaaatgtgcccctttgctgtgagattctaaaatgtgttcagatttagtttttattcaaatgatcaagataacgcattagttagataactgctatttcagatagtgaggttagctgagaaaaggaagcatggtagaagaaatgcaaataacaattcttggaatgccaactcctgaggcttagtttaaccaagctaatttgttggcccagggatggccatcatatgagtttccatcaatacctgacttccatcaacaactgaatccatgttctggagtattacagagactgttactatgacctcaaagactgtggctacgaatctgaagttaacaagacatacatcttctcttactaacttaagccatatctgtcaactctatgtttgatttttctgaccctggtgcttttacttctgtttctgccaaacttcagcctactctatggggaaggtgagtaaaactagtagttagaacaaatatgaagactgaaaaaaactaaacatactcttcataatgagatcctgttcagagaacagtagtgatcaaagtgcaaactgttggaaaatayggatatatgtacatctgtacatgtatatagtgtataatatgtatgtatatgttattgctcatatgcagaaatctatccatttgcagacagcccaggtgggtcaatgtttctaatggaaaaccatttagggccattcaaaaccattagggctaatttgtggagacgaattctactcattctggaattaatttgctgtcttttgacatccacaaagccaaactaacaaagtgtgaaacataaaggggccatcatttagtttattctgtttatctggacttataactatctttacatttgaactattaatagttgatttgcaaactgtattggcatctcttggttttgagtgacccctgcccccctcaagtcttttgagaatttggagtgggcttcactggccattcagacaaagggccttattcataagtggacaggtttccccatagggaccatcgcacatatacatataagtacatacttccatcaggcttgtaacaattgatttaaaatcactccacagtattgataaatagctctatattttcaaggtgcagaagaattccacagccttaattatttcagtgtcttgctggtctgccttaagtgtatcttctgggtttttggttattttattatttttaaatttttctgctgttgttcattttgtatgcacacaatgtcgttttgtaaaggtaggttgtaaatattttatttgtaagtcaaaatcactcatgtgtaatgttgtaaagtgatgacctgctgtcttgttactgctacagtaaatgttataagttatggatgaaacttcaaaatgtacatctcacatgttatgcattcctataaatatactatactaaagatactatatggttgtctcttttttcctaattaaacctttgttcaaagaaaagagtaattttttttctttctccaaatatatgaaagacttagaaaaggtaaaaatatcacaggattattacaacatgtttggcccaggattttagagagaaagcaacaattttgtgccctagagtattctaaggcatttacccaaaaatgccaaggaaacctcagagccaggtgtggtggctagcacctgtaaatcctaacactttgaaaggccaaagtggaaggatctcttgagcccaggagtttgacaccagcctggacaaaataaggagacacccacgtccccccaaccccccacatattaaaaattgttttaaaaatattaactgagtgtgttggtgcatgcctgtgatcccatctacttgggaggctgaggtggaagcatcatctgaacccgggaggtagaagctacagtgagctgtgattatgctacctcactctagcctgggcaacaaagtgagaccagaccytatctcaaaaaaaaaaaaaaaaaaaaaaaaaaaaaaaaaaaaaagcctcgggttgttgttaatttcatactggtatttcaggtgataatgttgttagactgtctggagggtattttgggctggatctcacaagtttatacattctggtgtggactccagcaatttgggttagcctatacagatatgatcaggctttgaaagtttaaatgtgccacccacgtgcaaatgaggctgattcatggtatactgtcaattagccagagtgttaaagtgttttgattagcttattttgccaagaaaacaaaaacatgttttaacatttggcttctatttcattaagattttattgcatttatttgtaatgagaaacacttgtcaaaagcatgggctcttcacattggctcatcagcacaatctcctgagaaaatatagataataaagaatattagaaatgaaatcagaatcaggtttatgagttaaaatcataagccccttatgggctttttttttatctagaatttgtatgtattttagcacctatatagcttatgaagcccatttgtaattaatatttcatttaatcccaacaaattcttatgaagtaagttattttacttggattagagaaaactgagtcacagaatctaggtgattgttcaaggtcactgagacattcactggaagataactttttttttttttttggcacagggtctcactctgtcactcaggctggactgcagtggcatgatcacagttcactgtggcctcaacctcccaggctcaagtgatattcctgcctcagcctccccagtagctgggaccacaagtgtgtgccatgatgtctggctaattttttttattttttgaagagacagagtctcatcatgttacccaggctggtctcaaactcctgggcttcccatctctgcctcccaaagtgctgggattgcaggcatgagccactgacctggccctagaacataacttaaaataaatgtgtatgtgtgtgtttcagtgtctctgtgtgtgtatagtgtaggtcaaacaataataaataattaaataacagtacctcagcctatatttttttgaaggggagtggttcagaggaatcaccaatatagttatggaatattagcaaaagccctaatacaaatgataatcagaaccccacaagctcagtctaaaatagatatcagagtagaatacagaagggattcagtaagcaatatagagctaggtccatgaaaaggctcagattgaactactgcatgaaattttacattcatggaaactctttagggtaaatacctaaaatagtaagactaaatattggttaaagccaagatcctttacccagcctaagtaaatgaaatggagaacacaaaatgaattggtacaatctatgttcctctgctttttttgttgttgttgttgttgtttgtttgtttgttgttgttgagacagagtctctgttgcccaggctggagtgtagtggcatgatcttggctcactgcaacctccaccccctcggggttcaagcaattctcctgcctcagcctcccaagtagctgggactataggcatgtgctactatgcccggctaatttttgtattttttggtagagacggggtttcatcatgttgactgggctggtctcgaactctcaacctcaggtgatccacttccctcggcctcccaaagtactgggattacaggcatgagccaccacactcagctctaccaactttttatcaagtgtttttgagtgaactatcttattgaatcttcatagtgatttttggagaaagttaatattattatcttcattctttttttttttttttgagcgcagtctggctctttcgcccagcctggagtgcagtgatgcgatctcggctcactgcaagctttgcctcccgggttcacaccattctcctgcctcagcctcccgagtagctgggactacaggcgcctaccaccatgcccagctaatttttttgtatttttagtagagacggggtttcaccatgttagccaagatggtcttgatctcctgacctcgtgatccgcccgcctcagcctcccaaagtgctgggattacaggcgtgagccaccgcgcccggcttcttcattctatttttgagaaaattgagactcatatagctcaaaatgcattgccaaagatcactcagccagtaagtagaatgggactaaaatccaaatgttttggtttgaaacttcatgttctttgtagtgcactatacagctatgccttatctgttcctcttttttaaaaaagtatttgttatagttgacacatgatatcgtacacatttattgggtacatagtgctatttcaatacacacaatgtacagtgatcaaatcagagtaattcatatattcctcaccttaaatatttatcctttctttgtgttgggaacattcaaacgcccctcttctagctattttaaaatatatagtaaattattattgactacagtcaccctacagtgcaatggaacactaggacttattcctcctatctagctgtaatttgtgtcctttaaccaccccctacccttcccagcctctagtaattactattttattctctagctccatgagatcaacttttttagcttctgcatatgagcgagaacatttggtatttatcttcctgttcctggcttgtttcactaacataatgtccttcaggttcatccaccttgctgcaaatgacaaggtttcattctttatgtgaatttaagggttattttccttaagctagaataaagtattgccttatatacacaatggagaagggatttatttgtacagattatttattgattatttctttaagggatttatttgtaaagaccaaatatgtttggattttcagattgtctagcaatattatcctcctggataaccctgataccaatcaattaaccgtcttctaactctcctccttccctcccttaccttttctacacctattacctaagcatttgaggtacgccaaaggaaataaaaaagtactcctccaggaagcagagtacagacaaaagaggtaatgaatactgtaatgatctaagtgctatatattcctatgtgcaaactgctatggaactgtcacgtactagatgctatgaagttaataaaagaattgagtaaaggtccctgtctttgataacttatattctatttggagaaacatggggggtaaatcktggctaataactagcaaatataacatgttaggccaaggagtagagataattaagagaactagtcgagaaggcattggctattaaaaaatggacaggatttatgcaaactctcatgaaaggtgggacttcatgatcctacagtcaatctagctgttctgggctttgaaccccagcgaccccatccagaagaaaccaggagaagcacaaactggcgctaggttcgctaccatccacctgacccttgagcccggggaaacccacgggtgcagcaagccgggraagctgcagacgaggcaggcggaagaggcgggacttcgcgggygacgtcatcggggcgccggaggcccggggcgcctgggartttgaagcaaacaggcagcgcgcgacaatggcggtcgctcgtgcagctttggggccattggtgacgggtctgtacgacgtgcaggctttcaagtttggggacttcgtgctgaagagcgggctttcctcccccatctacatcgatctgcggggcatcgtgtctcgaccgcgtcttctgagtcaggtgctggcctaggaagggaaaggacagggcttggtggcgggaaggaggacaaggaaatggaagagggtgacaggagttgggccgtgagtgagagcaaaagagccaagcaggcagaccgaccctactcttggtttggggagtaagcatgagaagcacagaggccaggggttgggctcctcgagagtcgtctgttctttcacccacacgcttagacacgtgttttgcaaaagtcgggaaacccagtttggaacgctttctggcactgaagcacacttgaatgaattctgtatatttaactctttaagaaaattagacttgcggccgggcgtggtgcctcatgagwgtaataccagcactttgggatgcctaagtgggcagatcacctgagccccaggagttcgagaccagcctgggcaacatgacgagaccccgtctctacaaaaaattagctgggtgtggtggcgcacgcctgggacgctgaggtgggaggatcacctgagcctgggaggtcaaggctgcaatgagctgtcattgcgccactgcactccagcctgggcgacaagtgagaccctgccctcaaaaaacaaacaaatagaccgggaaaacstgggtaggcagagaattcagtagctgggaaattactggtgagaaaaggaaaatagaacaaccagaactctgtgatgtatacaaaatttatcagagcccagagagacttcaaccatactcccctatgcagccccgggacaattatttaaaggaattttgtccctgactagctgcctcccccattatcttaatgtacctggaatktgtgatacaaagaacaatgtatagctaatcaatcgcttgtgttattattttatttatttattttttagatgggatctctcttacgtcacccaggctggagtgcagctctgtgatcatagctcactgcagcctggaactcctgggcttaagagatcttcttgcctcgggtgagcacaggggctcatgcctgtagtcccaactttgggaggctttctttgggaggctgaggcgggtggatcacttaaggtctggagttcgagaccagcctggccaacatggtgaaaccctgtctctactgaaaatgcaaaaattagctgggcatggtggtgcacacctgtaatcccagctactcaggaggctgaggcagaagaatcaggaggttgcagttagccgaaattgagccactgcactccagcctgggcaacagagggagactgtctcagaaaaaaaaaaaaaaaagagatcctcttacctcaacctctgagtagctggaactacaggcatgtgccatcatgcccaccaaattaaaawttttttttttttgtagagaggaggtctcaccatactgcccaggctcgtctcaaactcctggcctcaaaagatcctcttgccttggcggcttcccaagtagctgggactacaaatgcctggtgccacccccgggctacctcctgttatttcaatgcaaattcttggtgaatataggaactgccccttcttttgctttaaaaatccacttgtaactactgtaatcgaagcctayagtcagggcaactactmatattaattttgcctcagcctcttcctgttaggtccacacttggaagggctgtttggaaaggggagttgaattttgcactgtgcggccagaagcartaattaagactagaaggtggacatattgggaaagcaggtttttagtcaatataaggaaaatttttgtacaaattagaggtttctaatacagtgcttctcaactttgagtatatatgaattaccygggaattttgttaaaatgcagaatccatttctgtagctctgagactagacctgaggttgtgcatttctaacaaagtgccagctgaaactgcagaccacactgagtagagggccgtaaatatgctttccaatacagtttgctactagccacgtgttactattgagcattatgaatttttaagtttaaatagtcatatatggccagtggctatcatattggactgcaaagatagagaacatttccatcattgcagaaagttctatcaagaagacatataagtttcctmagcccacttaagggtttatgttcactagggaccactttgtgtggttattgtaaaaagtattgaagataggttggactattaaggttgcggtactttggaccattaacttctcaccatccagaatcttgctatggtgtatcttagcaatgtggagaattactaaggattttctagggaaaaattgatttattttaataagccagctgataaatgacagaaaaagttttttgataactagatcatggtgtgtgtgtgtgtgtgtgtgtgtgtgtgtgtattttggtgattaactggggaggagttcaaaacatggagagacttgggtataacaaaacttcttttcacatcttatgcgaatagaatttctcagtatttacaccccaaaaagcaatataatttatgctaaactctaacttcccttaataagtgataataagtgatatttgactatagtactatatacacattagtgtacataaagtaattggagaggaaaggtagcattaactcactaaaaatgcattttccaaatctgtttttatctctctgtcaaaatttgcaaatcatgtttgaattaatcatatgcttgttataatttaatgatatacagaagaattctcttctttaaaaagtacaatttccattttcttttcctcaagagaatagtttctcttcagtccttaaggattcagctccttacatgggctttggtgagggtcatgaggcagcacccacaggtttaaatcagattgggktatttggtccttgtgggattcacaagatggattactgactgccttgctgtgaatggcacaactcacaccttaatgtagcttcgcatacagcttgggaagaacataggaggcaaagttgctcactgcagtaatgtccctgactgctgcggcctctactatgttttgcacgacgagcttcttaatggtcttttccttgggcatgcatcggacatagtatgtgccactactggccacagccctttttggcacgatcattgttcctttcttttctttgtcatcttggaagtaaggacctgagagagctacagaagaattcttgacatctagagacttatggtcatgggaaatttttttttaattaccattttaaatttcagtttacatacatatagacaagtatgacagagggatcagtaaaagcttttcaagtataatcatatattactttagaataaaattctgtggacacagtggagtgaaaatatgagttggaaaaagatgtaaaaaattttaaacttttcatagtccagcaatttcacgttttgtttttttaaatggagatggtggatatccagtcactagcatttgtattccaagtttattccttaaaaagagtgataaaacagttctaagataatatgttaatatttttagtactagaaattacattctctgcaacttaaaatagtcatagtttttttttgtttgtttttttactctttagaagtactggtgtaaacctatgatctagttcacaaagcaactcagtgactgtttgcttttttaaaaaraaaatgaggtggtcttgggtgggaatatgtatcctaacattaaaatatgatgatttatgtggaaaaggagattataaaatagcaattcacacaatagtctgtatttatgaaacttcctaattgaaggcttctttcaggatatataactaaaagatgataggtttagatactcagcctaatgggttactgaggaaaccaggaagtcgggatcgtccttagtctttggggtcaacatcatgagcttccccagcacatctcaggttgccttyagaacagattctgagtctggttgaatagattcattcttgtgtttttagatttatatttgtgtactgggtttatggagagggtaataaaaaggcatttgtttttttttctccaatcaagtttgagacttacccccactagtttattactgtcttttctgttacgttgttacatgtttatacactatttaaaatagttacaataggctgggcgcagtggctcacgcctgtaatcccagcactttgggaggccgaggcaggtggatcacaaggccaagagttygaggccagcctgaccaacatagtgaaaccccatctctactaaaaatacaaaaaaattagctgggtgtagtggtgcgcgcctgtaatctcagctccttgggaggctggggcaggagaatcacttgaacctgggaggcagaggttgcagtgagccgagatcgcaccactgcattccagcctgggcaacagggcgagactccatctcaaaaaataaaaaatataaaataaaataaaatagttacaataaaacattgtttatgtgttcattttcttacaggttgcagatattttattccaaactgcccaaaatgcaggcatcagttttgacaccgtgtgtggagtgccttatacagctttgccattggctacagttatctgttcaaccaatcaaattccaatgcttattagaaggaaagaaacaaaggattatggtaaaataaaagtaacataaagcatgaagttaattaatctgtaacatcatactcttagaatttttccgcttctgtgcactratgttttaccagtcatcttgagttctttaagytgttactgcttgtagaatttataattgttactataagtcaccttcctttttttagacttggggtgaaatgctttgtattgattaggaaatgaaaagtgctttttttggtactgtatctatgaaactccaacattttttttttttaccagcccttccctcatcagcaaaatgttgtaacagcacatactttcccagtatgtttgtatttaaacttcatgaaaagtaatccatggataaaattactctcataaagcagtgtaaacacctcagagagatatttttgtgggttcatggcaatagattatcaggtgacttgctttaaaacccgaaaatttgtccaggcaccatggctcacgcctgtaatcccagcacttttggaggccgaggtaggcggatcacttgaggtcaggagttcaagaccagcctgaccaacgtggtaaaactccgtctctactaaaaatacaaaaattagctgggygtggtggtatgcacctgtagtcccagctactggagaggctgaggcaggagatgcgcttgaacccaggaggtggaggttgcaatgagctgagattgcgccactgcactccagcctgggcgacaaagtgagaccctatttcaaacaaaaaaaaccctgaaaattggccaggcacagtggctcacacttgtaatcccagcactttgggagggcaaggtgggaggatagcttgagcccaggagtttgagaccagctttggcaacgtttgtctctacaaaaataaaaaaagaatacaaaattagctgagtgtcacagttacatgggaggctgaggcaggaggatgccttgagcccaggagctgaaggttgcagtgagctatgattatgccactgcactgcaccctgggtgacagagcaagactgtcaaaaaataaataaataaaacctgaaaagcaatcttaatgatagtaaggaattaatgggcttttttgtttatgttggtttattagtgttttgttactttttttaaaacaratccttcttctacagatgcattctgaaaatttttatgattaaaaaaaagaaacatattagttgagtttttgtggcgtaagggcagtgttagtttttctgtttttgttttttgtttttttgagacaaggtctcactctgttgcccaggctggtcttgaactcctggtctcaagccatcctcctgcctcatcctcccaaagtgctgggattacaggtgtgagccactgcacccagctgagactttctgagctaaaaaaaaactgtatgaatccctacccataagaaaactcttatttctattattttatgttttaaaaactgtttctatgaaattatgcatttttaaatatactataaatacttgcagtcttgtgttctagcttaagctgattcagttaaacttaccagttgttcaagaagcggaaaggatttgatgagtctaaagtctacagcccaagttatttacrttttgtagattatctgaaaatagtctagtgggatttgggtagagaagtatatatttaatcacattgcattatataattctttagattgtagtaatgggtctaaatgattgctgaatatttttccttctgaatttgtgtcttcaaaaagtcaattatttggctgatcttgaatagtgaacttaaaatactttgatggaaaaaggaattatttcattcatgatactggattattctgtttcataactttccttgatctaggtgatcttgctgtaagaaactctgtatttaggctggacgtggtggctcacacctataatcctagcattttgggaggctgaggcgggaggatcacttgagctcaggagttcaagaccagcctagacaacatagtgagacctcatctctatgataaaacagatttttttaaagtaaaaaaaaaacctctctatttgaaaatttgatcataaaacacattaagcagtgtttataatgtgaaataatttacttgatttactataaatatactgtatgtgtaactggcaagtttggtatacagagttggctttatacataaatatactgtatgtgcaactagcaagtttggtatacagaattggtatacacatatactgtatgtgtaactggcaagttttgtatacagagtgtgtgtacgtatatacgcacatatacatacatatttaaatttggaatcagcaaaattttttcttttctaggaactaagcgtcttgkagaaggaactattaatccaggagaaacctgtttaatcattgaagatgttgtcaccagtggatctagtgttttggaaactgttgaggttcttcagaaggagggcttgaaggtcactgatgccatagtgctgttggacagagagcagggaggcaaggacaagttgcaggcgcacgggatccgcctccactcagtgtgtacattgtccaaaatgctggagattctcgagcagcagaaaaaagttgatgctgagacagttgggagagtgaagaggtttattcaggagaatgtctttgtggcagcgaatcataatgsttctcccctttctataaaggaagcacccaaagaactcagcttcggtgcacgtgcagagctgcccaggatccacccagttgcatcgaagcttctcaggcttatgcaaaagaaggagaccaatctgtgtctatctgctgatgtttcactggccagagagctgttgcagctagcagatgctttaggacctagtatctgcatgctgaagactcatgtagatattttgaatgattttactctggatgtgatgaaggagttgataactctggcaaaatgccatgagttcttgatatttgaagaccggaagtttgcagatataggaaacacagtgaaaaagcagtatgaaggtaagtgtattattcaggaatctgcaagaatcagaaatccagcttaaactgaagaagaaaaaggaaatgctcatgtcattgaaagtccattcatagagcaggctgtcaagcgtggttggatccaggagctcaagtgatatcttcatgacttgctttctctccatctctcagctctgctttcttctytgttgacttctttctcaggtaggcatactctgcatgctcaccccaaaccaatcactctagcttgggatgtagaataccttcattaactagcctgggcaatttgctctgcaactgtgaggttgttaactctgtatgaccttcttgaaataagaaccagtcagggataatttccttaaagaaaatggatgtgctagtaccagaagaagggtakgtgyctgggcaagcaaatttgacagatgtccttggcagaatatgatgttttgaatgaaaattccacataaaggaaacaatgaaaaagaaatataaaatggtaagatttatttgtagcagaaaaagttctattgataaacattatttaaagatttttcttttatcaaatagggactcaaagtagtgcatgtgttggttgagaaaaatgcttagttctactgcctattctatgcaaatttctgtctatgtttttacaactgtgtgatcagactatatttaatgcatttttcacttaacctggtaacagatatttggttgtgtcatataacattttttgtaggcatctttgaggtaacttttctttaatgtatgcatgttcataagctatttctttaaaatagatttgtctttaagtgacttcttcatgtgcttaagatgtcctgccctcatcacattgcctagcttactttagctgattgactgacataagagttttatacaaactttcttcagctctgcatagagttttttcgaaaatcaggcttgttactgtccgcttttaaaaggaatatagttgcctattgaaattagatagctaaggagatctaaggaacacgtagaaatattgagcgatagtaaagctgctgagagacccctgcagagtgaaaacttgtcatcttcaagaagaattttatttttattattattttttttgagatggggtcttgctctgtcgcccaggctggagtgcagtggtgcaatcttgactcactgcaacctccacctcctgggctcaagtgatcctcccacctcagcctcccaagtagctgggaccacaggcatgcgccacyacacctagctaatttttttgtatttttggtagagatggagttttgccatgttgcccaggctggtctcgaactcctaaactcaagcaatctgcccacctcagcctcccaaagtactgggattacaagcatgagccaccatgcccagcttcaagaggaatttttaaatgttatccttgacatcaataaatgtttatcttcactggagtccctttctaatagcatgagctttatttgtggtcatgagcttcagccttcaaggaaaaagagtcctgttagtgttccagataagccaagtgcagaccttgaaagttttttctcattgtgatctctcacccagctacttacctgaataacagatacagttttcacagatggaaccatgggtctgctgataatcactaaagttcctgaagagttttgattctctcattaacatgttactgggagattatttcatattgtagttggttggttggacaagasgttagaggttttgtttgaaaatcagcaaatatcttttttcccccttcttcttaggaggtatctttaaaatagcttcctgggcagatctagtaaatgctcacgtggtgccaggctcaggagtwgtgaaaggcctgcaagaagtgggcctgcctttgcatcgggggtgcctccttattgcggaaatgagctccaccggctccctggccactggggactacactagagcagcggtaagtggtggggggactgggtgagagggggcaggggctgctatgctgcatgctgcaagaagatatctcctaatctggcgtttctggaacctctgccaaaaaaaaaatccagctcttgttagtgtgacagtatattaatactagttggatagaattccttgatagttaatagcattttatatcatgtagtggacacttcaggaatttgaattatactccaagagaaactttgagacccagatagttagtcaaacaaacacttactaaatctaccaggactttaagataatgtctttttcatcttaccatgaattgagagaagatgagaagagcttcccagacatgcagtttctcagaatctcccaagtcctacagagatgcacattcccatgacagcagcccacatgcagtggctttctcttattcttgtcagatattttagaatataatattactttaaaaaaattgccatagggggctgggcgcagttgctcacacctgtaatcctagcactttgggaggccaaggcgggaggattgcttgaggccaggagttggacgtcatagtgagatctcgtctctacaaaaaaatgaaaaagaaaataaccaggcatggtggtacgtgcctatagtcccagctgcttgggaggctgaggtgggaggatcgcttgagcttgaagttcaaggctgcagggagccatgatcatgccactttacctcagcctgggcaagagtaagagcctgtcaaaaaaaattaaaaataaaaagccccaagaaaatccccatgatttttttaaaaatgaaatccccaagacaatccccatgtgaagattctagaagtaaaggatttccattttttcatattatttcagactatttggagacttaactcatatggccctacagtcaggttttaaccctatccctgaattgactataactgtctgatttcccaagtctcaaaatcacaggggccatgagtcagttttaatatttggcattctgggagtctgggtctggctcaaggacaagacatgacttgtttgttggcagtagtacttggtggcaagaatgaatgtatcaatgtgtgtctcaggtctcgaagtaccgaggctggagtgcagtggtggtactgagtctggtctccgggaagtatcaaataagaagggaagtatgggagtcacgtctcggggaaagtacctaccgaatcagaaagccaggcagaccttctaaagagacttttatgaatgtgagataatagtatagaaattggggagaccagttgatgttacagaagagggaaagtggtagaggtgagatttctttagctcttgaaagcgtagctgttctttacatgacagctgcctttggatatggagtaccccrtctgtagatagtcagtaagccttgaatgtggtttcataccattataatatgttctagagtactcgcctcaaatcctttttggaagtaggtgggtcaccaagcattattagaaataagaaattatgcagcatcttgattttagatgcatatagtataggatttctgctttacgtatggtttattgcgggaagggaagggaaagggtcatctcagagtcttaatgaagcagatgtgttttattatggtttctatctaagatgacctgtttcagatatagtaactttatatatatggaatgagaaaaggcatctataatacagcaaagtttctaactagatamtagagcataagccaggcatggtgacttacaactgtaaccccagcactttgggaggccaaggtaggaggatcccttgagcccaggggttcaagaccagccagggaacatagggagacctcatgtctttttttttttttttaagttttgaaaaaatagagcatatttttacttttattctgtgtgattaactgttttcttataatatgtcctattacattccatttaggttagaatggctgaggagcactctgaatttgttgttggttttatttctggctcccgagtaagcatgaaaccagaatttcttcacttgactccaggagttcagttggaagcaggaggtaaatctggtcactggtcgtggctcttccaaaaatgcttctttacccatggcaggcaaaataaaactttgcatattattatacacttgcttaagaaaagccttcttagtctagaacaataatgaatgagccctttggtaactatgtatctttggacaagtcagtttacttcttttagtctaattgtctgtaaaatggggatgataacagtattgacctcataaggtaatcaagatgctttaatgagataacatgtagaatatttaacacaatgtcttggcacagagtaaacactctgtacttataagcccttattcgtaagccctaataattgtttgactagatattatagttagggtctaggcttttaagaatacttaaagtatcttggatttggaagataataagccatttaacagaatgcttctgaaacagcggaatttaataaaaaagcaaaatttaaggattcgggtttatggatagtctgtgtgaccacttgatggggttcttgtatatggtagtggtcaggttagacttgctcagcagtgccttgtggtgattctaagatgtgtgctaaaattttcttcaattgtgaggccaatctttattgtatttttttgatattgaacctttctttgcaayatatgagttttacttctttttttaatatattgttaagctacagatgatytaaaatttgacattgagggggtgaatatttagggcaacttgaatttatgcttctggaaaaaaattacatgaaaaaataatgataaaataaataaggctgggtgcgggggctcacgctcgtaatcccagcactttgtgaggccgaggtgggcagatcacctgaggtcaggagttcaagaccagcttggccgacatggtgaaaccctgtctctactcaaaatacaaaaattagccgggcgtggtggtgcacgcttttaatcccagctactcgggaggctgaggcaggagaatcgcttgaatccgggaggcgggggttgcagcgagctgagattgtgccattgcactccagcctgggtgacagagcaagactctgtctcaaaaaaataaataaataaatagggcggggcgcagtagctcatgcctgtaatcccagcactttgggaggctgaggcgggcggatcatgaggtcaggagatcgagaccatcctggctaacacggtgaaactccatctctactaaaaaatacaaaaaattagccaggcrtggtggcaggcgcctgtagtcccagctactcgggaggctgaggcaggagaatggcatgaacctgggaggcagagcttgcagtgagccgagatagcaccactgcactccagcctgggtgacagagcgagactccgtctcaaaaaaataaataaataawaataaataaataaataaataaataaaataaactttaccattgaaaaggagttggtgatcatctttctccatttgacgtctctggcctacccagtgagtctcttcagctcctgtttttacgcagttgctgtacaaaaggggaacgaaagtaggggcatgtttttatttaaagctggttagatactttttcagagaagtcatgtgacasgttttctgatttttgtattatgtgaaacaacaatttttgtgtttcttgcaggagataatcttsgccaacagtacaatagcccacaagaagttattggyaaacgaggttccgatrtcatcattgtaggtcgtggcataatctcagcagctgatcgtctggaagcagcagagatgtacagaaaagctgcttgggaagcgtatttgagtagacttggtgtttgagtgcttcagatacatttttcagatacartgtgaagacattgaagatatgtggtcctcctgaaagtcactggctggaaataatccaattattcctgcttggattcttccacagggcctgtgtaagaatgggttctggagttctcatggtctttaggaaatattgagtaatttgtaatcaccgcattgatactataataagttcattcttaagcttgctttttttgagactggtgtttgttagacagccacagtcctgtctgggttagggtcttccacatttgaggatccttcctatctctccatgggactagactgctttgttattctatttattttttaatttttttcgagacaggatctcactctgttgcccaggatggagtgcagtggtgagatcacggctcattgcagcctcgacctcccaggtgatcctcccacctcagcttccagattagctggtgctataggcatgcaccaccacgtccatctaaatttctttattatttgtagagatgaggtcttgccrtgttacccaggctggtctcaactcctgggctcaagcgatcctcctgcctcagtctctcaaagtgctgggattacaggtgtgagccactgtgcccagcctaattgcagtaaracaaaaattctagggcaccaagaggctaaagtcagcacagcttttcttgtgtcctgtattctctgtctaatgtgttgcccaaataatwyctaattgttagccattcccctccatctctggcctaaaagtgatagtccaggtatccacatgggctggttcccagaactgccattgctcactctccaaagaggggaaggtggggaaggggaaggtgactatagctcagctcctgagctagtatctggctgttatttcaacaaccggagttggggtttgggctcattttttcccctagccagcaattatggaccagtagtaacacaagtgacagcttcctgtgactgayttcacaattaggaggtctaagattccatttgggtatttgcttaaggatcccacataattgtcccaackgtcattagtagaggggaggtaagccttcattaataataaagagaaagcccacattcaaggtggtgtttgagcaggggcagggtgagggctgtcccggtgctcattgcaccagcacactcacattccttctcatttggggcccacctgcaggaagtggcamaggatcagccatttccccacccttgtcagctgatggcccactgttctttaatgactcagaggaatgcctaggattttttttttttttgagacagaatctcactgtcgcccaggctggagttcagtggcacgatctcggctcactgcaacttctgcctctctggttcaagcagttctcctgcctcagcctcccgagtagctgggactacaagcctaggatttttaactcaggtttttattatattccctcctgaagtttttacttcaagagcttctgctctaaagtccaatttgggcttcatgtccccagtgctgcatctccagggaaatgctgtctgtgggagagaccaactctcaaggaagaagtggccacagaaggagcaggaagggagttggccctcagggctactctggggaagccaaaagtcatgaaggggagaagaattttctgacaaaaacttgcaggaatctcttaggtgtcttcagtgttggagtgatatgttgagaggcctttggagtgatgtgctgaggtctcaggcgcccacctccctggctgtcacttccatgtgtcagtggttctcccactttagcaggtatcagagtcacctggagtcttgtcaaaacaggtaccagccccacccgcagcgtttctgactctgggtagctctgggatggggcttgagaatttgcgtttccaaaaaggtcccaggtgatgctgcggttgcctgcgcagggactggactttgagaaccacttcactggttattcacatttctgcctctgcagtgagacagccttgaggtctgcctcctgctaagagtcacatgctcctgtcctttagaaatgtgggctcctgccatctccaggacgcaggcactgttcctgttgatgaaccctatttcacaggacccctgctaaggtgatttgaggggaaatgagaggaggctcaaataatcacccagcccctgccacttactgaaagtgtaggtccttgtgccccacaccatcagagtttctgcgttagcagatttgtggtttgcccagcagcctgggcgtgtgcatttctaatgggtgcctcaagtgatctgtttctgatttgtatttctattgtgaagagtcagcccagtactgcaggcctcttacctaagcagaatcccagtctggcatcaaagctttagaggacaagttgattcaggcagagaagaacttgggctatacaagcgctgttcttcagcattgaagtattttggaggcattagatagtttaaccctttctcagtcaaggaatatttacagaacatgatctctgggcattgtaactcctggtcttagtggggaatatagggaccccatgtctccatggggtgcacagaatgtctgtgagactgatggagtggagaacgccatcccccagcctctccagctactcgaggcattctgtagaacataagcccatagattgtgtgtgtgtgtgtgtgtgtgtgtgtgtgcatgcgcgcgcgtgcgcactggaggaacctaagaaactatttggtgcacttcctcttattttagagctcccaaagtgtagctccagaatcgtaaagggatatgctcagtctcacagccagcctgtggatctcagtcccaacactcacccttgtgctactgagtcagctctaagaaaatctgccaaaagtaggccgagggctggttttttgttttgttttgtttgtttgatacagggtcttcactctgttgcccaggctggagtatatcatggctcactgcaaccttgacttgggctcaagcgatccgctcaagtagctggaactactctcaagtagctctcaagagcctctcgagtggctggaactacaggcgtgcaccaccacagctggttaatttttaaaattttttgtagagacggtggaggaggttctcactgtgactcagtgtgtgcccgacagcagagcccacaccactccagttgcagtggttgccatctgggtcatcagacctggctgtcaggggtgcagccacaggagagccaacagcagagggtgctggccgctgagctagctgctaatgctggcctgggtgcagttctcatccaaagtacccggtgggtgggagtcactcagtaccagttccgagcctgaacccaaactctcgtgtttctgctcacccctctctggcttctgccaccacatgggaagaatatgccctggttagcccatggcttctgaagagcaagagaaagtagagcagagcctactccagcctcccccgtccaatgtatgaaagccccagctgatctgtaagcctgggagcgtgataaatgcttagtagtgcatgccatggagttccagggtggtttattacacggcaatatctagctaaatacatttaacttgctgcagctctctggatccagcctggttaccaggaagacaaaaactgggctccaccaggaaccagtcttctgccttcccaaccatcacctctggctgcatcagcgatctctcccagcgaaatagctgcttggtcttgtgtgaatcctgtactttaacacagtggaccaagtgtcagtcattgaaaatgaccatgagtaaccctgtggactctctgcagcttggttcctttgccccttaacaggtgggtatgaatcgtgtcttcagtgccagggctgaatgagaaagggcattcctttttgaaggaatctgatactaaacacaaagcatgagaaaaatcaggacttgttggagttatatttttaaaatatatattttaacagttatatatattagatataatatataatagtatatataaataatactatattgcccaggctggtctcgaactccttagctcaagtgatcctcctgccttggcttcccaaagtgctaggattacaggtgtgagccactgckcccggcctgttggagttctttacatttattttataatcaatgctgttttattaaatgcggattttattttggattacaggatgtagaatgccatatttttcttagatcatagggcctttcacatttgtaatttggccttgtatgagttaccctgcaatccctttgttttccccataaaccttccaaaggaaggccgcaatagaaatacaaagagaaacaaaataattagaatattttttaacttctaaagttcaaggttttggcataagtctggtttagaagcacatttgcctagccctttccttcccaccaagggggaaagtcttcctctagacaagaggcagagggctcctcagagtcagatcctggtgtgggctctcacgtgctgctgctgaatcccagggaaggagggaggaagggcagttgacacccaaaataagggtggggaactgtcagcagaggaggtctgtgtcatgtttttcagcgctggggttggggggagcccaggagagcaggaagatccagagatccctcgccccagctcggccatgtgtgtctgggacagagcctgaggtggcctgagcttcctgtggctccagagtaacattatagagaagctgaattctcctgtttttctgaaaagggcatgggagttagctgagaagcagacctggtgggcctgagagtctcaatcgtcaggtaaggacagtcagtgggaagtggacgggccgcacaaccaaggttctcatgaggacaaccatgtcttcsggggtgcccttgtgcacagacagctccatagtcctgcctccaatgtcccaacactgcattgtctccctgcacttagcagccctgcagggtgagacttggggaggatcctgaaatgattgtatttaacaagacatgctgtccttgtttacctggaacctagcaatgttgttttctgccacaacttgaatagatacttgaagcagagatgatgttgagttaaaaaaaatatatacataaaaatatgggttcttttcaacctgaatagatggcctaaaaattcaaacttgcctcatggcatttgttcaaggaaaaccggtataggtagtctttgacctcctttcctcccttatcctttgttcttccttctgaggactaaactctgatttatttatttatttatttatttatttatttatttatttattgatcattcttgggtgtttctcgcagagggggatttggcagggtcacaggacaatagtggagggaaggtcagcagataaacaagtgaacaaaggtctctggttttcctaggcagaggaccctgcggccttccgcagtgtttgtgtccctgggtacttgagattagggagtggtgatgactcttaacgagcatgctgccttcaagcgtctgtttaacaaagcacatcttgcaccgcccttaatccatttaaccctgagtggacacagcacatgtttcagagagcacagggttgggggtaaggtcacagatcaacaggatcccaaggcagaagaatttttcttagtacagaacaaaatgaaaagtctcccatgtctacctctttctacacagacacggcaaccatccgatttctcaatcttttccccacgtttcccccctttctattccacaaaattgccattgtcatcatggcccgttctcaatgagctgttggatacacctcccagacggggtggtggccgggcagaggggctcctcacttcccagtaggggcggccgggtagaggcgcccctcacctcccggatggggtggttggccgggcggggggctgaccccccctccctccgggacggggcggctggccaggcggggggctgacccccccccacctcccggacagggcggctggccggacggggcggctggccgggcagaggggctcctcacttcccagtaggggcggccaggcagaggcgcccctcacctcccggatggggcggctggcccggcggggggctgacccccccacctccctcccggatggggcagctggccaggcggggggctgaccccccccacctccctcccagacggggcagctggccgggcagaggggctcctcacttcccagtaggggcggccgggcagaggcgcccctcacctcccggatggggcggctggccgggcggggggctgaccccccccacctccctcccagacggggcggctggccgggcggggggctgacccccccacctccctcccggacggggcggctggccgggcagaggggctcctcacttcccagtaggggcggctgggcagaggcgcccctcacctcccggatggggcggctggccgggcggggggctgaccccccmacctccctcccggatggggtggctgccgggcggagacgctcctcacttcccagacggggtggctgccgggcggaggggctcctcacttctcagacggggcggctgctgggcggaggggctcctcacttctcagacagggcggttgccaggcagagggtctcctcacttagacggggcggccgggcagagacgctcctcacttcctagatgggatggcggctgggaagaggcgctcctcacttcctagatggggtggcggctgggcagagacgctcctcactttccagactgggcagccaggcagaggggctcctcacatcccagacgatgggcggccaggcagagacgctcctcacttcccagacggggtggcggcggggcagaggctgcactctcggcactttgggaggccaaggcaggctgctgggaggtggatgttgtagcgagccgagatcacgccactgcactccagcctgggcaccattgagcactgagtgaaggagactccgtctgcaatcccagcacctcgggaggccgaggctggcggatcactcacggttaggagctggagaccagcccggccaacacagcgaaaccccgtctccacccaaaaaatacgaaaac

SEQ ID NO: 93885 - DNA, 19881 bp, Homo sapiens
  misc_feature (1)...(19881): n = A,T,C or G
nnnnnnnnnnnnnnnnnnnnnnnnnnnnnnnnnnnnnnnnnnnnnnnnnnnnnnnnnnnnnnnnnnnnnnnnnnnnnnnnnnnnnnnnnnnnnnnnnnnnnnnnnnnnnnnnnnnnnnnnnnnnnnnnnnnnnnnnnnnnnnnnnnnnnnnnnnnnnnnnnnnnnnnnnnnnnnnnnnnnnnnnnnnnnnnnnnnnnnnnnnnnnnnnnnnnnnnnnnnnnnnnnnnnnnnnnnnnnnnnnnnnnnnnnnnnnnnnnnnnnnnnnnnnnnnnnnnnnnnnnnnnnnnnnnnnnnnnnnnnnnnnnnnnnnnnnnnnnnnnnnnnnnnnnnnnnnnnnnnnnnnnnnnnnnnnnnnnnnnnnnnnnnnnnnnnnnnnnnnnnnnnnnnnnnnnnnnnnnnnnnnnnnnnnnnnnnnnnnnnnnnnnnnnnnnnnnnnnnnnnnnnnnnnnnnnnnnnnnnnnnnnnnnnnnnnnnnnnnnnnnnnnnnnnnnnnnnnnnnnnnnnnnnnnnnnnnnnnnnnnnnnnnnnnnnnnnnnnnnnnnnnnnnnnnnnnnnnnnnnnnnnnnnnnnnnnnnnnnnnnnnnnnnnnnnnnnnnnnnnnnnnnnnnnnnnnnnnnnnnnnnnnnnnnnnnnnnnnnnnnnnnnnnnnnnnnnnnnnnnnnnnnnnnnnnnnnnnnnnnnnnnnnnnnnnnnnnnnnnnnnnnnnnnnnnnnnnnnnnnnnnnnnnnnnnnnnnnnnnnnnnnnnnnnnnnnnnnnnnnnnnnnnnnnnnnnnnnnnnnnnnnnnnnnnnnnnnnnnnnnnnnnnnnnnnnnnnnnnnnnnnnnnnnnnnnnnnnnnnnnnnnnnnnnnnnnnnnnnnnnnnnnnnnnnnnnnnnnnnnnnnnnnnnnnnnnnnnnnnnnnnnnnnnnnnnnnnnnnnnnnnnnnnnnnnnnnnnnnnnnnnnnnnnnnnnnnnnnnnnnnnnnnnnnnnnnnnnnnnnnnnnnnnnnnnnnnnnnnnnnnnnnnnnnnnnnnnnnnnnnnnnnnnnnnnnnnnnnnnnnnnnnnnnnnnnnnnnnnnnnnnnnnnnnnnnnnnnnnnnnnnnnnnnnnnnnnnnnnnnnnnnnnnnnnnnnnnnnnnnnnnnnnnnnnnnnnnnnnnnnnnnnnnnnnnnnnnnnnnnnnnnnnnnnnnnnnnnnnnnnnnnnnnnnnnnnnnnnnnnnnnnnnnnnnnnnnnnnnnnnnnnnnnnnnnnnnnnnnnnnnnnnnnnnnnnnnnnnnnnnnnnnnnnnnnnnnnnnnnnnnnnnnnnnnnnnnnnnnnnnnnnnnnnnnnnnnnnnnnnnnnnnnnnnnnnnnnnnnnnnnnnnnnnnnnnnnnnnnnnnnnnnnnnnnnnnnnnnnnnnnnnnnnnnnnnnnnnnnnnnnnnnnnnnnnnnnnnnnnnnnnnnnnnnnnnnnnnnnnnnnnnnnnnnnnnnnnnnnnnnnnnnnnnnnnnnnnnnnnnnnnnnnnnnnnnnnnnnnnnnnnnnnnnnnnnnnnnnnnnnnnnnnnnnnnnnnnnnnnnnnnnnnnnnnnnnnnnnnnnnnnnnnnnnnnnnnnnnnnnnnnnnnnnnnnnnnnnnnnnnnnnnnnnnnnnnnnnnnnnnnnnnnnnnnnnnnnnnnnnnnnnnnnnnnnnnnnnnnnnnnnnnnnnnnnnnnnnnnnnnnnnnnnnnnnnnnnnnnnnnnnnnnnnnnnnnnnnnnnnnnnnnnnnnnnnnnnnnnnnnnnnnnnnnnnnnnnnnnnnnnnnnnnnnnnnnnnnnnnnnnnnnnnnnnnnnnnnnnnnnnnnnnnnnnnnnnnnnnnnnnnnnnnnnnnnnnnnnnnnnnnnnnnnnnnnnnnnnnnnnnnnnnnnnnnnnnnnnnnnnnnnnnnnnnnnnnnnnnnnnnnnnnnnnnnnnnnnnnnnnnnnnnnnnnnnnnnnnnnnnnnnnnnnnnnnnnnnnnnnnnnnnnnnnnnnnnnnnnnnnnnnnnnnnnnnnnnnnnnnnnnnnnnnnnnnnnnnnnnnnnnnnnnnnnnnnnnnnnnnnnnnnnnnnnnnnnnnnnnnnnnnnnnnnnnnnnnnnnnnnnnnnnnnnnnnnnnnnnnnnnnnnnnnnnnnnnnnnnnnnnnnnnnnnnnnnnnnnnnnnnnnnnnnnnnnnnnnnnnnnnnnnnnnnnnnnnnnnnnnnnnnnnnnnnnnnnnnnnnnnnnnnnnnnnnnnnnnnnnnnnnnnnnnnnnnnnnnnnnnnnnnnnnnnnnnnnnnnnnnnnnnnnnnnnnnnnnnnnnnnnnnnnnnnnnnnnnnnnnnnnnnnnnnnnnnnnnnnnnnnnnnnnnnnnnnnnnnnnnnnnnnnnnnnnnnnnnnnnnnnnnnnnnnnnnnnnnnnnnnnnnnnnnnnnnnnnnnnnnnnnnnnnnnnnnnnnnnnnnnnnnnnnnnnnnnnnnnnnnnnnnnnnnnnnnnnnnnnnnnnnnnnnnnnnnnnnnnnnnnnnnnnnnnnnnnnnnnnnnnnnnnnnnnnnnnnnnnnnnnnnnnnnnnnnnnnnnnnnnnnnnnnnnnnnnnnnnnnnnnnnnnnnnnnnnnnnnnnnnnnnnnnnnnnnnnnnnnnnnnnnnnnnnnnnnnnnnnnnnnnnnnnnnnnnnnnnnnnnnnnnnnnnnnnnnnnnnnnnnnnnnnnnnnnnnnnnnnnnnnnnnnnnnnnnnnnnnnnnnnnnnnnnnnnnnnnnnnnnnnnnnnnnnnnnnnnnnnnnnnnnnnnnnnnnnnnnnnnnnnnnnnnnnnnnnnnnnnnnnnnnnnnnnnnnnnnnnnnnnnnnnnnnnnnnnnnnnnnnnnnnnnnnnnnnnnnnnnnnnnnnnnnnnnnnnnnnnnnnnnnnnnnnnnnnnnnnnnnnnnnnnnnnnnnnnnnnnnnnnnnnnnnnnnnnnnnnnnnnnnnnnnnnnnnnnnnnnnnnnnnnnnnnnnnnnnnnnnnnnnnnnnnnnnnnnnnnnnnnnnnnnnnnnnnnnnnnnnnnnnnnnnnnnnnnnnnnnnnnnnnnnnnnnnnnnnnnnnnnnnnnnnnnnnnnnnnnnnnnnnnnnnnnnnnnnnnnnnnnnnnnnnnnnnnnnnnnnnnnnnnnnnnnnnnnnnnnnnnnnnnnnnnnnnnnnnnnnnnnnnnnnnnnnnnnnnnnnnnnnnnnnnnnnnnnnnnnnnnnnnnnnnnnnnnnnnnnnnnnnnnnnnnnnnnnnnnnnnnnnnnnnnnnnnnnnnnnnnnnnnnnnnnnnnnnnnnnnnnnnnnnnnnnnnnnnnnnnnnnnnnnnnnnnnnnnnnnnnnnnnnnnnnnnnnnnnnnnnnnnnnnnnnnnnnnnnnnnnnnnnnnnnnnnnnnnnnnnnnnnnnnnnnnnnnnnnnnnnnnnnnnnnnnnnnnnnnnnnnnnnnnnnnnnnnnnnnnnnnnnnnnnnnnnnnnnnnnnnnnnnnnnnnnnnnnnnnnnnnnnnnnnnnnnnnnnnnnnnnnnnnnnnnnnnnnnnnnnnnnnnnnnnnnnnnnnnnnnnnnnnnnnnnnnnnnnnnnnnnnnnnnnnnnnnnnnnnnnnnnnnnnnnnnnnnnnnnnnnnnnnnnnnnnnnnnnnnnnnnnnnnnnnnnnnnnnnnnnnnnnnnnnnnnnnnnnnnnnnnnnnnnnnnnnnnnnnnnnnnnnnnnnnnnnnnnnnnnnnnnnnnnnnnnnnnnnnnnnnnnnnnnnnnnnnnnnnnnnnnnnnnnnnnnnnnnnnnnnnnnnnnnnnnnnnnnnnnnnnnnnnnnnnnnnnnnnnnnnnnnnnnnnnnnnnnnnnnnnnnnnnnnnnnnnnnnnnnnnnnnnnnnnnnnnnnnnnnnnnnnnnnnnnnnnnnnnnnnnnnnnnnnnnnnnnnnnnnnnnnnnnnnnnnnnnnnnnnnnnnnnnnnnnnnnnnnnnnnnnnnnnnnnnnnnnnnnnnnnnnnnnnnnnnnnnnnnnnnnnnnnnnnnnnnnnnnnnnnnnnnnnnnnnnnnnnnnnnnnnnnnnnnnnnnnnnnnnnnnnnnnnnnnnnnnnnnnnnnnnnnnnnnnnnnnnnnnnnnnnnnnnnnnnnnnnnnnnnnnnnnnnnnnnnnnnnnnnnnnnnnnnnnnnnnnnnnnnnnnnnnnnnnnnnnnnnnnnnnnnnnnnnnnnnnnnnnnnnnnnnnnnnnnnnnnnnnnnnnnnnnnnnnnnnnnnnnnnnnnnnnnnnnnnnnnnnnnnnnnnnnnnnnnnnnnnnnnnnnnnnnnnnnnnnnnnnnnnnnnnnnnnnnnnnnnnnnnnnnnnnnnnnnnnnnnnnnnnnnnnnnnnnnnnnnnnnnnnnnnnnnnnnnnnnnnnnnnnnnnnnnnnnnnnnnnnnnnnnnnnnnnnnnnnnnnnnnnnnnnnnnnnnnnnnnnnnnnnnnnnnnnnnnnnnnnnnnnnnnnnnnnnnnnnnnnnnnnnnnnnnnnnnnnnnnnnnnnnnnnnnnnnnnnnnnnnnnnnnnnnnnnnnnnnnnnnnnnnnnnnnnnnnnnnnnnnnnnnnnnnnnnnnnnnnnnnnnnnnnnnnnnnnnnnnnnnnnnnnnnnnnnnnnnnnnnnnnnnnnnnnnnnnnnnnnnnnnnnnnnnnnnnnnnnnnnnnnnnnnnnnnnnnnnnnnnnnnnnnnnnnnnnnnnnnnnnnnnnnnnnnnnnnnnnnnnnnnnnnnnnnnnnnnnnnnnnnnnnnnnnnnnnnnnnnnnnnnnnnnnnnnnnnnnnnnnnnnnnnnnnnnnnnnnnnnnnnnnnnnnnnnnnnnnnnnnnnnnnnnnnnnnnnnnnnnnnnnnnnnnnnnnnnnnnnnnnnnnnnnnnnnnnnnnnnnnnnnnnnnnnnnnnnnnnnnnnnnnnnnnnnnnnnnnnnnnnnnnnnnnnnnnnnnnnnnnnnnnnnnnnnnnnnnnnnnnnnnnnnnnnnnnnnnnnnnnnnnnnnnnnnnnnnnnnnnnnnnnnnnnnnnnnnnnnnnnnnnnnnnnnnnnnnnnnnnnnnnnnnnnnnnnnnnnnnnnnnnnnnnnnnnnnnnnnnnnnnnnnnnnnnnnnnnnnnnnnnnnnnnnnnnnnnnnnnnnnnnnnnnnnnnnnnnnnnnnnnnnnnnnnnnnnnnnnnnnnnnnnnnnnnnnnnnnnnnnnnnnnnnnnnnnnnnnnnnnnnnnnnnnnnnnnnnnnnnnnnnnnnnnnnnnnnnnnnnnnnnnnnnnnnnnnnnnnnnnnnnnnnnnnnnnnnnnnnnnnnnnnnnnnnnnnnnnnnnnnnnnnnnnnnnnnnnnnnnnnnnnnnnnnnnnnnnnnnnnnnnnnnnnnnnnnnnnnnnnnnnnnnnnnnnnnnnnnnnnnnnnnnnnnnnnnnnnnnnnnnnnnnnnnnnnnnnnnnnnnnnnnnnnnnnnnnnnnnnnnnnnnnnnnnnnnnnnnnnnnnnnnnnnnnnnnnnnnnnnnnnnnnnnnnnnnnnnnnnnnnnnnnnnnnnnnnnnnnnnnnnnnnnnnnnnnnnnnnnnnnnnnnnnnnnnnnnnnnnnnnnnnnnnnnnnnnnnnnnnnnnnnnnnnnnnnnnnnnnnnnnnnnnnnnnnnnnnnnnnnnnnnnnnnnnnnnnnnnnnnnnnnnnnnnnnnnnnnnnnnnnnnnnnnnnnnnnnnnnnnnnnnnnnnnnnnnnnnnnnnnnnnnnnnnnnnnnnnnnnnnnnnnnnnnnnnnnnnnnnnnnnnnnnnnnnnnnnnnnnnnnnnnnnnnnnnnnnnnnnnnnnnnnnnnnnnnnnnnnnnnnnnnnnnnnnnnnnnnnnnnnnnnnnnnnnnnnnnnnnnnnnnnnnnnnnnnnnnnnnnnnnnnnnnnnnnnnnnnnnnnnnnnnnnnnnnnnnnnnnnnnnnnnnnnnnnnnnnnnnnnnnnnnnnnnnnnnnnnnnnnnnnnnnnnnnnnnnnnnnnnnnnnnnnnnnnnnnnnnnnnnnnnnnnnnnnnnnnnnnnnnnnnnnnnnnnnnnnnnnnnnnnnnnnnnnnnnnnnnnnnnnnnnnnnnntgggcaaggtccctgccagctctgtctctgggaccagtgggcaggggcctctgcctcacccccacgctgcctcagctggggcagcaggcccaggcctcttgcataagcgccctgtgggggacgaggctgcagctgtgcctggccaccccatcccccagcatcacgagtgttcagtgggctgtccccgggccctgggtggaggccaagcctggcccataaataggggtctcctcagtgccctccgctcctcctgcacacctccctcgctctcccacaccactggcaccaggccccggacacccgctctgctgcaggagaatggctactcatcacacrctgtggatgggactggccctgctgggggtgctgggcgacctgcaggcagcaccggaggcccaggtctccgtgcagcccaacttccagcaggacaaggtgaggggctttcctgcgtcatccccaagggctacaggaccctgtcaggggaagggcactttccggctgggtcttccccctgggaggagtgagcgaagtcccgcagtgccgggcagtgccggccagggactgagcgggcgcgcaggaaggaggctgggtagccgcccgaggaggctgcccgcgagaagccctccctgggcaccgcgtcccgtctcccctgatgggccacgcagacaccgggccacacacgcgcccacgccagccagacacgtccacccctgtgggcacgcgacccccagaggacacacgagcgcacgttccacacctgggtgccaggacacgggcgggtggggcacagggatggcgacaaacactccgtgcgcggtgggggttgggagggacgcgcaccgcacagacagccggcgacgcgcgctctcgcccgggagctgctcggggaagcgccggagcgcgggtccccgcgccgcgcgcccctccctggcgtcgaggagaaccccagcggtccgcagagctgagccgaagacccgccccgatccccgccaggaatgcgacgtcctctgccgcccgctgtatgggccaggcgctcagccagggcacagaatcgggaccgggggcggaggggccgaagctggctggtgggcggcgtgcgagggtgagggactgtcctcgggaggggcgtggccagacgggggtgctgggtgtcaggggcgtggccagcttctggggctgaggcgtgaggggcggggccatctccgggggagggggaagtggggcgtggtcatctcctggggcggggcgtgaggggcggggccacctcccggggcggggccggggcctgatgggcgtggtcagctcctggggcggggacgtgaggggcggggtcagctcctaggggggcatggggcgtgaggggcgcggtcagttccctggttgtggacatgaagggcggggccagctcctggggcggggtcgtgaggggcgtggtcagctcctggggcggggatgtgaggggcggggtcatctcctggggcggggatgtgaggggcgtggtcagctcctggggcggagatgtgaggggcggggtcatctcctggggcggggattgaggggcgggggtcagttcctggggcggggcgtgaggggcgtggctgctcgggggattgggcgtgggggcggggccgggttggagaccggaggagtagacggcagaggcgcccccgcaggtaggcgcaggtgggtccggagggtcctggccgacgcgggtgggggtcgctcgccgcagttcctggggcgctggttcagcgcgggcctcgcctccaactcgagctggctccgggagaagaaggcggcgttgtccatgtgcaagtctgtggtggcccctgccacggatggtggcctcaacctgacctccaccttcctcaggtgggacagcgggcaggtgggtttctgggacggagaggtccagggacaccctcgggcctaacccctgaccctgaggtcacccacctacaggaaaaaccagtgtgagacccgaaccatgctgctgcagcccgcggggtccctcggctcctacagctaccggagtccccgtgagtggggcctccaccggccccctgggcccagcctgggggcgacacttgccgggacgactctgggccagccccctgccgcggagatccatggggtgggaggtgatggctgccccaccagcgtcagaggcaaaggccaggcctgggcgtgactacccatgcacaagtgttagggacagagagacccttcctccagggggttggatcctctctggagcccaccattgtcttgtcaggccccttccctgccctctggagttttccccacataagcagccccccaaggcccctccatatgcctcctcccaattctcctccccaggacccaggggtttcctcactcccacctggggaatggctcccacggggaaacctcttcacttccggttctggcagcgacttctgcggctgcaccaggaatcctggttttctgagcctggctcccccagattctggtttggggacagggttcacaggctgtgcaggcgagagcagggcactggctggagagcagccgggtgggggagcatcccgggccagccgaggggctgagtgcccccaaagcccacaggtgcaccccttccctgaagcagaggtgaggtttggggggctgagtccccgacasggttgtctcttgggttcccagactggggcagcacctactccgtgtcagtggtggagaccgactacgaccagtacgcgctgctgtacagccagggcagcaagggccctggcgaggacttccgcatggccaccctctacagtacgtgccccgtggacgccgcccacacgcaggcctgaccagagggggctccccaagacccagggcagggcacacagcatcccccscgctgaggccagctccgtctccaccctgtcccaggccgaacccagacccccagggctgagttaaaggagaaattcaccgccttctgcaaggcccagggcttcacagaggataccattgtcttcctgccccaaaccggtgaggggtcctaatctgatggggagaggatcaaggtcagattagaggcaggcaggcagtctcctgactgggggaggcagaggggaggaggtggccccgccctgctcgaggcctgggccagggacagagggggtgagtgttcaagtcagaacctccctcccgcagccccttcatgaggagccccctccatgggggacatggagaccaggcgcccactctgtgccaggccccagcagctcccaggatgtggggcttcagcctggtggggggcatagggtagagggtgcccatgggggatacaggggaaccaaccatactgggctcaggcacagcctcctaggggtggacagcctgctcttggcagaggtggagaaagaccctctctttgtttccagtgcccagggagaggtgggaggtgatgggggatctgtgcagtttgggggctcagtcaagacgagctctgcgttacgggaggaacaggaagcccagtgggaaaattggcctaagtctggggttctgacgacagcccctggcttctttcttggcagataagtgcatgacggaacaataggtgagccactccattcattcattcattcattcattcattcattcattcattcaacacacatccacccaacccactctgcgatgggatggatcagggccccaggacagcctggtgctgcagacccatccttcccgatggctgcagtccagggccgggcgggagacactggggctgcccacattgatgggtgcacaggtgtgaggctcagaaggaaaacctgtcccagtggctggaacagggctgactcctgaaggctcatggttggggggtgcaggtgcgaggccccaggcagacaaggccaaggggctataccacagggaccacctggcagcaagggtgtctggctcctgggctaggaggaaaccagggtgggggagacaggatgggagggaacaggggatggaaggggagggccaaggacgctacatggatgccgtgggacagctcggagagcaggctcagggcggattcacccaccacccccaggagggaggcctaggctggagctggagtctgtggaccctggggctgggaagggtggagtctgtagaccctggggcagcggggatccaagccccagggatggatcttgctctctcagcggggctcagtggggctgggggcagagaaaagtccccgtagcccgcacctgctccatcgactggagtggaggtgggctggggtagactgcagtcctccatcctagcctttcggtcacacccctcaggactccccagggctgaagctgggatcccggccagccaggtgacccccacgctctggatgtctctgctctgttccttccccgagcccctgccccggctccccgccaaagcamccctgcccactcrggcttcatcctgcacaataaactccggaagcaagtcagtagagctggctcctggctgtctgcgctgtcatcacccgtcctgggcctggccctggccacccggacctccccctctaaaatctcagcctgacgtcaacaaaggaacaggccctctagtgtttgctcccagtggggtcttgagtcaggacagctaggagggggtgtccctcactgtctcccacccaccccacacagtcgtgtgcccctgccccacagccccacacgtcgagccataccccctcagctgccactgccaccaggccggtgctgagctgggggtcagtgactcakctaatcccttaggcaggtgccctgcacccccaaccccaccctgtcaccccctcagcagtaaaggcctgaggctcgaggccccagaggagctttggacctgttgggtatcttgaggtgtgggattaacgcactgagattgggcagagataagggtttcaggggacaaaaagaaacatttgtttgaaacatgccagagtgtctccaccccgcatcargacagactgacagagtgggctggggacaggctaccccatatcccttctggctccctgagcgccccctgccctctgacctgggcctccagatcacagccttgtccactcaccagagccctggcaccacggccacaccatgcccggccagtgccctgcccaaccctgctcccttccagattcccacccaggcagccattctcaggtacacaatgtgcaggactcactgtgacctgcccaccaggcccccccgaggcagaccctgcagaggcaccaagcattttgaggctcggaggtgagggtgagcttctgggtggccttcccggagaagggggcttagggctgtgcctgagctcaaggtaggggggattccaacatcccagaggggctgcagaaggccgaagaggcaggatgggtgagctgcaggccccctmgcccagaggcccgtcagaactaccctcagctgccaggcatccggccccaccccggaggaaaggcaacggatggctggggttgggtggagggagccaggccagagcgctgcagggtgcaacttgatcagaagcctgtcacagtgggtgcagtcccaggccagccgccccagggcacctcaggggcgtaaagcctacagaggagccacctcagctctgccctgctcccgtgtccggaggagatgccatcttgctgcatgatgcttcgggctctgctgatcagttccctccttgccctgctctgggcatccccaggccaggcccaggtccccatccaggccaactttgatgccagccaggtgtgcccagccctgtttcctcctcatctccaatgagtcctcccggctttggtgctgcaccccgggtccctgtccacaccctctttgatccaggctcagcagggctaggggcaggggaaacccccacctcacccgctccgtctgactggagtaggggttggctggggaagactgcagcctccatcctaccttttcagttgcatcccccaacamtccccagggcccaaaatagggacaagttggttgcctgtgcctcactgtcccccacccaccccacaaagacctgtgaccttgccacagccccacccatccagccgtaccccctgggtgccagctgcagacaggccggtgctgggctggtgggggccagttgctcatgtactgaggcccccctccctcagttctgcatyggggtcgagatgtgtacagcagcccctgccgtggccaggaagcagctgtgtcggggcagaatgtggtgggctcaggcccagggcacaggggcggcctcccagccttccctgcacttgccctgcagttccagggcacctggtacatggtcggggtggtgtcagatgaccaggacttcctggactccaaggacaccatgaagatggctgtggtcttagtgacccccttggggaatggtgacctggccctcaagtttggataccccacgtaagtgaccacacgagcccatcagactcagcctcagaggatggccagcatgaggccacatgaaggtccagagggaccatggtgtccccagcacattgaggtcagaccacgggtcctcgacggctctgtgcggcagagccccagatggcagccacatggagtccagagggacccaggccctggaggaagcactgcctgaggcctggtgttgagaaaagtgtctgcatgtctgtgtctgtgtgtgtatcactgtatgtggctgtgtctctgtgtatgtgtgtctatttctgcatgtgtgtgtgtctgtgtgtgcgtgtgtatgcatgtgtgtctttgtagatgtgtacctctgagtgtgtatgtgtgtatcactgtatgcgtctgtgtgtctgtgtgtctgtgtatctgtgtctggctgtgtgtgtctatctctgtgtgtgtcttgtgtgcgtgtctatgtgtgtgtctgtcagtgtgtctgtgtctgtgtctatctccgtgtgtgtgcatgtgtgtatgtgtgtgtcttctgtgtgtctgtgtctggaagggggacctggaggccctgcattctaggctgtgtgcctgtgaacaggtacttaatacccaccccacccccagcaggagtgtccccacctctaaggtcatcctaaagtcccatgtcctccaaggattgtgagggtgaacaggggaccctgggctcagagacagcaaggtaggctctaggcctgggcgctgggcaggggtggccactcaggggattggggctctttctccccaggccccatggcgggtgccagaaaatggacacgaccttcaccgagggtgctgtaccggggcagttcagcaacccaggtgaggtggggcagcaggcagggctgtggcgtgggggccctggaggctgcayggactgctggattggcacctggggccggggcgtgaggggtgccacrctcgggggggaggtgccctgggcctggggtcagcggctctcgctcctccagccatggccctgagtgacatccgagtggccttctccgactaccagcactttgccttgctgtacttggagatgcggaaagggggcctgcggaaccagtggctgcagctctacggtgggcgggctgcggggcggagacccagacacccccgcttcgggtctgggatgtcacccctgtgcctgcaccagccctttctgcacgcggaaggtggaaccgctggctcctggtgtctgtggccgcgggtcccggcccctccctgcccctctctccctctcttcgcccctccagccccttccctttagcttacccgccctccccaccttcagctcgagcgcccgagctgtttcccgaaggcgcccagaagatgcagctactggcgccccaagtgggcctgagccccagccagggcgtcctgctgccgaagtcgggtgagcggtgccggcagccctgctgggagggccaggccccgggtcacacccctgctggaagggccaggccctggtcactccactgatctcagattcgggacagaagtgcccggggcagacccagcctgtctgggtcgggggagggcgagacgttgcccaggccggtgttcccaggaggagatcgccttggggcaggtcgggggcctccgtcccagggaagggggcgcggggtggcgcctcaggctcgatctctctgcagaccagtgtgcgggcgcgctctcccgggtgagtagaccatggccatgcggagccgcggaccatgggccctcccagctcggtgggctgcaccgcggggccctctaccttcggggcagctagggacgacagcgggggtgatggggcacccgggcggatccgagccgcagcagcctggggaaccgcggggctgcgcgtcgggagggggcggaggcaggggacgccgcccacctgctccttgttttgcagtgaggggtccagcccctgagtgcccgcaggggtcagctgctccgtgcgcccagccctgcccaaagagccccctccctccacaccctggccccaagcgcaataaacaccctgaatgcctgtggcgctgtgcgtttcttgggggcagggaggggtggcgggggggcggccaggtacatgggcgccctgggggaggggccgggtcaccccctgttgcccctctgggtaggcgttagcccaggagggaccgagcctcggctccgtggcagggaggttcctcaggacgggccccagccccagctctgggacttttctacctccgcacggacccagacccccagactgggggcgccgggagggcgggacacggacaccacgcggcgcgcgccccaggcttcagcggacaccgccgcgcgacgtggccttccgggtcctcccaagcggctgccccagtcagtgtcggcggcttccatccccaggcgcccctccgggtcccccagctccccagcccctgactcctggctccaggacccgccccagaggcctggctgttccggagaccaacgaagcgctcccaactctgacccagggcctgtccacggagagtggagggcgaggaggacaggaggagccgcataaaactctgccctgcctggagtctatgtaggacagtgttgtcttttacagacaagtctcgaagaatttgaaggaaaatagcctactagctgtaatgtacctagttcagcaaaataataataaaaatactggttgcaaatctgtgaatatttggatagtgtttaatctgggtgatgggtctacggggtgcagtatgctctgatttctccttctcagttggtcagagttttgtttgtttgtttttttgagatggagtctcgctctgtcgcccaagctggagtgcagtggtgcgatctcggctcactgcaagctccacctgccaggttcaagtgattcttctgcctcagcctcccaagtagctgggattacaggtgatcgccaccacgccctgctaatttttatatttttagtagagacaggttttgccatgttggccaggctggtctcaaactcctgacctcaagcgatccacccaccttggcctcccaaagtgctgggattacgggcgtgagccactgggcccagcccagaaaatttgttattaaaaaacaccactcgggccgggcccagcactttgggaagnnnnnnnnnnnnnnnnnnnnnnnnnnnnnnnnnnnnnnnnnnnnnnnnnnnnnnnnnnnnnnnnnnnnnnnnnnnnnnnnnnnnnnnnnnnnnnnnnnnnnnnnnnnnnnnnnnnnnnnnnnnnnnnnnnnnnnnnnnnnnnnnnnnnnnnnnnnnnnnnnnnnnnnnnnnnnnnnnnnnnnnnnnnnnnnnnnnnnnnnnnnnnnnnnnnnnnnnnnnnnnnnnnnnnnnnnnnnnnnnnnnnnntaaaaatacaaaaaatcagccgggtgtggtggcgggcgcctgtagtcccagctactcgggaggctgaggcaggagaatggcgtgaacctgggagacggagcttgcagtgagccaagattgtgccactgcactccagcctgggccacagagcgagactctgcctcagaaaaaaaacaaaacaaaacaaaaaaacaccactcggcggagcacagtggctctgcatcccccctgcattcccaggaagattccgagccgggaaatgcaggttgccctccacagcctcagggatgccctttccttccttccagggtggggcagcctctgggggtggctgtgggtccagctgtggtcagcccccaatcccttgcagacgcatcgagtccctcacctcccacgctcagccctttctccacctagaagcccaggggatggattcacaagatgtgtcagatcaggcccccctgctcagcaccccacagtgggtcccattgcactgagagtaaaggcctaagtctttttttttggaacgaagtttcgctcttgttgctcaggctggagtgcagtggcgcgatcttggctcactgcaacctctgcctcccgggttcaagcgattctcctgcctcagcctcctgagtagctgggattataggtgcccgccaccacgcccagctaatttttgtatatttagtagagacggggtttcaccatgttgaccaggttggtcttgaacttctgacctcaggtgatccacccacctcggcctcccaaagtgctgggattacagccgtgaaccgccatgcccggcctcaggcctaagtcttgatggtggccaacaaggtcttctcttttaggctttcctttgacccaccatccactcccctccctccgtcctgctgccagcccctcacgtgtctcagggcctttgcccaggtcacccctgcctggactgcccttctcccagtgccactcagtgcactcactcccgtctctgaagtcttgctcaaatacctcccttggttgttgacctctgctaccccaaaacttgactggcccccactcccctagagctcgttctccggaccttttgctcctctttttggcccagcttccaggtgctctatgccttgggaaaggtcagccctttccctcccctgttctgcctccatcaccgacttcaagtgtgtgcgtggggactttgtaatccctctccttctgcttgcaaagctccactaaccttatatctcatacactgtattaatgtatcctacattaaagaaaattgctcccatggctgggtgcagtggctcatgcctgtaatctcagagctttgagaggccgaggcaggcggatcacctgaggtcggaggtcgggagttcgagaccagcctgaccaacatggagaaaccctgtctctactaaaaaatacaaaaattagccaggtgtggtggtgggcatctgtagtcccagctactcgggaggctgaggcaggagaatcgcttgaacctggaaggcagaggttgcggtgagccgagatcgcaccactgcactccagcctgggcgacagagcgaaactccgtctcaaaaaaaaaaaaaaaaaaaaagtataaaaaagtatctcagagaaggacgtggtggaagccagtggaaaagctgctgccagtagatgaagctggcccgatgtgagccacgaaacagaacatgacaccagggtgtgagccaaagtgtaaaataaacacctgaggtccacacggacccagcctgaggctagttaaatgaaggttttgcagttttctcgtcatgttttggaactaatctttgtttctggtcttgtgtcagttcctacagctgccacaaattatcacaaacttgtagcttgaagccagagttcaaaatcagtttaatagggtcgaggtatcagccgggctgtgctccctccgagggctctaggggagaaaccttccttgcctcttctagcttctttgtcttctttttttgttgttgttgagacagagtcttgctctgatgtccaggccacagtactatggcgcgatcagatcactgaagccttgaactcctgggctcaagcagtcctcctgcctcagcctcctaagtagctgggactacaggcatgcatcgctatgcctggctaatgttttctttttagagatgggtcttgctgtcttgctcaggctggccttgaactcctggcctcaagcagtcctcccactctgaactcccaaagcactgggattgcaggcatgagccactgggcctggcctcttctggtgggataccctaccttgtttccacctgagtgaccctctcctggcagagagagagctggacacactccattttagtttcttcacctgcggccccctttcaccttcctccctgaaggcatagctagtgtaaactgactcaaagcacgtccaggaatgcacctactgataagacattgaggcaagctgcaccagcagctcctggggacacgcgtggtggatggcacccaaaacccctgcatttatctctttgtgatagtttaagcctctgcacctggaactgtttactttttgtaactgcatttgtaaccaattaatttttttaactttttgccagttctgcttccgtaaaaattgcttcagctaaaatcccccctcccctatttagaccacggtataaaaacaaaactagccccttcctcggggccgagagaattttgagcgttagctgcctctcagtcgcggctaataacggactctttaatttgtctcaaagtgtggcgtttctgtataactcgcttggtcacaacactggcttctgatagcagcctgtaatccttggcttgtgggctgcttcgctccagttcctccctccatgccatgctgccttcttttctgtctcaaagcttcctctgcctcacttttaaaaggcccttgagatggcactgagggcctccctgggcaatccaggataatcaccccatctcaagggaatatctgcaaacactcctttcttttctttcctttttttggggggaaggggagacaggatctcactctgttgcctaggctggaatgcagtgcccagcatcttccatagacaatagcattcacaggtcccagggattagggcctgatatctggggcctgctacagccagcatctcagagttcacatgacaaagaagaggccccccagtcctctccaaatctgccccaccccagtcatcttggggatgaatctcccctttccactcttcccaaatgccagggccatccttgattgttctttgtctcctcctccctccacctccagtccgagcccatggtccacccctctcctctgcagcccccgtcctctctcctcacagcacagaatacggacttcacacacataagtcagacgtgccacttcccatccacccctgcttaaacctccaacagccaccaccccccattcattcattcacaatgtttattcagtgtctgtatgtgccagccattgtgtaagcgctgaagagacggatacactggcaggtaaaacagacagaaatccctgccctcatggacctcctggggtgatggacaataagcagggtaaataagtgtattggtggtcacttactgcagagtgacaggttaccccaaatgcagctgcttaaccagcaggcatgcattatctcccagtgtcagccaggcaggactctgggcctttgacacaaagtttcaggaggctgtggtcaagctgccggccgatgatgtggtctcatgggaaggctcagctggggcgtcagcttcccggttcccttgctggccatggtcatccccttagggctgcctcatgtcacacccagcaattcaagagcaattttgtcctattctagttgccagaagcaagtcattaataaagtccagcccaaggggaggggagtgcagaaaagtctaaacccaggagggtataacagggagctagctgccagaataaagcaagccaaagtgtactttctacagtgagaagtgtgaaaaatagggaaat

SEQ ID NO: 93886 - DNA, 144172 bp, Homo sapiens
  misc_feature (1)...(144172): n = A,T,C or G
gtagttttgaccttgtaaacctggataccctgagtgtcagggacccctaagagaatcgctgtccttaggcaagctacttaatctccctaaagtaagaatgatagtcataaagctgtttggaaaactaaatattattcaacatgaaataaagtacgtatagcacttagtatagtgcatggtatataacaagcatttcagtaaagattagctattactatgcatctattgataatgtgagggcattgctgtcacttacactagcagtaatgatcatctttcctttttctccacaaactcattcctctggcagatctccgttttagttaattgcctcatttgtctcctctgtggcctctctctttgctccagcatcgactcactcgcaagtataattgatctgaccctctgttgtgccctcacagcaatcctttcccttctattcctgttgctactacctccgttaaataacagggtttccattaaaggcagttctggctgttggtatttgacctgcctgagactcagtttactaatcttgtaaagtgggaacagtagtcctgtcataggtttttctttttttggtgtggggttaactgaaataatatatttgaaagtaacttgggaggccgaggcgggcggatcacgaggtcaggagatcgagaccatcccggctaaaacggtgaaaccccgtctctactaaaaatacaaaaaattagccgggcgtagtggcgggcgcctgtagtcccagctacttgggaggctgaggcaggagaatggcgtgaacccgggaggcggagcttgcagtgagccgagatcccgccactgcactccagcctgggcgacagagcgagactccgtctcaaaaaaaaaaaaaaaaaaaagaaagtaactggcagagtgcctagctactgcatgtgttcagtacatacatgttagttttccttcatttcccctttcctcataattttttctagccagtcttttttctttctttcccctctctaatccatccacaacattaacactgaattaaacttctcacagcactgatcaatcattaaatcagtacccaactcacgtgaactgagtgttcatcatgtgaattcatcacaattgaaatattcattatttttctgataggggttgccgagttaggacaccaggtaggccttacgagctacagtcttgtagtggaggttttggtcatcacctgctgaaacatccttccatctatccactgctcattgccccactcaagggaaggccattctcctagcacggtgcccaagcccctgctcggtacggtcctaaccagcctcccctccatgttccctcttgtgctggccaaactaaacagctcctcagtctctgaactctcggtcttccatggcatttcttgcttgtctcctctgcttggaatgccttctccccttctctcttggcaaccgcgccatctcggtgaggccccatgcagccccactgatgaatgtgctttccttctccttgcccttgttcgtacgcttcttaggggatttccatgttccaggagggtttatggctatttctgtatgtcctggtcctcctaactagactgtgatctcccccaggaaaatgcattttcctccaaactcagcatgccatatgagggcctcatacatgcagttagtccgtgatacattcgtcacaaacacataaaatttttgttgagcttattaagcaagatcctacatctgaaagcagctgttgtaaaatgaacaactacttattagcaacagcaccaaaaacaccaacacattttgtgtgggctgctgaacagtcatgccccacgccttctgttcttagtgaaagtcaaatgcagacacttcctgtcatgcctgctatgagtgattcctgatctttactgggaacagaaggatatgtgattctacaaaggagagcgaaacagccaagtagatcatctatttctgattagaagtttctaggatagctttcttgtagacaggctttatatcactctgtgtcttcaaatgtcaatggcttcagatttctgggctttcctggggggtctgctgagatggtaacctgttatatttcctggattttggttcagggttgttaggctgtgagaatccctttgttaagcttctttgaataaaaatcttggttgaaagtttggtttgacagaatgggttttgcctaatatatatatatatatatatatatttttttttttttttttttttccagacagaatctcactctgtcgcccaggctggagtgcagtggcgtgatctcggctcactgaaacctctacctccccagttcaaacgattctcctgcctccccctcctgattagctgggattacaggcgtgcgccaccatgcccagctaatttttatatttttagtacagatgggctttcactacattggccaggctgatcttgaatgcctgacctcaaatgatccacccgcctcagcctcccaaaatgctgggattacaggtgtgagccactgcacctggccttgcctataatttttgaatagctttggaagcaatgtgagacaagctccctgagggcattaaagaaaccaccgtatgtcatcaaaggattcttcctgagtacatgcagtggggctgtggctctgggtcctctctgagtgatgaaagttttgctccctctcttctcttcctgtctccctcttctccacggggatcatagattatcttccttcccaaaacgctaaagcgtaaggtacaagtgatgagtctttctcctgtaaccccctagtgtgcactgattgtggggtgtgaggatggtgagcagatgattaaagtactgtagcataggtctgatattataatgaccttaagtcccggagaccctgttttagacattctattttactattaaaccttaagacctgattttaggtttggaaaataatcctcaagaccactcataattcataaacctgctgttttatgcaggaagagaatagtcctcctgaattgtgttgactgctaatccactttaggcctgacactgagtgaaagggcaccgagagtgggaagagttggaatatgccctttgggctttgctagtatagaaacagggtgcctgggaggccccttccaagtcacaggagagaggcagcaggctggagggggcacagtgagaagctgttcctccttgcagcccctctccccacccgccacactactgttgatttgcacattcgtgctgtgcctcagcctggggcgcctgtcctcctttctcagctcaggaacctgctatttctcctttaagatcctgtgcaacagtcgcttcttttcttacagattccaaaggccctgagagatttttttttccctgtgtgttccaaagtgtgctgatctacgcatgccatagcatttataagaaggtagcaaagttagttatgaacatttttgtctcccaaactggaccgtgagttcttgggcccaggaccatgttttatgctctttaatatctgccccagagcttagcaaagggcacatcagctagaggtgctccctatcatttgaatgaatggagttcagccttttgggcctcaaggataactgttgtaagatcagaaaccatctgtttggaacttgttcattagattatttggctctcagtggttttagtatgtctttatgttctcctttagtatttagaaaattatctgtaaaattaccagtctgttttaaccaggttgcgacagtgccttccccaacaaaagatggctccttgcttcttcccctgtccctcaacaaagaaagtttcaggggccagcatggaggtgacagctgggattgagtgaatcccaagaagatggcttgcttgttttcatatcacaatcttaaagtttataggatttattttttttctacttagagttgttcctttacagtcaatgttataggcaagcagtgcctatcatgtatctgttagtatcctcatcagtacgttgctctaggaaactctcctgacatgtgattgggagagagaactcccagcaagtccatttatcatatgactagagtaagtgaaaggcaattctttttaaaatgtgagttatggagctttgtaatgtgccatttatctatgtctactgtggaaaggaaggacaccagggcaagtttattacttaaacggtgtgttctctgttgtccttagggcttaattttccacaccttgttctggaacatagtgatactctaacatgatgaatttccatgaaaacattgattaagcaccaggagttgcttacccacgtggagtaggcatttgaccctgcttattagtcttctgtgtctaattaaacagtttggttaaatgtttactaccccacatatgcaaggaatattttcttggaaaaaagcgaaaacagctttggaaattggaaacaatctagaactactaggcaggtaagcttgagaatttcccaaggataaaagcaatgaattcagtcaaccatagatttgaaatgcttcactaagaaatgaaatggaaggatccctacatttctttttcctcccatcaaaatggtattgacaagagaccataaaccttgggcgaatggaacaaaagggaactatttgcactcacactaaatggatcacacgtgaaatatttagttcccagttttaagaagtcaatataaaccacacagagagaaaattctttgtctccaggcctccttttcaaaacaatcgcagcaggtattgcacaattgcagacaatactgtcctaatgcattagagcctaagtcccctaaacgcattcaagttaagagggctcaagcctacaaatgtttattcagcacctgcttctctgtctccaggacatcctacttgtattcccagggccatcctacttgtactcccagggcctcctcctccttaaatgtttagcaagtaggtgaatgttgtatgtccatgtgaaagatactggcattcctagggtgcttagcagagttgcagtcacatagtaggtatccaacaaatgagtaaatatgaaggaaaacatagaaactgccttcaagaggtcatgggctaaactagggctgggaaaagcacttggtcctgtgcacttccttggaaacagaagtgagccaaggcttgagggaggcacgaaggagttcagaaccactgaagggagcctctagttcttacttgtaatgctttccccttcagtgcaccacacaacacaacaggaccagtcccctatcagggccaccactctaccgggctggggaggaaagcccttcgcagtcctgcgggaacaggaggcactcccacattgctccacttctctgtattccagtttaattaatttttatattttgaataaaattacacccactctcttccattatggtgaacacttaaaattacatttatagaaaattacatttacacaaacttgtttaaaagccaaatcccagacctaggctattggccaaattccatttaaaggggatattaagtaaattagttgagctgattaaaaacaccttcatcaaagtagagcattggtgccaacaatattaagagttgaactattgattacatttttttttccacagcagataatacattagcagggaggaaaagtgattactgctcgcttccacttcacaggtagaactactgatgggggtgacgcggtaaggtgggagggcatgaaggcaggggacgcggcctaggtcaggagggacgcagaggagaaaggaagaggaggggtggaggctggtggctggagggggcagaggtcagacgcctcgaaggagggcgccgtgagggcagagccgcggccacctctaccgcagcagcccgtcgggccggacaccagccgcagccgccagcccggcagacgctggaagcgcgcacaggggtgctcccgctcccggccgccagagggcgcggccggcgatggcgcggcggagacggagggaggaggggagccggcagagaagggtcagccgcggcggcagggcggcggcggcagcggcgcagctccgctccccgcgcgtctcccttccccgcgcccaggtagggcgctcagcctccgccgccaggatgcggccgcccgcctgctggtggctgctcgcgccgccggcgctgctcgcgctcctcacctgctccctgggtaagtagcgggcggccaggcgcgcaagggcgaggcgtggggttcgcgggcacagtcgcccgtgccccggtcggcgcggggagggaggcgcagggcggcccagccctgccccgccggcgcgcgcgtcccgccgtccggtccccgccgcgccgcgccgtcagcagcgccctctcgcggcgcccaggtgggacccgggcccgggacccgaggcgtgcccgctcggcccctttcggtcttgggtccccgctgccgccccggccccagactcgcgtctcccagcctctgccgccccgaaccggcgggcgacggggcggcgagggcgcagcagccgcccccacaggaagcgcgcaggaactgtgccaccgaagaaactttgcaacagcgcgagtggcggcggcggcggtcccgcccccctgccttccgcccgcgctccgccgtcctgcgcgccccgcgccgggcgggaggctggacgggagccggcgaggcggccctcgaggccccgcggctcctgttcgacccccgggggcgaggactgcggtcccggtgtccgcgcgcccctccgcagggccttcgggacgtgccctggcccctgaggataagcggccagctcggcgccagcccttcccggattccgacccggaggaggacaggggcgcccgctgggcctccgcgggagctggcgcggcggggaggcttgctcctgtctcgggtctccgctggggacatcaggggacacgtctgcgagcagagcagtgcttgcccggtctcctgctgctgtaatgcccattcttttttatttcttttctcctcgcaagggcatttcccccctttatcttaaaacgatgtgataaaagttaaaaaaaaaaaaaaagcagccttgtaattgactttcatgatcagatttgttcaactttgaaagcttgagcgaaaaattatttttttttcagactgctacagagtttttgtcctctaacccagacttgctggtgtgaaaaggcaatgatttcagattttttagtaatggcagaatggtgcagtttaggaaaagacgtagcgttattgcgcactgctcttgttagcccaccggaaccttgacagcctgtttttatttgtatttaagctctctgaataaggattaatttgctgcatttgtgtacttctggcatttctataggcgctcagtaagtgtgggaaaagagcaagattagttggtaattgtttacatgcatgattaattaggcagcagtgtaattaaaaatattagggcacctccggcagagaaggctgtagttggtcttggggagcgactgaatttggctggaatcggcttcagtggaagaagggcattgctgggtggcagccctgggagaaagggaggttggaggtttgggaaagcgactgggtgactcctggctgcatcagttggcttgttgcctggatgttttgcaactaaccaaatgggtgggtggtagctgaaattggcattctatttatagcactgcactttataatgctgtactgggggtataatatttgtatataatatatacaacatatgggctgaaatgcacatttgtattgctgtgtctattttttattacccccaggggaatatttgcactgtccaaatttgataatacactgaaggacattcagaatgcactaagatgtcaacacatttttagagatgtctattagccttgtgaagttgtcagataagcacaataaataagacataaaatgcattaaaaggtccctgtgagacatttgggctttgggaactggctttcatgggttggcacagacgggaggctgtattcttcgaggtctgaagtgaatcatgaatacctttkatggagctctgcttcgatttaggggaagggcaccgacacgtataaagatgtccccacttacgatgttcttggaatcttgctgaaacagaatgtgacaggcgttctgtcacatgtgaacaatcttgatagtttataaataccttaaatattcccatataagattggcctgactatatagtttagtttccccacaaactagagcatatttgtttatatttttagagaaaagtcaatatagaaaatttcttttaaacccacatgcatatacagacayggttcactgcaactttggttctaaagtctggcaccagtttcagaatgagaagattgagtcaggcctccaggttaccatttgttagctgtgtggcttttagtggctttgagcttcagttttctcatatgaacagggcgaatggactggatagaatactagcactttgccacctcttacagttttaacatactgatcccgttgtagcagagattgacagccacctgcgaagtaaccctttagcccttgttttcctaacaaaactaatataatctgggttggggggaaggatggtggggtggtggtggcagcggtggcagcarcactgtgagacatttctcagtggcctttgcatataggggcagctagtgctctacagagatatctttagagattgtttggtggggctcctggtaaagctcattcaaggtggctgactcagctgggatgcaggcctttttgctctgtgttatcctccttcccattgcctattaagtggatctgagggatggagccatggtggccatcttgtgaccatgaggtgaccttgaagatggaagccagtagtaaggatggtagaagrgaaagatagaagaagcctggatgccagatggatgtggagcatcatgtcagctctgcatttcctgtttgcagacttgtattgcatgagattatatgcagccaaacctaatcctattgccaaacctaatcctaattgatagaagaagcttattcgaaccaatgatattgataaaataataggtattagcttttatttttcacatgcctgtctgtcacttccctgtgtgagccaactttgtatttcttagcacctgccaaaattggggatggtttttcattctgagccaggtcttgcccagattcctttcattgcaatgagtcagaaattttaggacaccaagagtcagacctaattccaggttgttttgtgttttttgattcttaaaaccttctctttatttcttaagcagtatgcagatattactggcacagattttaatcttctggatggattctttgtcatccaggtagtccaggacctccgagttggcatggccccccaggtcatggacttgacccaggggagtttgccagtagccracagctaagccagtgggagggagggagrgcatctgtttcaaatagcagtgtgaattcgaaggaggtgytttgacccctttggtaacttcctgcgggacaaacattgtgggctcggtatttgagcacttccttataattggctcttttggagccaggtttttttggtgtgttttactagactcattatgaagcaagcaagcaagcataatttttaggcataaaggtactacttagagaaaatttgcaaatgttctgtttttcctcttgtagcattatgtgtgatccatctttggctttgcacagattacttcttaagarcaatatatgggagtccccataggttaatctcatcttttccatgataaaggaaaagttgtgagtttcaagggttcatcagacctattgaggaagttcttccttactaccatgatttcaaagttctagtcactaagcaactcccaaagaaacctgatttaacgtaggcgttgacttgaactactagaagaatgtcaatttaaaaatagtgttaaaaagaaaaactgcccaaagcctctcatttattcagagtaatgtgggtacctactgtgtgtcaggcatcgtgatattgcaggaacaagacagatctagtctgtctctacccttggggagcttgcagcccgaaaggcaaggtgatgttaagcagtaatgactacagaatgaatcgtgtctgtgccaaatgctgtggaagagatgttcaggatgctgtgagaacatgctgcagggagatagatggcttttgcctagactggggagatggatctcaacagggagccatcttgcaccccagggaacgtttgttgctgtctggatactttttggttatcccaggggctggtttggcagagggtgctactgacatctagagtcaggggtgctgctgaacatcctacaaaggcacaggacagttccaccccaccatcgaacaattaattatcggatccaaaatgccaacagtggcaagcttgagaaactgtggggtaagggtcaaggaaggcttcctagaggatgtgacgttagagctcagacccgaaagggaagcagaaatcaggtaagtgggtggcagagcttggtggtgaaggagccaagtggagaaaggacggaggactgaagggctggcaagatcattaggggccaggttgggtagggccttgcagatcaggggacatattttggggtcatccttagagcagagggaagtgtttgaagggctgtagtggggcagtatgtgatatggctgccgtttcctgaaactcactctggctgtctgatggagcaggagttggagggggccattgtggatatagggaactgtgaggaggctgctggacacaggttgtgagagatgattaataatctctcagactctgggactgattaggttcagtgtgctgggagaaagggtgggggaaaggatgagtcatacatttctgtcacatccaccatgggtagtagtgctgtttactaacttgggcactgaaggaggaggaccaggtttttaaaaacagttttatgtggttcaatgtacataacatacagtttattaagtataatgaattttaagtgtatagttctatggcattaagtacttacacaattttttgaaatgtactttgacttttaattttagggggaggtgaagctgagtaagttcagttttggacaagttgagttcaaaatgcatgtgagatggccaggtaccatgttaggtgagcagttagatatttgggtctgtagaggacaggtctggctggaaggtattttggggggtcattatattaggtggcaatttgagtaggttttttttttttgtttttttttttaagagttgggtgtctggtcgggcatggtggctcacacctgtaatttcagcactttaggaggctgaggcaggcagatcatttgaggtcaggagttcaggaccagcctggccaacaaggtgaaaccccatctctactaaaaatacaaaaaaattacccgcgcatggtggcrtgtgtttgtagtcccagctacttaggaggctgaggcaggacaatcgcttgaacccaggaggccgaggttgtagtgagcaaagattgcaccactgcacttcagcctgggtgacagagtgagactccgtctaaaagaaaaaaaaaagttggcgggtctggctatattgcccaggctggacctgaactcctggcctcaagtcatctgtctgccttagcctcccaagcaactgggactacaggaatgttccactgcacttggctgttttatgtttgtttgtttttaaggaagagagtcttgcttaacagaataaattcatttaagcatttactcaaaatgtgtatataccaaagatttggtagaagttggagaggaaagcagtctttatctacatatatctgcatgttgtaaagctgagggtttagacaaaacaaaaataaaaacaaaaacaagtataagtatcatcaaataagagttgaatgtatcttaagtatagcagtgccatttcctcctagggatatgacttattttcactcctaaaagaatattttatgtagctgaaaagatgatatattttagtttatatcattgcttcccgtaagaaactcaaggctctttacacatcacgttgaatttatcttctccagatccttgatgggggatatggaggagcttgtttttcgtttacgagctaaatgaagtaaaggacgttaaatggcctcagcccgttgtgaaaatagccccattcagttcccttgagttcctgtctagttgcccttcccagtgtgtgtcagacttcagcacacatgagaatcatctgtgtgtcctaaagaagcctgtatttgttaaaatgcagattcctgcgttccagctccagattttctgattcagaagatctgaaatgagacttccaggtaagttttctgtgaagccaggtgtgagaaccctgcctgggccaccataggcccggatataaactaggactcttactgggtgatttctgtgaacatctgtggaatataaagatgatcaagcccgggcgcagtggctcacgcctgtaatcccagcactttgggaggctgaggtgggcggatcacgaggtcaggggttcgagaccagcctggtcaacatagtgaaaccctgtctctactaaaaatgcaaaaaaaaaaaaaaaaaagttagccgggcatggtggcgggtgcttgtaatcccagctactcgagaggctgaggcaggagaatcggaggttgcagtgagccaagatcatgccattgcactccagcccgggcgacagtgcgagactccatctcagaaaacaaaaaaaaacaaaagatgatcggtggttgttttgccttaaagtaaggagttgttctggagagagcaaagtgtggcattgaggcctactcctcagtcaggtcttttgtgtacttgggaaaggaactggaaacaccagaactaaaactatgaagtctgtctcaggctccaggatcatttggcaaatttttaaatgctgctgaggagaccatagtccgtggagcatgagtatcaaaagttagagccgtgagttgttaaagcaaaggtttttgggcaatatacaaataagtttctaaaggcttagagcgtctcagattgtgtgtaccatggattgagtggtactgaaaggggtacttactttatctgtatgtctgtttatccatctacctacccatctgcacactaagggggtacttttaaagacctacttcttgtaattaataagatgcccaaaagttaatcataaattatatttttataagttaagcctgacagttaactgttccatagtacacttgcaatttaaaggaatcgcgtaaactgctaattttttttttttgtttgaatgtttgctgtgttcctctttgatgtgttctgtagtaggctgtgtgaccagggatttttctgacccttcctatgacttaggctatggaacatgctagtgagggtggggttttaaatctcacccccaagactgttttgagttgcaattttctggtttgcatatcctgagtgacggtttttaaacaagatgcaaatcaaagtatgaaatgatcttttccctcttgaatatatatagttattttctatttttctctttttttttcactatctactgtgcttcctgtaaaatatatttactctctggcccatagaatatgttggtctcatcaaactttgttgtcaagtgaagaaaagctaatattccagtgtttcccatgacttctgtaataaaacaggagaggagtttcagatggaactagatcatatctgagtcgatagtaggctcaaagcaggaatattgtgtctgcatgcttgctgcctcagtgtggtgggaggcttggcctccttcctcactacttctctccactggctgaattgtcctggcatctttcccagcagcagatctcttttcctaagagtttactgtttggcacttgagcaaaaggctcaataggttttaccataggccaggtactgttttgaacctgaacatacatgaactcacttaattcttgttccatttcttccctctacagggagggaaacagaggctcagagaggttgcttaactattaagtggcagcgctcggatttgaacctaggaggtttgagtatactttgtctttgtactttgtactctgtacacagtacaaagtactctgtactttgaccttatgctgtatgacttctcaggcagggccccggcccgggtctcctctactgccacatctttctgttgtacagtgcagctttaaggagagagttctttgaaaggattcattaaacagctgccttctctcctgcttctcctccccatctggccattccttttgtctcctttgcagttttgtccttaaatgttgcagttcccctgagccgtccttggcctcacgagccttggcttccgttctggtgcgctgtggagactctagtgctgcagccgctattgcacgcacacccctgtgctgggctcrcccctgcacccggctctcctgcctgtctgcacttgcgtatcctcaggacgctgggcaccaagttgccttccctcacacgtgctaccctcctttattctaggaagccccaggccctcccttcccgtctcaccccccacccgggtgctctgtctcagagcctgcagcttctgcttctttagtggccccccccccccgctcactgccaccttcattgaggcccttagcgctctttgcttgactccagtggccttcccactggcatgtttgtgtcctttcttgtcctcccacagccgtcccacacactgcctccagaaagctgtcttgggcacacatctcaacagggcattccctccttaaaacctcaaacagctgttcctggctcaggaaaaacctgactccccaataccgccccctcccatgatatggcccctggtaccttcagcctcatttctagccccagccacccgtccccacaggggttcctgcccgggtcaccccctcctcagaggggtccctgcccggccgggtcaccccctcccctcaagggaccctgcctgggtcactccctcttctgaggtatttctgccaccaagtgtgttgaccctgccattggcctgccctgtataaaacccaagagggagagaataaaatccgatgccccttaaaaaacgtacggagtgacagggccttccatcccatggttggaggtgctgtcccatggtagatggagctgctacccagcttgtctgctactgtggggacaggggacagtggatttgtcccagtagggtggagaaaaggcagactttacctctgtcgctgggctgcaggggtgtttgtttctgtccctctgctaccatggattatcttcaaagtgggtacttggaaacaagtaagttggctatgcgccatgcatcctggagcttaaggccccctggaggacctggaattaatcctggaaagctccacggagaggcagctgctggaggctggagccagctgggtgacatgctttgtaagtaggtcacaggaaagaaagtgaagccccaaaggcttcctcccccagcgtgttagaaaagaagtggcagcctgcatagcctggaaggagcgcctgagccatgtgtgcttccaagacggctctctgtgagctttggcctgggtggcagagccacaggtaccgggttttatgctctcctggcttttgtgcagggcaggcaaccacctagacacttcccagactgccagtcattatcattgtggtcaccagcatggccacagctattggctgagcttttttatatattctgagctgatgccaaaagtttaggcattatctcattggttcctgccagcgccctctgaggtggagttatttggcagcttagtggttttcttgtttttastgttccgtttggtttctatgatagatgttcctgggaaagtttgggaaaacaaattaagagaattgggacaaaatcaagttaggaggtagaaggcacaatcatctttcctgcgtgggaatgggggtcccttgctccctcacaggaacagggaaagagagttgattagtgctgcttaaatgtgttgcaattaattactcgccagttttcttgcactccggggcttaggctggcctataaatcttagtcccaggttagttgtaaaatcttgatttatctctctgtctagatgtgctaacacatttgttggcttgaattatttaaagttatcatgaaaaaggtctgatttctattgcctgccctgatttgcactttaaatatagttccctgttgcagtttaccagaattcatgttgaaaatggaaaaggggaaattacttttaaacagcagtttggcatgtaaaagcatgatttaccctggaatatttctccaactgcacattaaagcactaaggccaaattttcaacaatattttccctactgaatctggaaattaatatgaagcaaacagcaaacattgagcctcaggtagccactcctgtgtacccctttggttggggccaggttggagggatctttccctcactccttcttttctttgtcagtcaccagcccagactcaaattgcagtatgcactcgttagcattgttgaaggtgacaggcaatttcttacctcccttgctaatttttctcactttgctcatctctttgcaccatctctctttcatttccatgaaaccaggatttttatggataagaattctgtaaatggttagttattttaatattggatttattagtgrtatagcatattcagtgccttcacaatatatttggttcctttttatttttatttttatttttttaagaggcagggtctctgtcacccaggctggagtgaagtggcatgatcatagtttactgcagcctggaacttttggatacaaggagtcctcccacctcagcctcccaagtagctgggactacaggtgtgcactagcaagcctggctaagcattaattttttctttttctttttttggagagatggggtcccaccatcttgcccttttgacctcaagcgatcctcctgcctcagcctcccgaagtgctagaattacaggcacgtgccaccacgtccggccacgtttggttccttgatgatttcttttgatttatttagattacacaaatttaaagataaaaccaactggcagccgggcatggtggttcatgcctgtaatctcagcactttgggaggccgaggtgggtggatcacctgaggtcaggagtttgagactagcctggccaacatggcaaaaccccatctctactaaaaatacaaaaattagctgggcatggtggcacgtgcctgtaaccccagctactcggaggctaaggtaggagagaatcgcttgaacctgggaggtggaggttgcgttgagttgagatagtgccactgcactccactctgggcaacagagtgagacctgtctcaaaacaaaacaaaaaacaactggaattttttctaaggattatcttgttttatgatttgctcctacaactgaaagtaactctgatgcattttttatgtcattgttttaaatattataatttgtatctatcatgggaaaaaggtattttaaatttcacagcagagtgataagaaatgacagacttttttggtttgggtttttttttttttaaagggatattttaactctaggtctatatttttggacagagctagaatctagtttaacttagctcagttaagctttgtctggctaaaggaatggtgtgttgattacgacaagcagaatttatggaatttatttgacrtattggcaatatctttcctgtatgtaattcctactttaaacagttacatcatcaaatattagctacttactcacaaaaggtgatacattagtaattttcagaaccagtaccaaataaagataccttccctgcactatattctacattctaagggctagggacttttgtgttcacatgcactttrttgtcatatagctgtctggcctcgcaaaaaagtgaggtaaaagcaaacactgttattagatgatgctactggacctgttacattaagaaagttatcttatttgattaaagaggaaattgtaaccccagagatatttgactgtcctgtttgaaatttggaattaattcgggaggggtagatggaaaattttttttttttttgagacagagtctcgctcttgtccaggctggaatatagtggcatgattatagctcactgcaaacttggactcctgggctcaaaggatcctcccaccttgtcttcctaactagctgggatgacaggcatgctctagcataactggctttttttttttttttttttttttttaagacggagtcttgctctgtcgcccaggctggagtgcagtggcatgatcttggctcactgcaagccctgtctcctgggttcaagcgattctcctgcctcagcctcccgagtagctgggactacagacatctgccaccatgcctggctaatttttgtatttttagtagagatggggtttcactgttttggccaagctggtctcaaactcctgacctcgtgatccgcccacctcggcctcccaaagtgctgggattacaggcgtgggccactgggtccggccgcatgtctggctaattttgtagagacagggcctccctatactgcccaggctggtttcaagctcctggcttcaaggrgtcctcctgccttggcctcccgaagtgctgggattacacagatgtgagccaccacgctcagtgggagatggatttttgaatcaaagtcatgagttagtttgaccacagtttttatatcttgcaagttctcagaatattctattttctggaattctgtggtgctaagatatgttaacatgttgcaacctctctgtatgatattccttaagtaattctgtttttgatatcttcttcagggttttaaatgtgcatattagcttagaggtaaataaaataaagccaaaaaattaagtacccagaagcagaatttaaatgactttgcagtttaatctctcctttcttcttagaacttgaagaaatgattgggctttgtgtgtgtgtgtgtgtgcacgcgtgcgcgtgtgtgtgtatgtgtgtgtaaagtgagaaaatgcattagatcctggtgaaaataaaggtgaggggcactaaacgtctttgttctactgggtaggcgctgcctggtatagagagcaggtggtccttttgtgatgtgactctagggtcccccatagtgaagactttcactcattcatttattaagtaaatatttattgagtttcttctatgtgctagctgtgcttttggtgtggagacaaatggtagataaaactgtattcctggtggggtggtggctcaggcctgtaatcctagcactttggggtgctgagttgggcggcttgcctgagcccaggaatttgaggccagcctgagtaacatgttgaaaccttgtctccacaaaaaacacgaagattagctgggcatggtggcaaatgcctgtagtcccagatagtcgggaggctgaggtgggaggatcatgagcccaggaatgaaggttgcagtgagctgagattgtgccattgcagtctagcctgggcaacagagtgagaccccatctcaaaaaacaaaaacaaaacaacacccccccaccccaccccccccccccgccaaaactcactataactgtattcctgcccttgtggagcttataatcagctgacatgtaagataagtgataaacaaatatatatgtcagttggtgataagtgctctggagaagagtaaagcagagtgaggtggataaggagggtgtggaattggggatttattattttacatgaggtggtcttggggaggccttgtataatgtctactgttatctaaattgttcacatagaggttcacatggcttacatttcagtttcaccctgccttttgaaatgtcattctggaaatggaaacgatgaaaccatgttagtcatttgcttcttagtgtgaagatgttttagatttctttcttttgagcaaatgttaatgcaggatttgaggcaatggatgtctgggggtggggatggggagggattagaagggatccaaatggatgaagtcgtctcctgcttctgattaaggtctcctctgccacccagggagcccctctgctgacactccttgtacattattgttccatggtgtcacttctcccacccttttagtacatcactgccctatgkcattgccttttactcctgggagtgctaattggagaaagtgaactctgcaatgctttcctcttagctgttggggagaaatgtactgtaaaatgaagggtactattttttgttctgttaagcttcctgtttggcttgtcattttgctttatattttcagagtgttactgtcatgttgttgttattatttttaatgcagagcctaaatgtggctctagggatatcttcgtctgtgatggctctgactccaaacattcattcattctaaatggagaatgattttaattcccctcactctcccggccccattgccttagtagggttctgttagggtttagtagggttctgtgcttgctggtagcagtatctgcatcacacttctaaccttgcagcccttaggaaaaagcttgctccaaatttagctctgttgcctgccaggctctggcagtgattttgagggtgagaatctgtacttcttcctcctggattctcaggaattcccctttgcttaagaaggcaccagacttaaggtttctaagaaatagtattttgtacacatctattttatagtttatgtctatagacacaaatggcatacacagatttgaatttgtctgatgtactgtttcttttgcttggtagcctaagcgtgttggcttcgtgttgatgaataattttaggtctgagatgaagaaagccagtaatacaagtttgcagcaatgcagctgcttaaaaatgagcaaaatatgtcttgttaaagtatctttttttattataagcaaaactgttggatgtgagaattaacctgaattgctaattctaaggtagaaatatttctttttttttttttccagcttttggtttggcttctgaagatacaaagaaagaggtcaagcagtctcaggtactaatcccaatgatcaaatcttttcctcccttctaagattcatttgtattttctctgataggaatagtaatcatttcattcttcaattgttatttttattgttacataattcatataatgtggtcaacatggattttgaatccctaatgcaacctataagatagacttgctttttacaaatcctttaatatttaaggctgatccacttggttttaaagttattttgagaaaaaacgtgttttgacatagagttggacattttaatagtcttgcttggataccatagttttccccagtcttaccaaatacctttttttatttcttttttgcgacggagtttcactctgtcgcccaggctggagtgcagtggcacgatctcagatcactgcaacctctgcctcctgggttcaagcgattctcctgtctcagcctccccagtagctgggaatacaggcatgcgccaccatgcccggctaatttttgcgtttttagtggagacggggtttcatcatgttgcccaggctgatctcaaattcctgacctcaagtgatccacccacctcagcctcccaaagtgctgggattacaggcatgagccaccgcacccggcccagtcttaccaaatatcttaaccttgggtttaattttctcagtctatgaaaggattttactatgtcacaggtgtcacagaaacctgattagtctctccttgaaggtggcaatgtgtgagagggcatgctggggcctgggcgggagacccaaaggtgactatgctaccagagagtcagaaccagaaagctaggccaggggactcgcagagagcaggcagtacttatcccaatctcagagctgctgcttttaaatcactggttgtagtcagggaatgtctctaaatgtttactagttgggctttgcactagatcagtttagcatgtaaaaaaggaaacagtagtttaaaatatcagttgtttttgtcatattaaagctcagttgactatttttaccccacaattggtgtaaaagcatttttttaatagaatgtttcttttatcaacagggtgtttattatctgttttaactgtactatgagattcttacacaggggaaatgataatactaatttcttacgattttaagaccttttatgattaataaagcatttcacacatttaatttaatcttcttaatgatcctgttatttgttaaagcaaatattcccatttacaacagagaaaacttagcgtcagggaagttatgtgatttgaccaaggtcacatgatttttttttcttttcaacttgtgttttaggtcaaggggtacatgtgcaggtttgtttgtttgtttttcttttcaacttgtgttttaggtcaaggggtacatgtgcaggtttgttacatgggtagattgcatgtcataggggtttgatggatagattattttgtcacctaggtaagaagcatagtacccaataggtagtttttcaatccttgctctcctcccacccgccactctcaaatagaccccagtgtctattgttcccttatttgtgtccatgtgtacactgtgtttagctcccacttataagtgagaacttgtgggttttcattttctgtttctgcattaattgggttaggctaacggcctccagctccatccatgttgctgcaaaggccatgttctcattmttttttatggctgtgtagtattccatggtgtatccataccacattttctttatccagtctactgctgatgggcatctaggttgattccatgtctttgctattgtgaatagtgctgtgatgaatatatgtgtgcatgtgtctttatggcagaacaatttatattcctttgggtatatacccagtaatgaaattgctgagttgaatggtagttctattttatgttgtttgaaaaatctctttctgcagtggctgaactaatttacattctcaccagccatatgtaagtgttcccttttctctgcaaccttgccagcatctgttattttttgactttttaatagtaatagccattctgactagtgcgagatggtatttcattgtggttttgatttacatttccctaatgattagtgatgttgagcatttttttcatatgcttgttggctgcatgtatgtcttcttttgagaagtgtctgttcacgtcctttacccrttttttaaatggggttgttttttgcttgttgattagcttacattccttatagattctggatattagccctttgtcagatgcatagtttgcaaatattttctcccattctgtaggttatctgtttactctgttgataatttcttttgctgtggagaagctctttcatttaattaggcccactggtcaaattttgttgttttgcagttgcttttgtagtcttcatgaagtctttgcacagaccaatgcccagatggtatttcctatgttttcttgtagggcttttatagttttaggttttacatgtaagtctttaattcatcttgagttgatttttgtgtgtggtgtaaggaaggggtccagtgtcaatcttctgtatatggctagccaattatcccagcaccatttattgaatagtgagtcctttccccattgcttgtttttgtcaaagatcagatggttgtaggtgtgtggctttatttctgggttctctaacctgttccattggtctatgtgtctgtttctgtagaagtaccatgctgtttggttactgtagccttgaaatatagtttgaagtcaggtaatatgatgcctccagctttgtttctttggcttaggattgctttggctacttgggctctttttgtttccaaatgaattttagaattttttttctaattctatgaaaaatgtcattggtagtttgatagaaataacattgaatctgtaaattgctttgggcaatatggccattttaacaatatttattcttcctattcatgaacaaggaatgtttttccatttgttttgttgtctctgatttttttcagcagtgttttgtaatgctcacagagatcttttacttccctggttagctgtattcctaggtgttttattctttttgtggctactttttttttttttttttttgagatggagtctcactcttatcacccaggctggcatgcagtggcgtgatctcagctcactacaacctccgcctcctggattcaagcgattctcctgcctcagcctcccgagtagctgggattataggcgcctgccaccacatctgactaatttctgtatttttagtagagaatttcactatgttgctcaggctggtctcagactcctgaccaccagtgatccgcctgcctcagcctcccaaagtgctgggattacaggtgtgagccaccacgccgggcctttttgtgaatgggattgctttcttaatttgctgtcagcgtggatgttatttgtgtatggaaatgctactgatttttgcacattgattttgtatcctgaaactttgctgaagattattagagatcttttctaggtatagtatcttactgtctgtgaagagagacactttgacttcctcttttcctgtttggatgcctttatttctttatcttctctgattgctctggctagacttccaatactatattgaataggagtggtgagagtgggcatccttgtcttgttcctgttttcaaggggaaagcttccagcttttacccattccgtatgatgttagctatgggtttgtcatagacggcttttattattttgaggtgtgtacctttgatgcctaatttgttgatagtttttaacatgaaaggatgctgaattttatcagaagcccttttttttttttttgcttctattcaggtgatcatgtggtttttgaaaaagccctggacagatagattcatagccaaattctaccagatgtgtaaagcgctggttccagtcctagtgaaacccttccaaaaaattgaggaagagggactgctccctaactcattctgtgaggccagtatcattctgataccaaaacctggcagagacacaacaaaaaaagaaaacgtcaggccagtatccctgatgaacatagatgtaaaaatcttcaacaaaaacgctagcaaaccaaattcagcagcacatcaaaagctaatccaccacagttaagtaggctttattcttaggaggcaaggttggttcatcataagcaaatcaataaatgcgattcatcacctaaacacgtgattattaaaaagtaaagttagaatccaaattttctgaatcattgaatatttctcactttactgttttatattacacagccctgtgcattatgatgtgtgtayttggcaataatgaggatcatttgtgacacatttaaagtgctacctaatcctgtggtagcactcaaagtccttgtgactttgagctctgaatgacaggcataaggttaacactggtcacgagaaccaaagtgttgaagttcatctcttctccaccactagccagttgtggggcttagtgaacctcgctgtgctcagcctcctcatctgtaagatggggtagtaggacctacctcacagggctgttttgaagattaagtgtgcctgtttatagcttagaacaatgccaggtcctgtttaaacgtttacctgataagacaagaacaattcctataagcagccttttaagaggttgcataagccatctttcctacctgaacaaatcaaagtaaagaggaactgcttttgtctgttacatttgttttatggaggtagttgacttcatatgaagtagttgatgataatgatgaaaaaagggtaggtgccaatattattgagcatttgctttgtgcagaccctgtgctcagcattttactatcttgttcaacctacaacacaatcctgtgaagtgggtcttgtcattattattcctattccagttgaaacaggcctgagctagttggtggtgcaggcagaattagagcccagggccgactgagtgtaatcatgaacacatctcattattttattcagaatctctagggcagtggtgggtacttgtgactgggtggaagattccattttacttctcttccctttaaaagattccatataaaattctttcgagggtgtcatatcttcttttaatgaaggacttatgaactaagcattacatgtatggattgcaagtgttgttcaaatcttttgtgacttaaaaaataaaacctgtgtcaaagggtgactttaatgtgccttttcctggctagcataggagctttctgtggggtagagattaatggcaaatctctttcgtatctgaatagcaattcagttgacttataaaaccttgacagtgagcacattttgattgatattgatagcgtaagaaacatctggcagcagaaataataaaacaaaccatgtgtttccttcattttaggaagaactaagtcttttcacaagggaagctggagacagaattttaattgttctgttaatttagtctaattttctttctcacaggggaaattagtcaagaccattttggttccatctcaattcaccttattcaactgtttcttgcatatttgatttttacagtttacaaattgaaccccttgaaatggctaatcatttcctagctattgtgtcagtcaacagagctgctgtgtttaatggcaaagagaaagatgtatcatttttgttgctattctttgatttcacaaagatagctatctgatggaaagtccagttggcttttcagcttcagttgcttagtctagaactgtagcattctggatatttttcatcttttaacttgttgatgaaggtgacttttgctttctatattattttttagctcactctcaaaatctattcacatctaatgatgtgtattttttaaagcatgcttcccgaggaaggctgggcaggcgttatcatggcggtgtgaggaagagcattgggaccgagttaggagacctggtttgtaattctggttctgtggccagaatgactgctggaccttgggaaaatgatttatcttttctgagcctctgttatctcatttgcaaaaggggagtgttgggttgaatcatctccaatgctgtttttagatctaacaattctatttttccaggagcctcagctggcagccaaagctgtggcatccagaaggcagcttggcctggggcaagtggtgggttgccagtggagccaaatggctcctctggagctgaggctggccccttccctgagggcaggttgtcttcctggtcaagagtggcatttagagtaagtctgcgcatgctgacttacggtgataacctggctttggttcagtgcattcagggaactggattgaactttccagtcttttttagtaatttcttccagatctacctgtttcatcaggattaagttaggtgtcacttgatccatcgtgagagttaacaaatcagcatataactataggttctcctctactcagtggcatttctagtctcgagacaaagataatttcagaatatgccactaaaggtagtccctcccctgtgtttagctctctcttccccgagtgttgtcatggtccctttggtattcttagaggatgcatctctgtggatacgtctcttggcttttaagccgctcccaattttgttggtaagggctcacgaccacatttcttgttgcagtctgtgaagaaaattgaaggatatttgccaccrtcccgttgtcataattatagcatatgactgttgaaagcaagaaagggcaattagggagaaaattccttcttagtctgcagagaagacaatgaaaatggcacatttagctgctgacactttgcactttgccagataaatcttttgagagttcctccgttgatttacacagagtcgaggtcaggtatttctgtgcccacatccagatttctgtgtctggagctctccagctcttaaggtgccccttctgtgctcctgatttttttttttttttttttttgatatggagtcttgctctgttgcccaggctggaatgcagtgacacgatctcagctcactgcaacctccgcctcctgggttcaagcgattgtcctgcctcagcctcctgattagctgggactacaggcgcctgccatcatgcccggctaacttttgtatttttagtagcgatggggttttccgtattggccaggctggtcttgaactcctgaccttgtgatccacctgcctcgacctcccaaagtkctggggttacaggtatgagccaccgcacccggcctctgtgctcctgaattctggtgaccaccataggctggcctctgaggccctktgcaggcccctaggactactcctcaggttggagagaacattgtggtaacattcttgaagatagcatgactgcacccaaaagatgataaagtgcaataattagtagaacttatcttcatgaggagcaccctgccaggttcgagactatcctctgatatgttcctaatgctttatggtttrcagggctttaaaaatggaccctcctgagaatatcatgaaccagttaaacattcactgcatcttacacaataggaaagagcttcagctcaatcaattgacttgcccaagatcacatgagaagggcacagccccaactaagaagtctgtcatgatacagaagtacatcattgctccgtggtcccttaggtttcggtctcatttctttagggaagcgtttccaagctccstttttcaaatcttcctcccatgtgctgatacataccntgcaccatgcatgtttactcagtgtactgctggctttgttatgtactgagattcatctttttctctttcatttaaaatacaggatttggagaaaagtggtatatcaaggaaaaatgacataggtaagtaatgattttttttacctaagagtgtgtacttaggtatattttgtatgaattatatttccatgaagtgatttttttctgattttatttatggggtaaatattgttgttcaaatattctgtctttggcccagcctaacgtttgctctcctgaagatgtggggcaaacacctctcagatgggcatgttggcatgtggtggatttatgtttacttagtgagatatgttggatttaattccctctggcatcattcattgagcttccagtaaggataaagcaccatgcctggtgggctctctgggggaatgcagaggggaaggagayatggtccctgttattaaggacccacatgatgtgggagaacagaacaagctgtgacattagcgcaggccgtccgggagcaggctgtccacttgctgacctgcagacacctccatgcctttcaggagtcagctcaccagtcacgtctgccaaacttgtcccgagcatcctggcctggaagccgttacyccttcctttgtaaggcatcatacttctatcattgcccattccttatttgtactccttttgaaacaccctctccgccatagtttgtaagtatcttcagaaatgtgaccaggagttagactttaaaaaaaaattaatgggaagcatgcccagtgtgtaaggccacacctctgtgtgtaggggtgagtttgtccttgaagggtgtgaattttgtcaatgtctttcctcccagggtaggaggaatgacccaagtctggaacacaatcagccaggacctggacaccagtagcagtggaacctcacaggaagcctatggtgtcagggggtatgcggtccatgggagaagtctcccttcagacacagggggttggctcacctccagtttcatgatggataagcctgggttccaggaaacaagaagggaacaatatgctctycttgcttcctctccactattttccatggagacctggaaggcgagctctagataagagggaaaaggataaaggaaagtgttcctttctaggccttcccttcctgggcctgggttctgaggggtgcagaagttcaggagagacccccgcccccgggtggaagtgggaggatgacctgtcttgggcacgcatatctagggcccacaggggagtgttttggggtctgcgagcagctgtatttaaggaaccacgtcaatttgttgctttttctttctattataacaccctgtatggtttagccacgcctttccatgtggagattttcttccctgctaccaactctgtggctttgagcatttatttgtagtttatgggagcagatgagtctctggttattaaatgaattaatgatgcaagtctggaacatgggcttgaaactacaaaggggaagttaccttggacaagtaaatttatattcttgcaattgcacatggcaagtcgagtgatacctaacttggtatcagttcatctgaaaaagacccaggggacttctttgtcacaatctttgtgtgagcctgcaagaccaggaggctactaaagatcctgggcagttgcagtgacaacagtagattcagggcaccgagagcatggctcacagtcagagctgggagatagcctccatgcacgggatgctgtttctccttcagcttgctgcctaattgatagattcactagtatatgattattctcaccaagtaaacataattggagtggcccgctttgtgtgtgtgtgtttgtgggtgtgtgtgtatgcatgcatattttttcctcaactttaaatcataaggctgcttgttacagcttatatcagaagtacatcgtattggtttttcatcagaaaaacaccagcatgatgaaacccatttttctaggtaatttctgaccaggaagatgagcactttacagtacagtgcttggcccatggtaggtgctcagcaactgaagacatagagagcattggtttcttctgctttcatagaagaatcattgctcttcagcatccattttctaactatctctctgtcctgctgcctttcctgagcactgtctgccactcaccattggctttggcattgcattggccctttaggtatcctttgctaatttctttatcttccccttttagcctgtcactctgattattattgtcaggcacttagtgtgcggcccatttattgcccattcctgggggagaaacaatgacaatccatcttgagttgtgacagtgtttgctgaaggcagattgcagtgagtttaaagaagtgcaaccaagatgataaggaaatcatggaattgtcttatttagctctgtggactgggcagcaggagcttaagagtcaggtggttggatggcatacacagagaagacagctaccaagataagctctgggatctggactcagccagaatgtgattcagtgaagggatggcttaggctgtatgtcagaaaatatttcttggtactgctataaagaacagcaggaatttaaacacataagctgttttcagcaccgaactgtactaactatactaacctggttcttttctggaatgggttggggctgactagcatgtcagtgatcttccggcattcattatgatcagggttgcaggagctcccctcccctttagccttgtcctcgataatacccccatgcgtcctgttccttggctatacctaaccgttagtattttcctgccctaaatttgattctgtcccaaactttcactgctccctctgtggggagggtcttcccaccccttttttcccccatcttcgggacagtgtcctccttccctcctttgggaagtccccactgcctgggaccccacttggctcatgaggcccttcccccatttgaaagtgattaatctagagcccaagcctctcagcatggtatataaatccctcatgatttgtcttaacggatctgcctccgtttctaactttatcacctactgtaccccgccgtgctccttttctcagaaatgcctgacagacatggtcgttcactcagggagactgcagagataccacaggctgtgggctctgtggtgatcccactgatctgctaccctctgtgtgtgtgtctgctgctttttaaaggaaactcaggaartaacmtcctcctggaagctctccttgcactcgcccccgattgtctgggctccagtgccctgtgctcagttagctctggctttccacttactgctttgtgttacaatggcctgcctatgaacgaggctcagacactccagggctgcgactgggctcactcgttcttgtatcacagagccctacacttagtaggtactcagaagatgtttgctgaatgaatgaatgaagcgtgcatgattgaagtataggaaaaagggagaggccagcatgatttcttagtggctatgttaaaaagaggacagatacaactcacaggacatgacccaggtatgggaagaatttgctctttaatcttgcaaatcctcttccctgtatggaaatgctgttgtcttcaatgagaagacagtgggagctttgctgagctggtaggagtggcaggagttggttactgtgatgagcggtgagcgcaggattaagctttttttttatttttatttttttttagagatgtagtcttgctgtgttgctcaggctgacctcaaactcctgggcccaagcaatcctcccacttcagcttcccaagtagctgagacttcaggtgcatgccaccatgcccagctaggattaaccttttgatagagaaatctactctttaaaaaaagtattaggaaataatttgaacatataagaagttataaagagaataatataatgaacattcatgtattatatgttcattagattaagaaataaaatatcacctagattaagaaattaaataccattaacacagctgaaaccttttaaccattatcctgatttggtatttatcatactcacgtaatcttttataccttcacatgctatgtgtgtatatgtttggtatatatacattttaatatatttatgtttatattgttgcaaactattatatagttattcttttgcaacttgcttttttcagcattatgactatgggatttatccatctggattgatacatgtagtactggttaatttttattgctgcatagtattcaagttaatgtatcttgttagtggatatttttgttgcttcccatttttttcttttacacagtgccactgtaaacacttttgtcatatatccttgtgcacacatctgagtttctcaaggatgattaataagagtggaatttctgggtcattgggaatgtgcatcttctttattaaattaaaaaaaaaattattctctgaggcttatttactccattcttaacaaaaagaaatccttataactcctctttagatgtgtcagtttatattaatgtttcagatgtagtagatccaagataagaattcagttgaaactgaagacacccatttaagtcttacccatgtgtccaacatataaagccgagaagctggtttaaaatagagacaggtatatggaatgttcctatttatataaactcctaaagaaaaggaattaggtcatattcagtaggctgttcagcatttccttttacatattttatttagttttaaccaaagagcattttagattatttttaggatctagatggctcactgtggagctatctgttgtgtgaatatttgagcaagtgaataaatgaatggacctatagaatagagcataagaacaataaaatataatggaataaaattaaaatcaaattaggttctctgagctgaggtgttaaagagaaagattcatggtgggggaaaggtccccacatggctttgctgacaatctggctgaaggctagaatttacgtggcaccttcctctgccgacattcctgtctggtggcagggtgctgacacaatcactgttttatccatttctttgttataggcccagaacctggggaggcctaacgtgtttctctgggaggcagccttgctactgccattggcaagccctctgatggtctttgtgggcaggacatactcgggtttccttcctgttcgccgttgtaaaaagctggctgccttcaggtgcatctctagcaggctggtgaatactgccagcatggggtgttatagatgggctttatgcaggacttcacgctaaagccctgttgctgaggaattgctgtggccggtttcctggagataacacctaatcctggctaggtgccttatgaggtagggtagggattattgagttacttatttgcaaacccttctgaactcatgggagatgggcagttactgttgagtgtcaccttaaaggaccattcagaacattcttgaagtagtgtagtagtgagctaggactacatagcaaagtaccacaaaacgtggcttagtacaagcaacagaaatgtattgtctcacagttctggaggttagaagtctgacatcaaggtgtgggcagggttggttccttctgagagctgggaaggaaggatctgttccaggcctctgtctttggcttgtagatggctatcttctctgtgtgtctcctcatatcatcttccttctctgtgtgtcatttatgtgtccaaatttctaaggagactggttatattggattaaggttcaccctgatgacctcgctttaacttgattacctctgtgaagacccaattctaaatgaagtcacattctgaggtattgggggttaggacttaaaaaatatgaattttagaggacatgtttcaactcataacaggtagcagcacagtgtaggattatgtgggaattgttaaaaagctacttgtgaaagttagattttcagctactgggaagattagtgttctagatattttcacacattttcagccattctttctgacatatgcgggagcacattctcagtttggtgccatagactgggtctggtacagtcagcttatttacttgctaacttctaggaaggaagcttgggaaacagtttaaaaagagagaaaattttgtctctagaattacatacgaattgattttttcccattaagagtttactgcctgaaggtttgctttgtagctattttttcacttgttttcaagtttattttaataattttgtaaaaagaaatacctgaaaactatttttttttgttctagacttaaaaggaattgtattcgtcatccagagtcaaagtaattcttttcatgcaaagagagcagagcagttaaaaaaaagcatcttaaagcaggctgcagatcttacacaggtacgtagcgatggctggggggtctgccagttatgtatttcttgattaccttgatgttttccaaaacactggatccgtggagaatcagtttttatttagacgagaataactcctctgactcattttgcttatttaatattgagtatttgttgttgaaaatgtttcggtcagctgggcgtggtggctcacgcctgtaatcccagcactgtgggaggccaaggtgggcggatcccttgacgtcaggcattggagaccagcctggccaacatggcaaaaccccatctctactaaaaatacgaaaattagcagggcctggtgatgcatgcccgtaatcccagctactcaggaggctgaggcagaagaatcgcttgaacccaggaggcagaggttgcagtgagccaagatcacactactgcactccagcctgggtgacagagtgggactcctctgtctcaaaaaaaaaaaagraaaaaaacgttttggttaattcctaatgcacaaattatcatattctgaatttttttttktgtgtgtgtatatatatatataaaaatatatataaatttaagagaactatataattgtgtggggcaactgtagatttgtcacraagtatgataaaagcaagtagaagaaataactttctaaaggcaaggcttaaaatagagataattaatgttcaaaattttggtaacaagttctaaggcaattttcatgttggaataacattttcattaatcttagcgcagtgcttcctctatgagtctcttaatctacttttttaattggatgtcattaatttaacttttgagttgatttataatgtaatattccagaaggattatggagagaaaaatctacrcatataggtacattttaataacatttaaaataggcatgaacagaatataaagctgctctgaataatactggaggtttggagtgagggaggatctaccttgtgctgccctataggtgctttccttctttagctaagtaagtccatcaagacctctgcaccatgttgtgatgtccttcaagaccgaagtgcttgcctgtagataaatgctatccctttgttctcccaggaaagaactctttgacaagagacatatgtgcgtgacagattgttttctttctcttcatgggtattggaaaataaagggtcagaaatgtcagtggaaacataaacagccttaacagtattcaaggcaaggaactgctgggaataaggtttattgtkcttaatatttaaatgctttatatataaactgtatcaaactgtcttgcgtccctgcaaggccaggttctctgggttgctctgcttgaaacatcgtactttctcaagggagaggaaagtaacacatgctatagattgtttttcagtagtcagagataggagcagcttgataagttaaaaatttttcttttttggctgggtgcagtggctcacgcctataatcccagcactttgggaggccgaggtgggtggatcatgaggttgagagatcgagaccatcctggccaatatggtgaaaccctgtctctactaaaaatataaaaattagctgggcgtggtggtgtgcgcctgtagtcccagctgctcaggagactgaggcaggagaatcacttgaacccaggagacagaggttgcagtgaactgagatcgcgccactgccctccagcctggtgacagagcaagattctgtctcaaagaaaaaaaaaatttttttttcttttttttggaaacctaacttttggaggttttctcctactaaatcttcctggattttattagagaggcagacatgcagcaaccttgactggctggcttcttccatctgctttgctggaggcgctagtggggtggccacgcgcaggctgctgcagggaggaggaggagccaggagcccaggtaatccatccctcaggtggatccagggaagctctaactggattttgctcagtcagaccttgccagttaccccaaattttgtgatcagtgatgacatcagaaccacagttaggcatcccttactcatatgaattaagagcacacttttccctatgtcacctgcatgtgcccctgctcccagcaatacctttctttttgcagatacagatttgtgttttttagattatgtatcttccccatttaatccataccagtggtcctttccatggatacgaatagcgacgccccttgccatccaagtctagttgattgcatatgcccctatacttcctctactgttcatccactcttattttatttttggccaattttgtttctgtgcaaatggatattcattgctggctctctacctgcctttccccttctgttcttctgggaagagtagtttttagagcaccttcgagcagggyagtgttcctgggacttggtttacagcagggataaggcatgtgggtacgttttggtgggaagcaatagaaattataaagtattccttcttctcctcttccccttaggaaaaatgagagttggcaggctgttgctgggggctgggtatgcctgcttctttgagaggccctggggctccgcaaaggatagggcccaggtacaagagcactggatgcttaaaactgactctaggctctggggaggatggttagaggttcctgtgtaagctgaacttggcagttgtatttaggaatggagaatgtgttatagcttctctttggtgtctgtcaggattgaggcaagatggtaggcagctgagcaggtgtggattcaacagagcagaaggaacctccattgcttgttaccttgtgccaagacagttgcaccagagcttattaactgaagttcctgtctctagatcccagcttcatcttccaccgctcatccccttgtgctttatttgccagtaacttcaaactagtatatggttctaggatcacttgccatattagtccatctttgcatcgctataaagaaatatctgagactgggtcatttataaagaaaagaagtttacttggcttatggttccataggctgtacaggaagcatgacagcttctggggaggcctcaggaaactttcaatcatggcagaaggtgaagaagaagcaggcacatcttatgtggctggagcaggagggttagagaggggaggtgttacacacttttaagcaatcacatctctcaataactcactctcctcacgacagtaccaagggggatgatgttaaaccatgagaaactgcccccatgatccagtcacctccctccaggccctacttccaacattggggattacaattccacatgagatttgggtggggacacagattgagaccrtatcacatgctatgcccctgtggctttgtatattgtagatcctgtcttcttgtcaagctcatgtatccccataaaggttttccgtgcaccatcttgagccgccgtgctaagctacttcctttttgattccacttttgtatcttggacaaacttctattgtatacttttcattgtgtattatttgttacctgtctcttttacaaattttgagagcagagaatagactatgtcttatgagttgattcttcagaaccaagcactgaatccttgaaattcatgatcttttctttcccagagttactttcttctctattgtaatagaagtttccttgtatttctcctacatacagtatggacctttggccgtatgtacgcatgcatgcacacacatgctgtattaaatcacaagttctttgaaggcagacacttcttttgatccttccatagcaccttgaacatagtaggtattcagcatatggcaattgaattgactctaagaaatttatcaaatgaaaatgaaaatttaagtaacttatgtattttattcctgttaactcttaaatggataatggccaacctccctcttattaaatatagtagctatttatttctctcagtgaaaccacagagtttaggaagaagagtagaaaaaaaattaggtatgagttggttctagaaaaatatgatgttatgaataattaaatcttttggagataatatgaaaaagaaccagaagattcacttgactaacacagacaacataacagtgacttaaagaagatggaaatccttcagtattgaaacaaaattaaaaaaaaaaatggaagatgtacttctccccacccaacagtctagttggtgggggcctggggaggcagctctgctccaggttcctctgtcctgttacttggatgaagtgtcttgtcctgcttggttgaagctgacctacattctgcattccagtgtgtgtagaccaagctgcttccttttaaggattttgtaccttgcagttgtatatgttgtgtccctttatgtacgtatgtccaggatatatcatgtgggtacacttgggctgggaagtgtaatgtctagttgggtggccctggattcagctagaactcaaggggttctaatctttagaagggaaagggagcatggatacagagggacaaatcgatgtctctgccaaagtcaggattttgttttcatatcaaggactcacttagtctacagaatttatctatgaacctctcattcattcttttggtatttgaagacatactatgggcaaagtactggggatacaaagatcaacaagacatagtcttggtacttgaagaatgcacagtcccagagaggagaagggccatcagcaggcagtttttctttttttttttttcttttcctttgtttttgagatagagtctcactctgtcgcccaggctggagtgcagtggcgtcatctcagctcactgcaagctccgcctcccgggttcatgccattctcctgcctcagcctcccgagtagctgggactacaggcacccgccaccacacctggctaatttttttttgtatttttagtagagacggggtttcaccatgttagccaggatggtcttgatctcctgacctcgtaatcttcctgcctcggcctcccaaagtgctgggattacaggcatgagccactgtgcctggccaagcaggcagttttcaagcaaggtggaagagcagtgatagaagggtacttgggacacaaaggagggcccctaccatggtgaagtggggcaggggagctgaggaggggatgtgatgctcaaggagggatttctgaaagtgctgagcctggaactgagcctacctattaggcactagctaggttgaggctgaggtgggaggggagggctttcagggtaaggaggacagcaggtaaggtggccaggtgagaggtggaagcacaggtgtgtgggctgtgatgctgtcctggggccagcggatggggggtggcagtgtgggccacaggcctgggaagtcaggatggatcatggtcacgcagaattgtatgtcctctggggagccaggcttctctgggggcttctctgagggccctcctggtattctgaggtgtatctctttggtatacaggtgtttagcatctctcgtctctggcaatacatgtagcagtgaccctggtctctattacagttaaaagtgccccttggttgaggattactaccagggagtgccgttagggagtagacctggtagagtttgtgttttaaaaccatcccctggtggccttagggagaatggcattaagagagccaggactgggcgaggaacctcattctaaggtcgtgggactagtcttgggccatgctgcacagggcgggttgcagactgctgtgtgccctccaccacagcagtttgagaagccctgggctggggacagggccatggatctggctgggggtggcgtaggggtgctgcagggccagaatggtgggagatggacccaggctggagagaatggcagggacgcttccagctgggactcagatgaggtggggctgctgagtgagattgaggacaggttctcaggtttagagggtgatgatgactttgggtgtcatatctgaagtgagggtgtgagtagctggaggctggatatttgttttacgctcaggagaaagatttggccagaagatggtagatttgagagtcagcagcatacataggtagtggctagaagcttgaaggtgctgcttccaggggaagccatgggccctgcgggaagaccagtgtctaggggctgggcagagtcggagcagactgaagggccatacgaagggatacagagaggaggggcagtgtgggatgctggctacctgaggactggcccgtcaaattgccatcagtaatgcgacattctctggagaggcctcagagagactggtctcagactgcctgactaattgggactgtggcctgcgcactgacctcaggatgcatcccactcagtgtgcttcgttgttgctggcaccaccactgttattattttttaattgtaataaaaaacacctaaaatgcacgtcttaagtgtacaactcagcagtgtcaagtggaatcatgttgtgtaacagatctccagagcttttttatcttgtgaaactaaaatctgtaygcattgaacaactccccattcctccctcccccaacccctggctaccaccattctacttgctgtttctgtgaatttgatttttctggatttctcgaagagtggagtcataggtatttgtccttttgcgactggcttctgtcacttactaatgccttcaggatttatgacagactctgtgttgttgcaggtaacctcagtccactgtgatggacattttcatctgtagacacctatttccttggatgctcatttggcatttcacgtatgcacccccaaggtgtactttgtccttcagtgtatctgttctgccttcaggctccagagggaggtgggacctgttccctattcctttttgcatcccgcatagcacgtagtggattgccaaacacacacagcattagaacctgtatttccattgattcattgtccttagcttttgaagcttaggaaatagctacatttctttaaagtatttgactttttagtgctttattctatgcatctatttagctttatcacgcttatacttaatttttattgtcctttatttgcagttttctgtttagacagcctgttgagtaggggacttagattgccactaggtggcaacattggttttacatttaaaggcatgtaattaaccaatattgttaggcaatgcacccccatcacccccagcatttaatttctgtgatagtaagtagagcctagactaaagcaataaggaagcttccctttaattatacgaaggtcggttattgttctgaaattctttgcttggatgaagccagctaagagcacccaagtagttatgaccaaactttaatttggtcacaagatccatagtgagctgttacagcttaggtaatttcatttttgggttaacaagtcttttggaagttgaactgtccagaaagattttagggtttgcaattatacttgattctggatcattttttcttttacagagttttttatgccacatgtatgattaaaagttgactttattccatgaatagcactttagagatccatgaatggggccaagtatggtggttcacccctgtaatcccagcaccttgggaggccaaggtgggcggatcacctgaggtctggagttcaagaccagcctggccaacatggtgaaaccctgtctatacaaaaatacaaaaattagctggtcgtggtggccagctcctgtaatcccagctactctggaggcagaggcaggagagttgcctggacctagtaggcggaggtcgcagtgacccgagatcgcaccactgcactccggcctgggcaacagagcgagactccatctcaaaaaaaaaaaaaagagagatccaagaacaagaatggctgacagctaacgtagggtctgtagacaatacttagggggcaatgatgagataacttcacctggaactaaatgaaaatagagaaataagatcaacttctgagaattaaatgctgaaattcacaaagcatagggaggcaaagtcactttaaagaggcaggagggctccttagttaaaacttagctggaggctgtttttttttttttttttttagatggagttttgcttctgtttcctaggctggagtgcagtggtgcgatctcagctcactgcaacctctgccttctgggttcaagcgattctcctgcctcagtctccagagcagctggagttacaggtgcctactaccacgcctggctgattttttgtatttttagttgagacagggtttyaccatgttggccaggcttctctcgaactcctgacctcaggtgacccacccgccttggcctcccaaaatgctgggattacaggtgtgagccaccatgccccgtctactggaggctgttttaagaaatggacatgctcaagaaagaactggtgactccgtcagctgtgggagctgagaaagggaaaaactaagaggcataagttgttggcgtcccagtgctgtggtgggagcaggctggctcctcaaaggggtgtctcagcagcttggtgtggcaggtatgcaccgtgcctgtaagggacgggatgtctgggaccctcatgtcacctgggaccccaactgtgaagcatgaaggttgcagttttggtttcttcatcaatttgcccaccatgaacattcgtaaaagttgcttggtgaggcagaagtcagcagtaagttttatcatttgaatatttatctgatagctcaaaatatatattcctcccacaataccagatgtctagaactgctgtttagtcattactctgtcaggttgcacttgactacaaagtctgccaaaaaattaaggtgcaaaaatttaatgacttctgtgattatgcatctgtttccagctattctctttgcttaggcaagtcattacctatgcctgttttgcctcaaggtgctaaaatgcagccttattaaaaacggaaacatttttcatcattacagcatgaatctaaaaagaaagagcgtaaactaactttttatctgacatttaatactgtgtgcagagttgttagtagaagagttaaactgtttcccttgttttctgcaacaagggtcattgtaagtagtcatttccatctccagttttgaagcttatcatgcagttataatggtgctgaggttgataattttatgttctttccaatctataactcagctgacttcatcaggttctattctatgtgcagagtatcattctaagttgctctgtcacaaaggattagaaaggaatttagtagaatgcgtattctcgtttttataaagtagatggtaactatttcataatataagtgagtatatcattaagcagaaattgtaagtacagaatcagtgttttaaagaatccactcaataggccaggcgcacctgtagtcccacctactcaggaggctgaggcaggaggattgcttgaatctaagagtttgagaccaccttgggcaacatagcaagaccccatctcaaaagagaaaaaaattgactcaacaaatattaattgagcatctatggttatattagtcatttttgaatgcaaaaagacatctgtagacaacacatgggggccttgagaatgacgataacgtgtttgaagctgtgtagcaatatgtaaaaagtttgagttgacgctgtgctaattgtgcatgtgaagcctgagaggagaaggcgggaagacttttgtgaaatcactcaggaaagacagggaaaatgagctggaggacataggtttagaacatagttctggaagatgaagacatgaattgccagaaggtctrcttttgggatgccaagtaggaactggaatttgtaagggaacagtttgtgggatgggtaaagtgtgtkttgggagtggaatgtgatctttgtagattgcagtgaatggaagggagggtcggtgagagtggggatgtggctgatgactacggcttcctaaatgcagatctgcacatagaggaatacagagtttgaagaagagctatttttttccctgtttttttcctccctgtatcacagatggaagggtaatgtgaagtgatcgagactgactatttaaagaggtatgcaaacaaaaagcaaagtggaggtgagacagacagaaacccataaggagagtttgtgcaatgatctaataaatcacctgtttgagtttattttgttcagatgcctattatgtgcactgcatctgtgtcaattatgatttgacatctgtttttttgacttaaaattccttctggagtggatatttgtgtaaaaattcttatattaaatattttgttagttacatgaaacaaaagagcaaacagctcaggttctagagatgatactattaagtatcttgaatttatgttgtgatggcaaagctgtcacctgagtctttttttttttttttccttctagaacctggggtctagccaccaagsggatcccatgctgaaacaatctttcctgtagtttcaaaagcatattaacacctgtctaaaaccattgttgttctccagaggaactttacgtaagattaaattggaaacaatgaaggagagaasataaagcataattgcattgctttcagtaggttctagtaaagcaagaatccaggcaccatttgaagacactaaagtaggaactttaacctcagcacaaggccagggtcttgcttgcccagggaatcactttggatggggagcagagaagtaagccactgtagaaggaatatttggggagaggggtaggacagtgtttaraattaaggcaggagctgagaaataggcagaaccagagatacattatggttccaggcaaggcaacctgcaaatactgcccccctctctaaaaaaaaatcagaagtcaggatgcttaaaagggtttcattaytgggggcagaggtcggcgggtcagaggttggattacattttctgctttagaccaaatggagctaacctagctgcttagagacctctatactctctccacctgaactatgtagcttttgaagagaactgacacttctaattttgtarccttttgtggtgagactataaaccctttatttaaaacctggcataatctcaactttacaaattattttttttctgctgtttgcagaaagttttggaaatcactatttttcttgaaaagagttaggcccttgcctctttagtttttttttttcttttttttttttttatattaaaaacacctgattttcatttgttaagccaggagagctagcaaagcctttcatagattagtgtaaagaagcttgagaaagatggcctggcgttttctaatttcagaatttttttttattcacagggagactgtgagttacttcattaaaaggttaactttgagagtcatgagtgtgatttattgcctcagctttttgatgctgtatatcattaaacttttcttttgaagtgaaaggagttggatgcttaatagtttactaaaagttaattttatttttagaaattgataggcattaattgtatttttatttattaaattcgagactttattgcattgctgttgaatgcaaatttatcgacccattcattcaacaaatattgattgaatacttactttgggcagcggcctggataggatgctccaggagaaaatagaattttttttttatacacattctctcacttaaataatactgtcctttttcacatatacaactggcattcttagaaacatcttttatacatgtgtctttatatagaacttcatgcatcacaggaaatagaacattgagattcaaggccaagttgctcaacagtaatgaaatcttcacaccatttggaaggctgtgtcatgaccctttgtctctctttggttgcccagcatttgaacccctttgcttcctggagaagtctacaccctgtgtctggagggagctggggctcagcccattaaggcagacggaggccaggtgctcgggcttcccaagctcaggggagggtgggcctcccttccagcatggcatgttggatgagtatggagctggagaccccaagaatcaggtagctttagacctccctcctctgggtgtctagtggtgacagtggaggccaagtgcaaagccagcacatgcaagtgtgcagaggaggtgggggctccatgaacatggtgccagtggtgtgtgatgcccagcagggatggcctctccagggtgtaggtcactgtagactgtgccatgcccagtgcctattgcggaaatggcacctgccctccaggaggctcattctagttgggggagcaggtcattccactggttgagttgctgtatgaatcagtacaaacatggccccctgagaacataggcaaggaaagctgtgaccccatctggacatgccagtaaaggcttttttatggcatttgaactaagccttgaagaaatgtagtataagtttggtagactcccatcttgggcagcttgaggactgtcactgaaggcggcaatacatcgtgggtgtcactggatattagggaatggatgaagaaaagaggatgagctactctcagctaagatgatgagttcatttttggaaaggtggagtttgagrgattagtgagacatctagtttatgggcccagggtttggagtagagagagttggaaacgacagtagttattgtagctttttttgagtgctcataatcattgttatttaatttagtgctcatattggtacactatgctatgctgttttcaagcatcagctcatttaactctatgaattagttgctgttattcttgccgttttgcagagaggaaactgaggcttagagagattaataaaatagtggagtcagtcctatacctcagttctgaggggatccaaagcctattctctctgccttgctgcctcctgacttgcaggtggggccatgatccctcgtgcagcagagccatgttgataggtaaacagtgtgctattcagtctgtctcttcatatagctctgttcttatggcttctatccctgacacattatattgtagatttatttgcttgttgcctgtctccctcatgagaacatgagatccaatagggcagggactctgcctgtcttrtcacagctgtttactgtattcctagaacagtacctggtacatagtagttgctaaaaattattgcaaaattgatattgttaatagtcatcacatgcttaccacatgccaagtgcctggcatgtattaactcacttgctcccctttgctgttgtcatctcacatgagagaatgaggtggcagagccacaactaggataagaaactcactcgagttgcatggctcagaagaaatagagccaggattcmaaggaatttggctccaaaaatcagatccttaaatactgagctttacagccttttgtgagtgaatgaattattagttaaaatagatttatatgagctataaaatggacggagtaatgcttttcaaagtaaattgttcataaaaataaaaatttctaaataatgaggtaatattttatcttgttaggaaaggacatttaatgattaagacaggtatctagaaaaatcttttcttttttttgtaatatagactcagattcctagaaggtatgttattataacatcacatataatctgctgggggccataaatgaatactggatttctaaaggctagtaaatctgtctgatacatgttgcaaatagcatattacagatctctgttatcctcataagacatacgtacctcttacagaagaaattgtaacaataaacagatgttaattttcaccataatttatttgttgttctaaaagctcwgttcagtgcctcagaatgatgtaatagttggaatttagacaaacagttgaaatggaatcagtcttaaaagttcagttttttagaacctttgcctaatgctgatcttactttctagtttagcatgtagtctgaataataaaactgaatgagaccataaacccatgtacttctaggtttagaggttaaattaaggacaaatgacaaatactggcaaatagtctgttgacaagggaaagaccagcaccatgtagtttaattgttgaattatttccagacatgcagaaaaactaaaatggttcaaaaccaaatctgctgaataattaaggttatttatgatattttatatattcatctattttaatccatgttcaaatgttagctttttcattcatactattaatatttctacatataaatttttaatgatttcccctccatgtcaagaataatgacccttctccattctaaaaatattgtgagaatactcagctgtgatattggaatcaaacccctttcccaaatgaggatgatgaatatgtataagaaccaactaatgaattagaatgttggttttaaatttgtttgctctcaataattattagctgctttaaatatgaattcatgccttgataacaaatatgttccaaggaagtaccgactgaaagttcagtaggcttcctgtcttcaaagtgattatgataccagtggatgctgataaaggcagactttaattcaaagagataaatagagttgacatgaaagtttaaattactgcaagcgaccttttcattttctttcccttttctgtcatttatccatatttgatcatttgtatttttagctcctttatgcctgcctgttacggcattatctcattatcgagagaattttgaattaccttttaggtttgaaatagtagcatgattaggcatcatttagattgacgacagttgttgcatgcatgaatgcctttactatgtctttattccagacagctcttggtaatgttgatataacattttcttattttccccttgaattttaatttgaaaactatttcttagttattcagccagttacttatttaaaaacttgctttgagactgggcacggtggctcatgcctgtaatcccagcactttgggaggccgaggcgggtggatcacctgaaatcaggagttcgagaccagcctggccaacatggtgaaaccctgtctctattaataacacaaaaattagccaggcgtggtggtgcacccctgtaatcccagctactcgggaggctgaggcaagagaatcacttgaacctgggaggcagaggttgcagtgagccgagattgcgccattgcactacagcctgggtgacaagagcgaaactctgtctccaaaaataaaaataaaaacttgctttgaatctaaaaatggtatcatttagtgacactacctttaaggagatctaaatcttatgatggcgatagatggaacataaattattataatcctaagtggtaggaactgagataagatcatttgatagaaaattttattgcaccctttttgataattacctttaaggtgctactacatctaagtgtaatattacatctgtttgggtctctgtgtgcattcatatatatatrtgtgtatatatgtgtgtatatgtatatgacaagaataaaagctcttgggcatttttggggattagtagattaaaatttatttacaattaagatgactttggcttaatcaagagttaatcaagagcaggtttctgagtgccaaagtagcacctactttgtatttttgagtactcacctttggagagtgttattaacaaggcatgctagcttttgaaatgttgttatatggagatacagagagacagaaaatttgactgatcttgtgttcacaaactgaagcaaatatgaaatctagtatatgatttactaaacaaatataatggagctatgaatgactttaatctactgataatccatagagtttatttcaatctaggatgtgattccttgtttgcactacctaaacctttgcctcccacattttatgttgtggcagaaatyattaataagcttgtcttctaatctctcccaggaaagtgcttytgtagcctttctgctgmggttacygtcaaggtatcaaaggaagccttttctcagttaatagctgttgatattacattatatatatatcctataactaggaagtataatacttgtttggaagtaaatttttgaggtgcattcattttccttcaatgtttaaaaaacttagctatgttttaattgaaggatttttaaagcatatatctcattgttctatcatcttgacacaaatattttcacttcctggttcttctagtctctgttcatctaggattttgttttattcttggaatcatgtctggtttttttctattaaacataaagacatttccgttgttataaagttttcatcataattttaattgatacataataactcattagctacttttatgtaaaactttaaaaagtatttgctatatttcttttcttgtctagctcacatttgcatttacccataattattccaaagttttatgcaaatagtaacgtcattagtttctttacacatgattttctgctcttatgtaatccttcatgaatatatatatttgctggaattttaaaaagacaatgaaaattactgcataattcagaagtaacagtaggaaggccctgaattatttatattgggtaactgctaattcagccttaaggtttgctctttctaacataccacattgtttgtctgatttaacctgtgattactgttttttgcatttcatatttctacatggaagttgaaatgaatattatataaaataaatgagatttacttgaaatttaattccaaagatttacattaaagactattctcttcttaaataataaatatctatgaactttaagacagctgtgaaatccacatcagtgcagtaatgtttcagatacttaggtacttgttcttgaattcttttgtctgtaatggttactaggaatatagttttatggctagtataaaacacaggatataataaagtttgttgggggaggaggtttaagcatatgagatatgaaatttttgacttttggcttttgtaacaacttgaaatatagggaatagtgttttgcttcaaagctaacactcgtagccttaaaaatattaatctctctttatatatgtatacataatttatgtaagcacagttgtgccttatttctgaattttagttcctcctatgcttataaatttgtcaattccattattatgctattcctgttattgcctgagtaattaaggattacatttctcgaccaaaactttttgttatcagggtattttaatgtgtttagagaactttaaaaagtaaagtaatttttgcacatgaggtagatcaaatattgtatcctctagtttagccaaagggttttcattttcacatgttccatatgttgtatataaaataaaaaactgcttctgtgcctctgagttatccctgactacttcccccaggctcttcccttcaagtcaccttcacagatttcaggttggctcggagtcacggaagaccctccttgtaggtcttgagctctatttgggtgtgtgggtggtgcagagtgtrgaggttgcatggattcagccaaaatacttcatttccagtagctcctggagaaaatgaggaaaaagaagtggtttgaagagtaccatgtcaggtctctagaaacagctgcattttaagccaagccttttctttttttcttttttcttttcttttcttttcttttyttttttttttactttttttcggagtagtcaattcatacttatcttctttgatcattgttttctcaggagctccccagtgtcctcctccttcatcagctggctaaacaagaaggtgcatggaccatacttccgttgttaccgcagtaygtttgtttaactcacctgtgaattactgacattcctacctgaacacttttacgcccttagtctttttattaagagggtgtggttttcctcagtcagtaagtgaagtaaatttgagttttactttttatgattactaccttaaccaaatttcttgatgattggttcttaatcatgaatagctttttctttttttttggagacagagtctcgctctgtcgccaggctggagtgcagtggtgacttggctcctgcaagctctgcctcrtgggttcaagcaattccctgcctcagcctcccgagtagctgtgactacaggcgtgcaccaccactcccagttaattttttatttttagtatagatgagattttaccatgttggccaggatggccttgatctgttgaccttgtgatccgtctgccttggcctcccaaagtgctgggataacaggcgtgagccaccacaccctgccctatatatgctttttcttaaagaataaaatgcttcaagttgatatttgaaaattatttatcccctgaactagtgttgttatggagagaattaactttacgaactccagctgttttttaaaccattagcatctggcttttctataagctgaagaaaaatatagagaaaaaaattagatatgccattctgtgtacccttcattcacttcctactgatcagttttaaaccttattattaacttattttacagaagtgattactgaaacttgtttcttttggtcagyttttctgtaacatatagcagaaattcatcttggattttcttctgtgaagaagagacaagaatacagattccaaaactcttggaaaccctcagaagatatgacccctctaaggtgaatataacttcaataccagttcttattttgggggacagtgtttcaaaggagatttaattttgattaagaagcttttgaatctaataaaaaaccacttagtttaaaattaaaaagaatgaaacattgttgawtatctgagatatgttaagtaatgctctttgaagtttgtagcttatagagggacagagcttataatgagccattttaaatgaaaaaaatctgttaatatatgtgttagcaatttcagagagttggaaactataacttgaagttcataaactgcttttcttagcaataaacttaagttggctatttctgcttattagacagtgaccatatattattttagatagaaaattttttttgagtgccagctgtatactgagcactgtggatggcggaggctagaacaaaacagacagcgattctgaacatgtgggtggcacagaatagcagggagaacagaccattagagaagcagttatggttagaagcaaaacatctctaataaggaagactagggtgctgttagaagcatataacaggggcatggaatctaagctgggagggtcaggacaggaagtgacatttaatctgagttctgtaggatgagtaggagttagcaagagagaaagagggtctaccaggcagagggaacacgatttgagaaagaatgggggtgggaagggatgtatcttgaactagaggaactcagtgaagtccactactgcttttacattttcagatcttgtttttatttcatgcagatttgatagagcaactggattttgtttgccttgaaatccctagcccttagcagagtgtttaacacttagtaggtggtcagtgaatatttgcgaatgactttataaccctgtaataatcagttttgctgctgggctatgttcaaaggctcgttaggtttagagagctgccttggaaatgtgtcaagagtaaatcgagctcattcagttctctttcagaggaaagaagcccaggttacaacctgatcactttttggaattctttaaacttgagataagcagagatgggccctttctggtcccagtggaaacctgtcccacccaccttcgaatgctcgctcctgagatgaatcagatgtaatgagctcrtggggaataaaaggcaagcttctgggttctgctcggtttgttgatgtagatgtcaaacactgggcaacagtgatcgttagattaatttctccaaccctggaaagcctgttactataatagaaaccactgcttttgatgatctttaaatgctggaaagatccactatgatttttcttcatgcttttaatttctgggaagctttagatataattggatgagaaggtcattgggttaaaaaaataattctttcaaagagaagaattatgaacctgtctcatccagtcttttcagatgacactaaccagcatctgtgcactttctgccatgttttatgcaaaccatttgttagrcttttatgtttccttttggcttgggaaaaactcccaaatcttttttaggatgtaggagttttcacctcctcctagtgttcatttcacctggaggttatttttccattatccatagctctaattctgtacaggagatggtgactcactttgctttttaatgaaaattgggatgataaatttaaaagttcaaagcaagttcatgaaaagcaagtacagaacagaggtaaaaggagatgttttctccctcttttcagaactctgccatgtgtaaaaaaaaaccatccaggatgctttatttcttttgagactaacagtaagaaatgataaagattatatgatgttgaagttagctcaaaccagtgtgatttttttgtcctctaccatttgaagggaaaaaagtataaagcaaacctggctttgatatttacacaaataaactttgagtacattaaaataattatgtaatgtgtgagggtataargtattttgtttgattctgatttatttccatcatcatctttcagtcattcttactaatgcaaatgtatactgtcaaaatattttaaatgtaaaacttttaacttttattaatctttattaaattgccttcctcggtgatttctataaatttttgtatgttgtttgaagtctttcctttgtaaccacagtatgcttttaatatatgtgtattttatgaggtgtgttgactttaaatttattttgttttattttattttttgagacagagtctcgttctgtcacccaggccggagtgcagtggtgcagtcttggctcactgcaacctccacctcccaggttcaatcaattcttgtgcctcagcctcccaagtagctgggattacagtcttgcaccagcaaacctgagtaatttttgaatttttagtaaagatgggattttgccctgttggccagtctggtcttcaactcctggtctcaagtgatctgcctgcctcggcctcccaaagtgctggrattacaggcatggagccaccacaccyggcctaaatttatttttaatagagataaaacacaggtgcttgyaaaaagtaattctgaggggcgtccgccattgctgaggcttgagtaggcaattttaccctcacagtgtaaacaaagccaccaggaagttcaaactgggtggagcccaccacagcgaggcaaggcctctgccgccagactgcctgtttagattccctcctctctgggcagggcrtctctgaaaaaaggcagcagccccagtcagagacttatagataaaacctccacctccctgggacagagaacctgggggaaggggcagttgtgggcgccacttcagcagacttaaatgtccctacctggcagctctgaagagagcagcggatctctcagcacagtgtttgagctctgataagggacagcctccctcctgaagtgggtccctgaacccccgtgtagcctgactgggagacacctcccagtaggggccgacagacacctcatacaggagagctctgactggcatctggcaggtgctcctctgggatgaagcttccagaggaaggaacaggcagcaatcttkgtggttctgcaccctccaccggggatacccaggcaaacaggatctggaacggatctccagcaaactccagcagacctgtagcaggggaccagactgttagaaggaaaactaataaacagaaaggaatagtatcaacatcaacaaaaaggacgtccactcagagaccccctccgaaggtcaccgacttcaaagaccaaacgtagataaatccatgaagattggggagaaacyagcacaaaacggctgaaaatcccaaaaaccagaacacctcttctccttcaaaggatcacaactcctcaccagcaagggaacaaaactggatggagaatgagtttgacgaattgacagaagtaggcttccgaaggtgggtaataacaaactccttcaagctaaaggagcatgttctaacccagtgcaaggaagctaagaaccttgaaaaaaggttataggaattgctaactagaataaccagtttagagaagaacgtaaatgacctgatggagctgaaaaacacagcacaagcactttgtgaagcatacccaagtaccaatagccgaatcgatcaagtggaagaaaggatatcagagattgaagatcaactcaatgaaataaagcaagaagacaagattagagaaagaagagtgaaaagaaatgaacaaagcctccaagaaatatgggactgtgtgaaaagaccaaatctacatttgattgctgtacctgaaagtgatggcgagaatggaaccaagttggaaaacactcttcaggatattatccgggagaacttccccaacgtagcaaagcaggtcaacattcaaactcagaaatatggagaacactacaaagatactcctcgagaagagcaaccccaagacacatagtcgtcagattcaccaaggttgaaatgaaggaaaaaaatgttaagggcagccagagggaaagtccggttacccacaaaaggaagcccatcagactaacagcggatctctcagcagaaaccctacaagccagaagagagtgtgtgccaatatgcagcattcttaaagaaaggaattttcaacccagaattttcatatccagccaaactaagcttcataagggaaggagaaataaaatcctttacagacaaagaaatgctgagagattttgtcaccaccaggcctgccctgcaagagctcctgaaggaagcagtaagcatggaaaggaacaaccagtaccagccactgscaaaacataccaaattgtaaagaccattgatgctatgaagaaactgcatcaactaaggggcaaaataaccagctagcatcaaaatggcaggatcagatttacacataacaatattaaccttaaatgtaaatgggctaaatgcyccarttaaaagacacagactggcaaattggataaagagttaagacccatcagtgtgctgtgtttgggagacccatctcatgtgcaaagacacasataggctcaaaaagggatggaggaagatttaccaagcaaatggaaggccaaaaaaaaagcgggggttgcaatcctagtctctgataaaacagactttaaaccaagaaagatcaaaagagacaaagaagggcattgcataatggtaaagggatcaacacaacaagaagagctaactgtcctaaatatatgcactcaatacaggagcacccagattcataaagcaagctcttagagacctacacagagacttagactcccacacaataatggagactttaacaccccactgtcagtattagacagatcaacaagacagaaaattaacaaggatatccaggacctgaactcagctctggaccaagcagacctaacagacatctacagaactcgccaccccaaatcaacagaatatacattcttctcagcaacacatcactcttattctaaaattgaccacataattggaagtaaaacactcctcagcaaatgcaaaagaacggaaatcataacaaacagtctctcagaccacagtgcaatcaaattagaactcaggactaagaaactcactcaaaaccgcacaactatgtggaaactgaacaacctgctcctgaatgactactgggtaaataacgaaacgaaagcagaaataaagatgtcctttgaaaccaatgagaacaaacgcacaacataccagactctctgggacacatttaaagaagtgtgtagagggaaatctatagcactaaatgcccacaagagaaggcaggaaagatcgaaaatcgacactctaacatcacaattaaaagaatagagaagaccgggtgcggtggctcatgcctgtaatcctagcactttgggaggccaaggtgggtggatcacgaggtcgggagattgagaccatcctggctagcatgatgaaaccccgtctctactaaaagtgcaaaaaaaattagctgggcgtggtggcgggtgcctgtagtcccagctactcgggaggctgaggcaggagaatggcgtgaacccggcaggtggagcttgcagcagttgkccgagattgtgccactgcactccagcctgggtgacagagtgagactccatctcaaaaaaaaaaaaaaaaaaaaaaaaaactagagaagcaagagcaaacaaattcaaaagctaacagaaggcaagaaataactaagatcagagcagaactgaaggagatagagatacaaaaaaacccttcaaaaaaaatcaatgaatccaggagctggttttttgaaaagatcaacaaaattgatagactgctagccagactaataaagaagaaaagagagaagaatcaaatagatgcaataaaaaatgataaaggggatatcaccaccaatcccacagaaatacaaactactatcagagaatactataaacaactctatgcaaataaactagaaaatctagaaaaaatggataaattcctggacacatgcaagactaaaccaagaagaagtcgaatccctgaatagaccaatagcaagttctgtaattgaggcagtaattaatagcctaccaaacaaaaaaagtccgggaccagacagattcacagctgaattctaccagagttacaaagaggagctggtaccattccttctgaaactactccaaacaatagaaaaagagggaatcctccctaactcattttatgaggccagcatcatcctgataccaaaacctggcagagacacaacaataaaaaragaaaatttcaggccaatgtccctgatgaacatcaatgcgaagatcctcaatgctggcaaaycgaatccggcagcacatcaaaaaacttatccaccacgatcaagttggcttcatccctgggatgcaaggctggctcaacayatgcaaatcaataaatgtaatccatcacatatacagaaccacatgattatctcaatagatgcagaaaaggcctttgacaaaattcaacagcccttcatgctaaaaactctcaataaacttggcattgatggaactatctcaaaataataagaactatttatgacaaacccacagccaatatcatactgaatgggcaaaaactggaagcattccctttgaaaactggcacaagacaaggatgctcttcctcaccactcttattcaacatggtattggaagttctggccagggcaatcaggcaagagaaagaaataaagggcattcaattaggaaaagaggaagtcaaattgtctctgtttgcagatgacacgattgtatatttagaaaaccccatagtggccaggtgcagggactcacacctgtaatcccagcactttgggaggccgaggtgggtggatcacaaggtcaggagtttgagaccagtaaaaccccgtctctactaaaaatacaaaaaattagctgggcatagtggtgggtgcccataatcccagctactcgggaggctgaggcaggagaatcgcttgaagccgggaggcggaggttgcagtgagctgagrtggcgccactgcactcccgcccaggtgacagtgcaaagaygctgtctcaaaaaaaaaaaaaaaaagaaaaccccatcatctcaaaagctccttaagctgataagcaacttcagcaaagtctcgggatacaaaatcaagtgcagaaatcacaagcgttcctatacaccaataacagacagagagccaaatcatgaatgaactcccattcacagttgctacaaagagaataaaatacataggaatacaacttacaagggatgtgaagggcctcttcaagcagaactacaaaccactgcttaaggaaataagagaggacacaaacaaatggaaaaacattccatgctcatggataggaagaatcagtattgtgaaaatggccatactgaccaaggtaatttatagattcagtgctatcctcatcaagctaccattgactttcttcacagaattggaaaaaactactttaaatttcatgtggaataaaaaaagagtccacatagccaagacaatgctaagcaaaaagaacaaagctggaggcatcatgctacctgacttcaaactatactacaaggctacagtaacaaaaacagcatggtactggtaccaaaaccagatatatagaccaatggaacagaacagaggcttcagaagtaacaccacacatctacaaccatctgatctttgacaaacctgatgaaagcaatagggaaaggattccctatttaataaatggtgttttgaaaactggctgggcatatgcagaaggctgaaactggatccctttcttacaccttatgaaaaaattaaaatggattaaagacttagatgtgagacctaaaaccataaaaacctcagaagaaaacctaggcaataccattcaggacrtaggcatgggcaaagacttcatgacgaaaacaccgaaagcaatggcaacaaaagccaaaattgacagatggcatctgattaaactaaagagcttctgcacagcaaaagaaactatcatcagaccaaacatgcaacctacagaatgggagaaaatttttgcaatctatccatctgacaaagggctaatatctagaatctacaaagaacttaaacaaatttacgagaaagaacgccatcaaaaagtaggcagaggatgtgaacagacaattctcaagacatttatgcagccaaaaacatatgaaaaaaaagttcatcatcactggttattagagaaatgcaaatcaaaattacaatgaggtaccatctcatgccagttagaatggcgatcattaaaaaggaaacaacagatgctggagaggatgtggagaagtgggaatgcttttacactgttggtgggagtgtaaattagttcaaccattgtggaagacagtgtggcgattcctcaaggatctagaaatacgatttgacccagcaatcccattactgggtatatacccaaaggattataaatcattctactataaagatacatgcacacatatgtttattgtggcactgttcacaatagcaaagacttggaaccaatccaaatgctcatcagtgatagactggataaagaaaatgtggcacatatacaccatggaatactatgcagccataaaaaaggacgagttcatgtcctttgcagggccatggatgaagctggaagccatcattctcagcaaactaacacaagaacagaaaaccaaacaccacatgttctcactcataagtgggagttaatcaatgagaacacatggacacagggaggggaacatcacacaccagagccttgtgggcggtggggggcttagggagggatagcattaggagaaatacctaatgtagatgacaggttgatgggtgcagcaaaccaccatggcacatgtatatctatgtaacaaaactgtgctttctgtacatgtaccccagaacttaaaaaaaaaaaagcaataattctaagatgctagtggaacactgrgttattcttttaaggtttttcttgattataattgtccttttaatgaaatcattaataaagtcattaagaaagattggggagtggctctatgcatagattctataataatttttttaaaagtagtttacagtataacccacacaaaaatattgaaaaacaatcatatactatataatagctgaatactgcaattaagagataaaacataacaacatgttttccataaaactgtatttgcaaccagaggttttaatcgtgaaaggttttaatagtgaaagatttgtaagacagttttcaaaatatactgagatgtttattttctttatacaagctatattggcatggtatgtaaaatacagtgattttcatattggttaaggtttagtcacttgataaagagctttattatagatttttttttaagrtgttgtatttttcatctcaagctgaggtcatttgtcttggttgttacagggtattcttcttacccagtaatgatttaatatacccataggcaaagtatcaagaagaaagtcatcatatggatctgtgaatctaaatacatttttaatgttagatgtaaaagttaacagctgtcacatatgttcagttatgacctgttgctgaattgaggaaaagtaggactgtgggaggaatttgcaatacaaccacaagcagaataaggctcttaagaaatacctaagagtactcatgtatggtgtcttcttgattttatattctgataaataatagagagtgaggtggtcttggttgggtaagagaaaatatacaaaacttttagaacttagggtacttgattcatattgtatgctctagtttcttcagtagaggcgagttgctttttaaatctttcctggacttgctgcattcatttgacaaaaagttactgtgcatctattacatgttaggtgtactggagatatagcagtgaacaaaatggrcaacatccctgcccacaaggagrtgatgttcttgtttcaggggagataagcaatagagaaaaatgcaaatgtataatgtgtcggatggtaacaagtgccgtggagaagaacaaagcagaataagggagtaagggatgcrttgggaatgggcttacctgtctatatagggtgttcaaggaatacctcattcatcaggtcacatttgaacagagtgaaggaactgagggagtcagccatgtactctcttatgttaagctgcctacttcatactgttgcttatctaataggaacctaaaactcgacatgttcaaaactgaactctcaatgcctttctaaacctcttccgtcttcaatcttcctcatcsagaaatgcaycactgtaactgtctatctggttgctcatattaaaaacctaagacttgagattggttcatctttttttcttcaacttcatgttggcatgaccagctrgttctacttccaaaatatatctcctgtccatcttctctccatatttaatactactacgctgtttcaggctatcatcatctcctgccttgaccattattagatcctcctgtttcagtggtttcccattccacctaagatatttttgctgggtatagcattctgagttgggagcaattttcttccattactgtacaaatgctccaccattgtctttcccctctcatcatttctgttgaaaactcaactgtatatcttgtttctgtttatttgaaaaaaacatgtatactgtctccctctatgacttcccctgctgccagctgcttttaggatattctctatctttaattttcaacagtgttaccattatgtgcctatgtgtgattttctttgtatttgttctcaccggagtttatagagcttcctgagtctacaacttgatgacttttgttagttttggaaaattctaagcctgtattcttcaagtattccttcagtttcattctgtctctccttagtttctaatgtcatgcattttagcccttttccttttgtctcatattgccatagctcttttcttcccttttttttcttatatcagtctggatattttttaccggacttgctttccagactgttagtcttctctgctattgtgtttaatatttttttgaattactaacttcagttctttcattaagttttagatttttcatttggctcttgtttataaattgtagttctttggtgcaatttaaaaaatctttttatccttaaagaacacattaaccatagctgtttaaaagtcttatttgataactgcaaaatctgttttatctgtgcatctccttctatttttcacttttcttgtttctggtttggtcttgtttcttgctctgctgggtgagtttggctaaatctcagatgttttatgtgaaaaattaagaaggctatggatgataggacttcctatagaaggatttaatcttctgggttgtagatgttgtttgggtacgtctattcatagactgcccttactccagagccattttgtcstggcagtctgaactccaaccttgatctcccggcactacagtactgctaaaggctttgctcagctttttagcctctccactgctgctttctgcttggttctttttttccccccttggtttttgtgcagcttaggtcattgagggaaacttgcatgcggcatcttgggacccccttacatctcttctctttcaaggtctccagctccagactccgcctttcagtccagcaaggctgcaagagcccccagctgctgcttttggctgtgtgctatctgcagctccaggaatcagcaaactccttgaggaaaggaggggctcccatggatgggctttctaattctgagatcttagtcctttatgtcctttctgcctttgttgttttctgttttttttttaattttattattactatactttaagttttagggtacatgtgtacaacgtgcaggtttgttttctgatggcttcaatcatttgctttgtgtaatttctccagcttttaaacttgttctcaacaggagagtagatgcaatccagattgttctattgtggtcagaagtggaagtctttcgttacacttagaataaagtctgtgctcctttcccctggcacataaaactcaccctggtcagccttttgcctgtctcttttgtaccttattcccacacccagtagctccagccactggatttcttttttcattgactgtatcaaactttttcccacctcagggactttgcattaagtcctttgacggctcttcctcagatttttgcatagagctggctctttgatattatttcatctcagtttgctactgaggatgaacaaaatgctagtcttcattagatgactaacagatttttgcataggtccagctccttgatattatttcatctcagtttgttacatcataatagatttccctctcttttcagggcagctcctagtcaccctgatttattttcatcctagcacatttcagtcactacctgaagttatttkatttactttcttaatttccatttctccactctagggtaagctatgttcctgcctggtgtgtggtagattctcaataaaaatcatttgaatgaatgagtaaataaataaataatcactgattctgaaaggaatttttcaaattattctttgaaaacctcagtagggtataagggcatactattttctttgccctaatagtctttttatatggaatattctataaaatacaacttttatacatttatggtataatgaggactaacattttgttcatcttgatgatcagatcttgaactacttttttgtatacaaagcttatattcattatcatactagtgttaattatatttttgttcacattctctagaaatatttaatctgtgctaataactctttatcacccaaaatatttaattatctgaaaccaatagtaccaccttctattggtcttacatgaaatgattgtttttaaagtgacatgttatatctttatttaacaggaatggtttttgggaaaagcattacatgatgaagaagctacaataattcaccattatgccttttccgagaatcctacagtttttaagtatccagactttgctgcaggctgggccttaagtattccacttgtaaacaagtaagaatttattggaattttttcggggggcgggaggggtgtgcatcaactttaatttcattgagtactgtaactgatggatctcaggatctcaaatgagtttttcagccagaggcagtgtgtggtaagatctggaaaaggagccagatgcttgarggtttctgcttcagcgctgtcatttactagacccttcagacaaatcattcarcctctctgtatttcttctcactcatccaaagataacaagttgtgagactaagggagaacacagaattgctctgagaaccatgcacatgggagcatcattactgttgttaagggatctacttagctataggtgtaactttgatcaccagtaagaaaatgaagcagtaacttgctggggttgagagttgatgactcattaggtgcatgggtatgcatacttaaacactggccagtcaggagggacagctagtggaaggtactataggtcgtcatacctagctatttgtgtgtatattcacaatggtgctctgttagatgtggaaagtgaagatagttaaattgtaattcaggagaagtatggttgttgacaagcccttcagattaatcattatgtttttgttctttagggaatggaaagttgataaagcacttgtggcttttatatcttcagagatgaaagagtttctatcattaagtgtcctgtctctaggatttggggtcttgaaaatcttattagcccattgtagatatacaggatattacataccttgtcattcacagctggacaaaacttcttgactactcctttcacatttcaaagttctctacagtgtgataccctcctttccagggtagaatccaaacaacaacaacaaaaccccctgtgtttcctagctttccttgctactaggaagcagccgtatgttgtaggttccatcaggtagatgtgttatgtacaattatttttgggaactgaattgtgtggggaaggagacaaagcatgggggaccatttgaattgagactygtagcaaaggaagagtcgtttgcagttgacagcggcttcctgatgatggcagagtctgaagctcctacrctgctgatttctgtggtacaaatctgggggttcttggaatctcagcttacagtctgtttactcakactttccagtaattccatgagccatctatatgctttaataaatgtacgttatgctttaactagccagagtggattatttttgtttgtttccagttaagatcttcgactcacgcactcagtcctgggcctgccgggcaagaatgcccatctcccggcccctgccaagcatgcctaagagcatctgcacagtttccctcccttcattcttagaagggtcaaggaggaagaggagtgaagacaagaagaagtagtggtcattcccttctcaccgtctactggtctgcttaattctgtgctctgcaggggagaggggaatatgttctgcccttcagcagccttgggtcgtgtttcttctcaaattaaatacactttggtttgctacagcttgaggaccaggagctcccaggacattcwtttcctgcagtgtccagcagccttatgtttggggccagtttagccacctttgttgagtctggactcttaatgaatagaagctgtgacctgcactttgtagrctgagccactgttccttttcccttcctcaagtattcttctcatcctcggccacaggaggcttcctctagccttcctcatttgatctctacttagttttatagtatagaaagatttggtctgacttctccatgggagaagtcccacgtggctgtgatttttctgacttgggacttataacctctgtataagcctgtttctctcccatttcccatgtgctatgaagtcccttgagagaggaacaaacacagctcttgcctgccctgtaaagtgctgttaagtgcagcaggttcttcttcctccagggctaaagaggaaaccagtgggcccaggtagagctatatggcaagcgggggtgtaatcatttccttgaagccagtgtagctcttttcttcatcactgccttctgatccaggaggcctctcatcctgaaggcaaatccttatagtctagagttttaccttccttcttcccatcacaatttcctgtcttcctttagcaagactttcttggagacctcttgatgctgaattcaattccgtttttgttgaattaggtgttagaagtaactatttattcttgcttcctttgacttactgtctgaaccaggtgcaggttgatggaagtgatcctgtttgaacacatttttgactcctggcatccctatatagggcarttcaacctaactcttatggctgacatgctggcattaagtataacctgttctaggaaacctctgtcctctgcttcactgctcatcaagtgtagcagcacccagagcactggcaggctttgttggctctggctagtgctcacctcattactgtctcatgctcaccacatgactagcttccaggggttcatgaaccagggttgcaggttgtgcactagctgagatgttagctttattaaggggcgactgtatgttctggattatctggcattttgcaaggtagtcccacaggagaccacaggtccatgattcccttccccattgtgtttgtgagatcattgaacacatctgttgacaagggaaggtagccagtgcccagcttccatagcggtttcacatctccctttctagtcaagtttaaccatatttaggagtgagaactgagggccttgtcactgcagcagggtgtgtaggcatcttagtctgtttgggctgctataaaaaaatgccataaaccaggtagcttataaacgacagcagtttatttcttatagttctggaggctggaagtccaagataaggcgctggcagattcagtgtctggtgagtgccarttttctggttcctttccttcttgctgtgtcccctcatctgggagaagggacgaggggtcttttttataggggtgcagtcccattcatgagagttccctccccatggcctcatcacctcccaaagaccctgcctcctaataacattgccttgaggggtaggacttcagcctatgaatttgagaggggacacaaacattcagaccatagtaatagggaactatgactaagggaattaaagccaagaggttaatcttttccacaaagctcaggaaattcccagcacttccccgtgactccagtatgatagaggagtgaggcaccagatagccttctgyatggtgtgtcatcygctcgtcacaacgctcaacagtgaccaacaaaccgtagaatgtrtatagttcattgatatccatggtcttctccctacctcctctccctttcctctgccaggaaaaaaaagcaaaataaatatgcagactctaccataatgccatatttaaaattctacttaccttagatcrtatttcctttcccccgatgccaacaagtaatcaagcaaatgatataacccatctagcatagcaactatcttgtggtcaagatatattttaaaatggctttctagtggggattcttatttattcttcaagaaactggtattatactcaggactaaaggaaggataaagtattcattagccscatcagctgcaacattggatcttcctagttgttgttttcccaattcaaagctaatgtgctgactttatttcttcctattattattagctatatcaattagcatgcttttggatgcaagtaataggaagcaactcaaactggattaaggaaatacttttgctgtaattggggtgaggtctgtggttggttgatctagcagtttatcaatatcattgaggacccacactttctctgtccctctagcctatagtacacagaatccatttatcctaaatctggttcctcttgtggtttcaagacaataagggctacatatttcctgtttgcatccaatagtagatagcctgttcccaaccatgaatggtaagtgcttgtcctcagtctggttgggccaactgcatgtgtrttctaatctccagactattaacagttgcgcaggaatttcattgattattagaattattagaattttcagttctaatccccagagtattaacagttgccagggaatttcattgattattctggctggcccagagtaatcaatctctgactctggagcctgtataattgttgggctcaatattaatcaaaaccagaatttgtttagaaagaatgaaggggaaactctgtattatatagacaaccaagaaggccagtccaggaatgttgattccctttgtgtcctttccttgactttacggcccacattgtaggtagcgtaacaacttacagttacttaggtgtttcttctgtcctagtccccaggacaactggttacctaaagatagctcatgagacacactttcttagactgtttccaaccaaaattttatttggcctaacaattccacatcagttttgagttcacactgcctaatatttcctggcagtccatccatttgatcaattaaaacaatactttcatttttggagaaattttcattaactaccaataagatgatttcttcaaatatatgtcattccaggacactgtttctggttttctccattgtttttccaccagcaaaccttatcgagatttccttcagcaggtggctctgttgactgattcacaagtgggactgaaaaagttagcctggaagtgggactgaaaaagttagctaggaagtgggactgaaaaagtcagctaggaagtagaattgaaaaagtcagctaggtattgagttgaaaggaccctcagtcatttgcacatctgtagcctaggtggttgtgtcattagaactgtgctattgggggcatgacttaacttcttttttttttttgaaacggagtctcgctctgtcgcccaggctggagtrcagtggcgcagtctcgctcactgcaagttccacccccgggttcacgccattctcctgcctcagcctcccragtagctgggactgcaggtgcccgccaccacacccgcctaatatttttgtgtttttagtagagacggggtttcaccgtgttagccaggatggcctcgatctcctgacctcatgttttgcccgccttggcctcccaacctcgtgatccgcccacctcagcctcccaaagtactgggattacaggcatgagccaccacacccggcccaataattctaaaaattaggaaagctaagtaccaaacttcgtgttttccaggaactgaatatttaatgaggaaacatttcatctaagtaactggaatttctggctttcattggttttttggtattgttggttactgaaactagcattggaaaaacctgttatcttgcttggtgtatagaaaactgaaatccagttaccactattaggtattgccttttaagttagttggtcaccctgcacactcttagaacttgaacttgtttgcaaggtgactggatgactgacataggcctgagatggcacgtgaggctaactcttccactagaagtctgtgatattgaggttgtggtacactctgtgggctgcaagagattgccactgaaagatagccatgtatatattcatttgtcctctcatcagtccttctctgtctcagaaattcttttttatttttattttttgagatggagtcttgttctgttgcccaggatggagtgcagtggcatgatcttggctcactgcaacctctacttcccgagttcaagcaattctcctgcctcagcctcctgagtagctgggattacaggcatgcaccaccatgcttgactaatttttgtatttttagtagagacggggtttcaccttgttggccaggctggtcttgaactcctgacctcagatgatccccacgcctcagcctcccaaagtgctgggattacaggcatgagccactctcagaaattctatcagtggttttcactttttccccttctgaggtttccctcaaagaaaaagaattttcaaggattgaatgagaaagaaacttgaaaagccaaaaagatggagagcatgtttaaggtaacagtactaaggtgtttactgactgttatgaaggggcctatgaaacattgccatctaacagtggaggtcacatgcctcttgtattctaatcacaacttggtgttccttgcctgtggcaataagcccgggtatgacttttctgtctttggagcctgaatgaaatgaatacttactctttgtggtctgattagattttgaaggcatgtggcatgagtccaaatcccaaagttaccttgatgcagtttatttatgaaaacatgctccaactgagcagaattcaaattgaacaagatctcacttgccagggcagacattttttctcttaagtatatatttggagtgtatctgaggatatagtctctcagtccaccccacttatactcacagatctgtgggcaagtattgagtgggaatgtgacagatattatatggggcttcttttggtgctacctgctaccaagctgtgttagtatcagctgtgagacaaatgctttgtaatgaagcacatttatcctgtgtctgctttctgtcttcttctaatcagaagtgaatttttatagaaatctttcgtggcccaaccagacagatgtaattaaaaacagtagaaaaaaatggaaacttactagtatttttcctttttcttttaaaatttttgtttctttctttttttttttttcttttcgagacagggtctctgttgctcaggctggagtgtgatcatagttgactgcagccttcaactactaggctcaagcgatcctcccacctcagccttctgagtagctaggatacaagtgcaccatgcttgactaacttaaaawtttttttttaatttgttttaacttttatgttaaactatgttgcccaggatgggctctaactcctagcctcaagcagtcctcctgcctttgcctcccaaagtgctgggattatagacatgaactactgtgcctagcctactctttttaaaatcactattatttctttgtagtgaaactatgtattaggaggtttgtaatttaatagtctagtcttgagctctataaataaataaaaaaccatatggtattttggtgatttgggtaagtattcctccctcgttagctttgaatcaaataatatgttgtctaattcattcagggagttcactgagtgctcactgtggtcaggtgcggtgggcagtgctggcaagacagaggagaaagtatagcacagagagagttatgtatgcaccagattttaatgaatgtggtaaagctgataggtccgtgctttgtactctggtggtcaaggaagtttccatttactctgatgggcaaacctggaaaagttttacagagaagatacccatgagtttggtgtttacaagtttgctcagtaaaggttgggtacaggcactctaggcagatgtccattgggagagaacaatggggaggtgtgtgctctgggtgtagcaagtgggtgctgtgatgctagagatggtcaggggaatggtagggccctcaagactggctcaggagtttggggctttattctgtatgggaaaggagccattgaaaatgttcaaacaagacagtgacttgaaataaaacaaaaccacatgcttttcccccataaaacccagcaagattcattaaagtgagaaacaaaaagtggccattgtctttctcaagcataatttatttccctctttcttttttctttctctgtcattatttagtgtaaagatgataaggagtcaacaaagcttatgacttttttccccaaggcattgtattgtattgtacgttgtttggcagatgttggaataatgaatgctacttttgcaaccaggcttgcattcatttattggtcagccagccgttgggttttcacagtcctttccctcaaggaatttaaactgttatttttatctttaaatctgtatgtttatctgttttcaaacactagaaagtctcaagaatgtgttagtcttgcttgacacttcttttggttaaaaaaaatcaaattgtctctattttctaggcttaccaagagactaaagagtgaatccttgaaatccgactttacaatagatttaaaacatgaggtatgtcatgttttgtttgattaaaaatcttactaatcaagaattcatgtcctttgatgtaaaaggtattttgcattccctartcttgcattttccccacccacatctactccccacagagataatttcatagcactccagcgaattaggtgcttttattttaagctcatttcagttatgtagrtgaagacagaacagtgaaaaaggttgcatcttgtgattcatgattctttacttttaagctagatgratgggtccagaggtagatttctaaaaaaatgcaaaaatgtcattaaaagtacctctgctcttacttgatgcttcrgttgtacgtatgccagtgtagattgaatgatcatgtccccscmcccctaattcataccttgaaacctgagccccagtgaaatggtctttggaggtagacctgtgggaggtgataggggcatgagagtggagccctcatcaatgggattagcacttttataaaagaggccgcagggggcttccttgccctttctgccatgtgaggatacagctagaaggtgccatccatgaaccaggaagcaggccctcaccacttaatctgccagtcccttgatcttagacttcccagcccctagaactgtgagaaataaatttgttatttagactccactcagtctatggtattttattgttggagcctgaacagactaagacgtatgcytttgttgtgtgtctgtgcttggctgtctggagcagaattgagcctattggtcccaagcaggcagcctggagccctaacactcctggttccttcacatttactggacatctgtgaccagttattctagaggcaggtggcagttgtcccatcattaattattctcgaatcatcattaagaaggccctttttgcatttcacttgtgggcatgcctgactgcacaaaacagtcttgcctctcattctctgcaggaatctgtatgttaggacattaaggtaaatcttgacatgtaattcagtccagcagtgctgatggccttccagggacaagaaggcacacacaagactttctgacttctcagctgtctttaaatggtaatacagaatatttgagtagaaataaacttagaaaaacataattcttctcttccacaaagatgaaaaaaatggcttgttgaaaaccaagttctgcctagataggattaatgaaaagtcagctctagatacttaggtttggaaatctactaaacattgaatatatacaaaataatatttctaacatatatgaaaggtataaagattaatgaacaaaatacttaactagcttgcctggtttaagaaggagacaactatgagtkaccttgaggctacctatgtgcttcttgaggagaggcctccttccgtctccccacactaaactctcttgaattctctccctctcccttacttttcttcatattttattacgtatgaatgtatttctgaataacatgtaattttgcatccttttgggctttatataaacaaaattgtatacaaatgctgcaggattttttgctccttagttcagctaatctggattcttgtctcacaaccaggaagaattaggcacacagacacattgaagggtgaggaggatggaatgtatttaagtgaaaggaaagctctcagcaaagagagggggtcctgtcagcaggtttccacctcataaaatgaataccagggcccctacacacgagttgaagaggactctcctcccctgcataaggcgtgaattcctggtggctccaccccattcttccagtgcatgtgggcctccatgcatgtgggcctccagtccactgcaggcatgcctaggcaaaccccctgtgcaggttcccatattcggacaaaacatttggtgtaaataaacacttgtggggttgatcagagattctctgggggcccttccctatctgcctaggcatttggctgtctcccacctctatcacaaataactgttctaatttgagactcatccatgttgattcatgcagctctaattaacttatttttactttctatagtagtctcccatatgaccataataatttatttatccgttctcttgttaatgggcttctgattggctactggttttttgctattacaaccattgcttctatgaatatttttaatgtgtatcatggtgatcatctgcaagagttactccaaggcagaagcttttaaacttttttttgactatgacccactttaaaaaaataaattttcatcatgacccagtatatttgtgtgtgtggtggtgtttctgttattgatttctaacagtattattgtagtctatacaacagtcatttgagatacttttaggcttactttatggcctagctcatgttcagttttcatatctattagattgaagaaagtattaatgatgcttttcagatattttcttctttacttcattgcttcaatccttcattttacttttgttttgtctgcttatcatttactaagggaggaatgtagaaatcgtccataataatggtggatttttcctatggaactgccaactcttgctttttatactctaaggctatgttaattagatgcatacaaacttagaattgttacatcctcttagtgaatttgtctttatctttagtaatgctgtttgtcttaatgtttattttgttgacatgaatatttcaatgttagcattttttggttgtttgcctcataatcgttttttgtctttttctttcaatccttttgtgtccttatcttttttagatgtgtctcttttaaagaggacatgccttttccccccaccctccagtttgaaaatctttatctttaaaccagatagcaaatttacctttatgttgattgtaattactgatatatttgacttctatcactttattttgtgcccctctccttattttctatttttccttttttttttttttttgagacagagtcttgctgtgtcacccaggctggagtgcagtggcgccatcttggcttactgcaacctccacatcctgggttcaagcagttcgctgccttagccccctgattagctgggattacaggtgcccgccaccatgcccggctaattttttttgtatttttagtagagatggggtttcaccatcttggccaggctggtcttgaattcctgaccttgtgatctgcccaccttggcctcccaaagtgctgggattacaggagtgagccaccgtgcccggcccctctatttttctattttaaagttccttgtcttcttattcatttatttattagtccatattttttcttttctgctattttagaagttaaatctgtctgtactttactgattattttaaatatttaacatgctttcttaacctaacaatggtttattaatcaatagccagaaaatttgagggccttaggataatttaactctgattatcccactcccaacttacatgcacttgttgttcaatatttttgtccctttttcttttcaccctggaaacttagatattgtcattattttatgcagttaacatttttattaactcatcatatatttgccattgtttttgcttatcattccatcttgcttcttaggccttccaattgaatcctttttattcctcctgaagtgtatatcctttagaatttcttttagtgaggtggtaaattctctcaatattttttctttaacaatatttatttcaactttgtttttgaagcatgcttacatcatgtagatgattctaggttgccagtcattttctgtcatcacaagttttattcaattatttttcttttttctttctttgtttttcttttgagacagagtctctctcactctgtcacccaggctggaatgcagtggcatgatcttggctcactgcaacctccatctccygggttcaagcaattcttctgcctcagcctcctgagtagctgggactacaggcgcgtgccaccacgaccagctaatttttgtatttttaagtaaagatggggtttcaccatattggacaggctggtctcgaactcctgacctggcgatctgcccgcctcagcctcccaaagtgctgggattataggcgtgagccaccacgcccagcctcagttatttttcaaatgtgcttacttgttttgtgtaatcttttcaaaataattttttctcacgttttaaagtttttcttttctttataaaaatatattaagcatagtaattttataatctgtttgataattctgatagctgaagttttttgagtctgattaaataaattatgtctgctggctcttgttcgttatcttatttcttttttgtgtgtgatttttttttctctgagtgattgttctgtaagcacccttgttcctttggaaaaatcctctgagccgtatattaaagtagtggttccttagtaaggatttacattagcttctgcctgttgctagtgggttatactgacgagataatttaaattatcagtttgagatgttttgggacctcacaggtggcacaaattagggaggcctggcttttggttgcaaaatctaagaggagatttagagattattcttttccctccatttagacccatggtcctagctttatgtagggggattgctgttggtcacaccccaccttgggtgggtcatagacttcagtctcttcactcctatcagaaactcagccttgccagaggtcagctgatacctactagggaaaactacccttggtgcctttttttccccaggatctcactttcccatttttgttctcgcagattccacatttttgtgccaacttagcaatacatgtaaatatttaagggcattttacccaacatttgtagatgttttaagcaagttgagtatttggggtatgtgattaccatactaaggaaactggagccataatattttcttacatctctctctgtgatgttgtagaatgtgttctttcctaaaaccgcatacttcggaattttttggaggtcagaatattgattcatagttaattgcttattgttagtaatagattacatttattcacatggaattgtcatttttttaagtttaggaagtcctgttgaatactgacaaattgatatggttcarcctactctctatggaagatgtgttctgctttcccttgagatattttgtcccttcttatacttgtgttgactgagttctttcatcactgcctgtctcctgtctcgtggcagattgccctctayatctgggacaaaggcggaggacctcccctgaccccagtgcctgagttttgtaccaatgacrtggacttctactgtgctaccacattccattcttttctaccgctttgtgtgagtaacagaagaaaaacttctttgcatatcaaaggaaaaatttagatgctgtgcrtaatgtcatcctagcactttaaaatgaattttaaattcagggcattcatgtgcaagttggttataagggtatattgtgtgatgctaaggtttgggcttctgctgattctgtcacccaaatagtgaacatggtacccaataggaagttttcaaaccttgctcttcttccttcctcccctttttagagtccccagtgtctgttgttcctatttttatgtttgtgtgtacccagtgtttagcttccacttataagtgagaacatgcagtatttggttttctgtttctgcattaattcacgtaggataatggcccccagctgcatccatgttgctgcaagtacattatttcattctttcttatggctgcatagtattccttggtatatctgtaccacattttctttattcagtccaccattaatgggcacctacattgattccatgtctttgctattgtgaatagtgctgcactagcactttacatactaaaaagaaaatcaacattttccctgtgccaagtaagaactatatatcatgactctagtaataacaatcatacaaggtttagtactattgtaactccatcttacaaatgagaagagagaggcacagagaagccaagtgcttgcttatggctacacagctagtagggagggaagcaagggctcccctttactccagagcctttgtgagggactgcccaccatagygctttagggttagtgtgcccagactcatttcttttgttgmtgatgtaggatgcattgattagaatttctgttccatttcctggaaaggcaatttccagtgctttctgtgacacccacgccttctccacaagmccgcaccctttactctttcagcaggtggctctgcctttcatctcaatgacagccatccagaactttcagaatgaattcacttgttttggcagacccaaggtccagccccagtatgagcctggagaccctgacactcacaaggttgttaamagcttttctcataagaaaaaatgtgttcaccaacctyagatattgtcgttattctcaagtcagtcacacacaagtctgtgtgtgccatttgaagagataaatacatagacacacacacacacgcacacacacacaccccaaaacacagtgcagcattgagagagaatctgtaattgtttgcagttccagagggggagaccagtctttctaggcagaatgcttgcttgctctttcagtgctctcctagtgccttgagtgacatgacaaagctgtagttagatgtcactataaaccagccccaaattatacaggagtcatgattaactatgattgcaggcctaaggcaggtaataaaggggtcatgaagggcttgggtgtgtcttgttgacaaatccctctttgtgccccctttcatctgtgtgatcagcctgggctccaggactgcccccaccccatctccaccaggtgtttsaaggaatcctacctttggcagaggagaaaacatccttagcctagacttgggtcgycagtaaagaggccgtaaaaatgttttcaacattaaagtaaggccaggcccagaaaagggcaacatctcttaatttacactaaaaaatcccccctatttctctctttttgtcaaaatcttcaccagctggagaaaggaaatgagaggtaactaacatttattggtcagttactatgtgcttaataaattatagtaataatagcagccttgcagtggttattatttttttttctaaacaagcagactgaaattctggaaacttgttaaggggatgcacagtccgtgcacagtgtagcaggcaggtccagggctggctgacagaaaggctatgttgtcagctgacctatgtttccatttctcccctaaaactttatsccggaaatatgtttggtatccttgacattggttaatttgaactctagagcgtgtgagatctagtgtgggtgtgaagttaacgctgactcacatatgcatacattttttcttttcttttttttagagaaagccagtgaagaagaaggatatttttgttgcagtaaaaacatgcaagaaatttcatggtgacagaagtatgttttgggttattcattttattgaacgctaaaatccagactaccttctaaagaaaagtaccaatgaattcttgagtrtaaattcagaaaagggataatgacaattcggatgttgaagtgaaagcagttatttaatcaatactcctcrttgcaccatttcaatcaccaagatcaattaggaaagaaaattttgtattgaaacgtgagtggtcatagccgatactgcttatggcagtattttaaattggaaatggaaaagctcagtgtggcagtcttggagactgtgtgaaaaacagtccattttgtcaaacaatgtattaggtctgtgcgcastctctaaacgggatgaaraatgtcaggggatttcaaggtaacagcatgccaacaaagaaaaaagactttttcttctttttcaatttatttcaaatgcttaccttggaacttgttagttaagagatgtatttgctcatgagtagataatattggagaagaagaaaaagccgcggtacaaacagtgaatctcttcttaaggaaatcctggcatgcagattaatgttgtttttattcaggtttttgatgtcattacagaattctgctaagttgtgacgataatgtaaaaaaaaaaagcccatcctaaatataaatagacataatttctctctttttgcaccttatttcaagcaacacttttctgaaattgaaaattaggcagtcttttgcattttctaattttagtgcgtattttaatttttttccccatgaaaagactgtcaatttcaccaaggatgtggtatttatgtaggagagatttctaaaccaactgtcattttcatgggattggaactactgaagaagttcatttatatattttatgtgataatatgatacatacaaattatattttacaggggaagatgttttccaaataaaataatattataatttgagattatagtattgtctaagacatcaacatcaattaaaatccagctataatcaattatatcttaaaaatacattaactataaaccttcatatttgcctaaaatggccacactaaattccaaatcctattaaatcagtctatatgaatacatttgttatgcaacaagtcctaagatactgtgaagaatcagtatagcagttaaaataaaatttttatttatcataaatttaacctaaatttaatatccttttacttttttcataatatggaagggttttgtgggattattttgacaaataccttctttaaataggtgttggggaaatgaactataccgctttttgttttgtttcttttacagcaagcaagaactgtttgaattgatttaattgatcttgaagctacacttggagtagtggttgttttcacaatattaatgttaaggatggtgttgctggtactttttctttgaaacacatttttcaggtcacagtgaagcagtaaaattagggacactccctgttgtattttttatattctacagaaatgaaaaaaaaaatagtttgttaattttgatttagtaattttgaataatctagtttactgctttcttattttgcataagtttgagatactctttttagatattcatgaaatccttttctgtttgaattttgagtcaaaagtctttaaaaattacaaaatcttaaaagcctattaggagcattagaaacaaaccttccaaagccagatgcattgatttactgctgttaatttgaatctgggatcattaaagcatgaggcctaaaatgtatcatgaagttttcatatttgggtttctgtggtaagccgtttttcaacttggatatgtttgtttgaaaagatagtctaaggcaacaggatttcagtgactttgaagtccattttgcatgacttcatgtagcctgccaagccaccactgggctctgcccctcattttagaagcctagtccagccatcagttggcccaaagagttatccagtaataccagttacaaggwtaacatcacactaactgcttctaactgctaatatttcttacattttctggtgtgtttttcacatatgttctattacctagtttcatgttgacacttcctcgkgatatgataattattgttattcacttgttgtggaaaaagctgagtatggaatgatacacaactggctcagtttcttgtatcctattgagtagcagagccaaagacttgggttttctggctcctaagtcccacatttttttctaccacagcacagctatactgtaatctccttggatgtattacaaactccatacttgataaatagtctttgctattcatgttgatgtcctgctatgctcaaggtcagttttgacttggccagaagctgtgaaagtaggctttccatttttagtagcaatggggatggcaaggaattgaaacccacacaggatctaaaatacaaatcgagctgagaatttagactgccactcctatctaagcatatcactgctatagtcaagcagaatacatggtctggggtgttggatttttttttcattttcttttccctgtgcactctattagtgggggaaaccagcccccaatattcaacgtgagtccttttctattttccctaagtgttggccagtctgagaaataaagggaaggagtacaaaagagagaaattttaaagctgggtgtccgggggagacatcacatgttggcaggttctgtgatgccccctgagccgtaaaaccagcaagtttttattagtgattttcaaaaggggagggagtgtacgaatagggtgtgggtcacagagatcacttgcttcacaaggtaataaaatagcacaaggcaaatggaggcagggcgagatcacaggaccagggcgaaattaaaattgctaatgaagtttcaggcacacattgtcattgataatatcttatcaggggacagggtttgagagcagacaaccagtctgaccaaaatttattacgcaggaatttcctcatactaataaacctgggagcgctacgggagactggggcttatttcatcccttatcaacgaccataaaagacagacatttccaaagcggccatttcagagaccgtcccttgggaacgcattctctttctcagggatgttccttgctaagaaaaagaattcagcaatatttctcctatttgcttttgagagaagtgaaatatggctctgttctgcccagcctacaggcagacagactttaagggtatctcccttgttccctgaatatcgctgttatcctgttcttttttcaaggtgcccagatttcatattgtttaaacaatttgtgcagttaacgcaatcatcacagggtcctgaggtgacatttcatcctcagcttatgaagatgacgggattaagagattaaagtaaagacaggcataggaaatcacaagagtattgattggggaagtgataagtgtccatgaaatctttacaatttatgttcagagattgcagtaaagacaggcataagaaattataaaagttttaatttggggaactaataaatgtccatgaaatctttacaatttatgttctcctgccatggcttcagccggtccctccgtttggggtccctgacttcccgcaacactctgtggtagaaatacttcagtaacaaaggccaaatgatgaaggaaaaaaatctagagaaactgtacttgtgtttgccaagttgagagtggggtgtactgttaattgtgggcacagtgtcccctggcactgggtggtgatggcccccactcctgcttcattatatgttggttaccttctgggatgagaaggagagatggaacatgttctgctcaaggccgtagtcacagcaagggaaaatatagattgcatttattttttatactctcatggaagaattgataataaaaccaagtttcacaatgaaaagaaatattttaaatattgtactttcttggcttaacaataacacatttatgtaattgcttttgtctggattctgacttaagtgaaacagcattcttagaacacaacaagcaaaaatatactctgtcttttggctcaaggaagtaatacatattgacatcattgaaacagcagcaccctctgagaggcaagcatttagtaggattttaaagaaacttgagaactgttacataaggtgatgaattgggcatagcatgtaaaattatatttaagcaaggaaatgatctctggtgttttaatattcaacttgattgcttcctcttgggttctgtgtttcccactgtgtgacctgagctgtcagaaaaccttaagaattttctttgcatcatttttccatgcagtttgtgtacatgtctcatgtacctcgtggcagccactggttttgttcatcaaatggtgggttgtgggatgctctcctgcagtctccctctaattaaagaggttaaattgccgtttgctcagcctttagttcctttccacagcttcctaggctcttaaaaattagcactatattcctttcagattaaaaaaaaacaaaaacaaaaacctgtttgctgtctttactgctgtggtcttgtctagaggcaaatctgaacaaactgattgaaaggggtgtttggtggctggtgttctctttgactaaagaggcttacatgtactgtggtacagtctgcttacttaaaaggtgaggcttgaattaaaatacagccagatagaaggccagactctaatcaaatgaggtgattagatcaatgaatgaagagaggagaggagtcaggtgttgcctttccctggctgttgaatagctgatgttccagattgccctacagtgttgtgttagggcatccaggagggatacttttcaggcttaggtacacctcagtctttaaaatgaggaattaggacacattcatgtgtgtgtccctaatctgctcctgagaagagaagtgcaatcagggtcttattttgtgaccactgacttgcacactgagacaaaagggccatctgcaagctgaaaatagtggattccttaaaataaaaactattcacatttgatggtgtggtagttttaataaaatgttcaagtgtcaagttcattttcatttataatctgagacagttttataagtcacctccctgggggtaaaaatgcatgttctgtcctcatagtgagacacatcttctgcttagagtctagaaagctctaagaaagatttatgccatctgtgcagctggcatttttatagtaaaattttttttactttgctccaagtttaagttatctcatgacaaactttcttgaaagaggcattcactattattataggaagtatacttctttattgaaaaggagataatgtatcaggtaacttattaaagtattttctcaaagtttagtatctttaggaatacagtgcctcaatacaatataaaatattttgtaaataatagaatgaattcattttagaatttaaatgatgctaataaaatagaccattattctaaaagtttaactaatttagaatcaaccctggttgaaaataaagccttaagctgtttttttggaagactttaaatcctttatggctaagagatgacagacagggccgagtgcggtggctcatgcctgtaatcccagcactttgggaggccgaggcgggcggatcacgaggtcaggaaatcaagaccatcctggctaacacggtgaaaccctgtctctactaaaaaatacaaaaaaaattagccgggcgtggtggcgggcgcctgtagtcccagctactcaggaggctgaagcaggagcatggtgtgaacccaggaggcagagcttgcagtgagctgagatcacaccactgcactccagcctgggcaacagagcgagagagtgagactctgtctcaaaaaaaaaaaaaaaaaatgacagatgcatggaggttatattgacaaggggagagatgtacaaactgttgaatgctttaggtattgtagaatcataatatcttagtatatctaaatggttggcttgttttaaaatgattaatcaaaggctgaattgcctttatgaataaaaccttcctttaacaagcttccacaaataatcctaggccttttattgaaatgcctacaaaattcagtcctcattcaactgtttattgagtgtctactatgtcctargcactgtgccaggtgttgggaaatgagtcatacacacactaattcttacctttagtgtaatttctattttacctgtttcaaagtaaaagagaaagcaaaagtgctaactcacccttgattttgattttaattttatttaactcagttaattgagaaraaacacccgtgttctttaataaacctattagagcgaaaaaggactgaaagcctaaaggctgaggaaattgaaagcaaaatttgcacagcctgcaggacccttgctggggactgaggaaagttcttgacctttcctcacagcttcttccagcattatgcaatggaggatattttacccaacagtgtgaacttttagtggctgcaagctrcagggagccctttctggggtaagttctcttgcttattgtatgcaaagcaaactgccacagcagtgccaaggttaacatttttgttgtgctgaaatttggaagtagaacagagtgaaattttttaacatttcttttttcctttttttgtccgccagtagccctattatttagtacatctttgaccattttgacatgtagaaacctttagaactatctgcttttttatggttgcagaaaaattatattttaatatatgaaattaatatttaactggtaatttggtaattttagcagatgtgcagaactcagttttttttaaaaaaaaagccagtgaaagagattataaaatgatgcacttctgtattttctatataagggctgtctgagctggactcagaatttgcttacttattagctaaacacttaaattttacattggaacatcagtttttgtatatatttctattagagttgggaacaggggaaagatacatgatctgataaagtttctcaaaagttaagtgaagatttggttcatcagagttttgacaggatataaaatctaaatgttttttctattgaaaaaacaagaaaccactttttaaaattcagagatgcataggcagtaatttgttttttaagtatagaagaaaagaattacttggtcaggtgaattaatatcaagtagtggtaagtctatatgtcaggtatgcagacagagctatctttgagcctccaaagccaaaatacagaaaaccaggacagctttctgttgtgtttattgtgttaaaacaatttagctgctaatgatagagttttaaagcctgcagtagttttgaatgttagtacttccacatttttcaaaagtacaacatcgtaatatcagtcatcatatgcagtgattctcatttggcaaggtcatgccctttgtagggttgggtagttctgttagaatctttgggtggggacatgcatagtttgcaaaggtcttctcatgctccacggtaagagggatggattttctcttaccgtgctccgtggtaaaagaaaaattagttaacattaatgtaaacacaatagcataatcaaaccagaaaatttatcattatatggaagtaagtgcattcatcaccaggaatgagaaatgctttactctagagaatgttgaaaatgcttcaagaagagggttttagtcaacaacgttggcatttctcagggttggaagcaagcaactcttggaacacctgaagaacaaccagtaatgtttctcttcctttgtagatgattatactgccattttgaatttttaagcttccttgtgtaactgtgccagtgattgtcacctctgtaattttttcagtacctattgttaagcagacttgggagagccaggcaagtctcattgaatactatagtgactatactgaaaattccattcctactgtggatttgggaattcctaatacagatagaggtgagtcataattcttactactctccttattaaacattgccattctgtaaatacagtaaattaggttaggataaaaatgaaatgttttataagtgctataatttttgcctcatattagttttttcccttctctcagatacwgattggttctttcaaactaagggctttatagtacgaagtgttgcaagtttttagtagcttatatcctataattgagcacatgatagttacagcagaatttaacaatagatttttcataccttcataattctttgcgaccatgatggggtgtttattatattcccacataaagcttctctccttgtcagtcttatagtctagttcacatattatattacccgtgagtaccacctaatcacattctacactagttatatgtagaataaactgtattctatatgttaagattttaattagtaaattgttggaaataaacctgcttttctcttcaaattgcaggctttytaattaaaaacactttttaggacatacagagtggaatggtagacattggagactccaaaaggtgggagagtagaagaggggcgagggatgagaaattacccactgagtacgatagacactcttcgggtgatggcttcaccaaaagcccagacttcaccactgtacaatatgtcgatgttacaaaactgcacttgtacctcttaaatctataaaaattttaaaaaattgtgtcaaaaaatggaagtgaaaatttggccacctcatcttcagatattctttattcatcttaagttttatccagtgttcctgccaccctttgttctttagtttttttgttccccatgcccttttatgagtaaaaaaaaaaaaaaaaaaaaaaaaaagtagcaaactgattatgttctatacagtaatttatcttattttatgttagtgtcactcataattmtttcattaatatagtacaatgcagaatcagatatgccatctctgtagttaccaattcttctaacaaggttaagtgtattactgagtctgtctgttgctgtttgatttggaaaaacgattttagattgggtttaataatcatgtatttacttataccttatttgatgtcttcattactagtctggtcttattgtctatatttatatttgttctaaaagggatttgaggtggctttgaaacacgtattgtaatggttaaaaatacacagagatcaagagtaaagaaaataaaggtcaaattgagtggtttaatagtcattaatataagttaatatttgtgctccactgtgtcaccaaataattaaaatgaggggcatattcctgtttatcaatttgactactcttcccaagtgttttatttttgtccagcatttaccattaaagcattgtaatttatctattggtatctgaaggactgttactctgtcttactcagcactatatctttagtgcttagtacctgccacagtatctggcatgttagaaacttagtggtagtaaatatttacaaaataagtaaatgaaggtataagcttccgcctttgcactgctgcttccctgtggcagtggtgcctggggttctaacagctccttcagaataagtttatctaagaaaggatgccattgctcattgctgtgagtcttaaaactttcttgcctggactgaagttactaattctatctctgcctcagattatctgtgtgactgtgtaattccactcatctctctaggtctccatttccttgtgtgagaaatgaatggcttgaatttcattatctctaaagttcccactggttcaatgtgtctgtgaaaattagagaaggctatttttaaaaattttgaacttttaagctgcattttggcatgtaagctcttasaacacttcaaaactaaaaagaaatgaacaaattctatatattttataagaaataatacattgtaagtttttttcttgccttttctaggtcattgtggaaagacatttgccattttggaaagatttctgaatcgtagccaggacaaaacagcatggttagtcattgtggatgatgatacattaataaggtaaggagtcattctcatcctaaatggctttaaattctacatatattcatattcaaaaaactagatgggtactttttctggccaagatgaagtaacggggacngggtttacccttctatctgaaccaatcctcttaaggaacaaaatatataaaacaaaggtttttaacacactgaatattaggtgcaaaggaaaatgatccaaaagaaacatgaagcaaatgaggtgagttctatgactgccagagctgactgccttaagagaattccaagttactgcttagggagggagcaccagatggaacctgacagactctgtgggcggaaaagatggagctgagagtctcaggagaccaaggctattacagtttgcaggacagagtaccagagaggagagagctatacagaaagggaacactggaggtaggtgaagagcccccttatgtattcartagagtattgatcagtgcatatgtgtgaggaaactacccgatgctggggaaagacccaaccagattagagggaattgtgcctgacactcacacatgcctgggctggaaaacccctgttcacaaggtattgagaacagcgtgtaagagggtcttgcctcaataggggggatagttaaccctagactaagcacttttccagtcctgcctaacatatctgaaaagcaagaaaatacaagaaaatgaaactgtttccaagtagtagcctgtgtctgagaacaaaactcaagaagacttacagaaatacaaaaataaccaacatctaataaagtaaaattcataatatctgccatccaatcaaaagttgccaggcatataaagcagcaggaaaatacagaagtgaaaaaaaattagcttattgaaatggtttcagaatttatacaaggttagaattagaagttattaagctgttactattaaatagttattatacctctattccatatgttcaaaaagacatggaatgtctcttagtcttaaataagtttaaatcatacctctagagatgaaaactacattcttgattgaggtgaaaaacccactggatgggtttaatagcaaattcatttaagaagaaagtatcagtgaactcgaagacattgcaataataactatccaaactgaaacacaaagataaaaaataattttagaaaattaacaccatcactgagctgtgggacaatttcaggtggccttgaatatatgcaattgaaatctccaaagagaaggagcacataattatttaaagaaatatttttcaaatttaatgaaaactgtaaacccatagatccaagagtgtcaatgaaccccaggcacaccataagcacaaaagcagagaacagccacctccaggaatgccataatggacaattaggacagtacccactgccccactctaggcagctgtggaattgaggactagcatgcttaacccattgtagctacccacaacaccaacatggacctcttgggtctcagtgggttgctccaccaccactactgccatcattcacatcataccagctgctcagggggctaacarcttgtccacacacctagcccactgctctcattactagcttctaagcaagcagttcacctgcaggcccaagaatcagccattcagaactctctaacaccacagccagcataagctgctttagggcctaaaaacaggcatattcacccttctgctgccaccactggggcccaaagactgactcagttggcatccaagtccccagcaaaatttcacagcttcagctaataaccataccctaagccactgaggaaattacacataccacgaaccttgtgtactactgaaaaagtcacacaaagaccacactacaacagcaccaaaaataaaagccaaggtgtcttacttaaccaacaacatatatacatcttcaggaaaaatattctcycctacaaaagcaatttttaaaaattggaacaacaataccagatatgcagatatcaatggaaggaaacaggaaacatgaaaaagcaagaaaatatgataccagtaaaggaccacaacaattttctgggaacagatcccaatcagtaagaattcctgaaataacagataaagaattcaaaatattgattttaaagaacctcattgaggtacaagagaaatctgaaaaccagtacaaaaataagaaaatgaattcaagatgtgaatgagagatataccaaggaaatagatatctttaatttaaaaaaccaaacagattctggaactgaaaattcattgaaggaaatacaaaayacatttgaaagctttggtaatagactagaccaagcagaaggaggaatttcaaaacttgacgacagatcttttgaaatawttcagccacacaaaaataaggaaaaaatgaaaaagaatgaaaacagccctcaagatgtctaggactayacaaaatgaccaaacttataaattatcaatatttttgagggggaagagagatcaaaaactttagaaatcctactgaaggacataattgatgaaaatgtcccaaatgtagcaaaagagttagatatttagatacaggagatccagtgatcttcatgtaaatacattgaaaaaaggacttcacatggcatattaggacttcacatggcatattataytcagaatgtttaaattcaagtgaaagaaagaatctttaaaattagcaagagcaaaagcatcaagtcatgtataaaggactaatagtggacttttcagcagaaaccttataggccaaagagaatgagatggcactttagccatcgtgctaaaagaaaaaaaaaagctgtgagccaagaattttatatcctgccagaataagccttatagataaaggggaaataatctttcccagacaaggaaatgctgaggaaatttgtcaccactaggtagggacaaagcctcacatatcaagattaaccttgaatataactggattaaatgcttcacttaaaagatacagattgccagaatggattttttttattgttttatctgacattttccaataacattggtagttttttttttttaattatactttaagttctggggtacatatgcaaaatgtgcaggtttgttacataggtatacacgtgccatggtggtttgctgcactcatcaacccatcatctacattaggtatttctcctaatgctacccctcccctagccaccccaccttccaacaggccctggtgtgtgatgttcccctccctgtgtccaggtgttctccttgttcaactcccacttatgactgagaacatgtggcgtttggttttctgttcctgtattagtttgctgagaatgatggtttccagattcatccatgtccgtgcagaagatgaactcatgcttttttatggctgcatagtattccatggtgtttatgtgccacattttctttatccagtctgtcaccgatgggcatttgggttggttccaagtctttgctattgtgaatagtgctgcagtaaacatgtgtgcatgtgtctttacagtggaatgacttataatcctttggatatatacccaataatgggattgctaggtcaaatggtatttctagttctagatccttgagggatcgccacactgtcttccacaatggttgaactaatttacactcccaccagcagtgtaaaagtgttcctatttttccacatcctctccagcatctgttgtttcctgacttttaatgattgccattctaactggcgtgagatggtatctcattgtggtttygatttgcatttctgtaatgaccagtgatgagctttttttcatatgtttgttggccacataaatgtcttcttttgagaagcgtctgttcatatcctttgtccactttttgatggggttgtttgtatttttcttgtaaatttgtttaagttctttgtagattctggatattagctctttgtcagatggatagattgcaaaaattttctcccattctgtaggttgcctgttcactctgatgatagtttcttttgctgtgcagtagctctttagtttaattggatcctgtttgtcaattttggcttttgttgccgttgcctttgaggttttagtcacgaagtctttgcccatgcctatgtcctgaatggtattgcctaggtgttcttctagactctttatggttttaggtcttacatgtaactctttaatccattttaatttttgtataaggtgtaagaaaggttttctgcatatggctagccagttttctcaacaccacttattaaatagagaatcctttccccattgcttgttttcgtcaggtttgtcaaagatctgatggttgtagatgtgtggcattatttctgaggcctctgttctattccattggtctgtatatctgttttggtaccagtaccatgctgttttggttactgtggccttgtagtatagtttgaagtcaggtagcctgatgcctccagctttgttctttttgctttggattgtctttttttgttccatatgaaatttaaaatagttttttctaattctgtgaagaaagtcaatggtagcttgatggggattgcattgaatctgtaaattactttggtcagtatggccgttttcacaatactgattcttcctatccatgaccatggaatgttttttcatttgtttgtgtcctctcatttcctgagcagtggtttgtagttctccttgaagaggtctttcagatcccttgtaagttggattcctaggtattttattcttgttgtagcaattgtgaatggcagttcactcgtgatttgcttctctattattggtgtataggaatgcttgtgattttcgcacattgattttgtatcctgagactttgctgaagttgcttatcagcttaaggagattttgggctgagatgatggattttctaaatatatgatcatgtcatctgcaaacagagacaatctgacttcctctcttcctatttgaatatccattatttctttctcttccttattgccctggccagaacttccaatactgtgttgaataggagtggtgagagagggcatccttgtcttctgccagttttcaaagggaatgcttccagtttttgcccattcagtatgatattggctgtgggtttgtcataaatagctcttattattttgagatacatttcatcaatacctagtttattgggtgtttttagcatgaaggggtgttgaattttatcgaaggcctttttgcatctattgagataatcatgtggtttttgtcattggttctgtttatgtaatggattacatttattgttttgcatgtgttgaacccgtcctgcatcccaggtatgaagctgacttgatcatggtagataaggtttttgatgtgctgctggatttggtttgccagtattttactgaggattttcacatcaacgttcatcagggatattggtctgaaattttttttcttgtgtctctgccaggttttagtatcagaatgaggctggccttataaaatgagttagggaggattccctctctttttattgtttggaatagtttcagaaggagtggtaccagctcctctttgtatctctagtggaattcggctgtgagtctgtctggttctgggctttgtttggttggtaggctattaattattgcctcaatttcagaacttgttattggtctattcagggattttacctcttcctggtttagtcttgggagggtgtaggtgtccaggaatttatccatttcttctagattttctagtttatttgtgtagaggtgtttatagtattatctgatggtagtttgtatttctgtgggatcagtggttatatcccctttatcattttttatagtttctattttattcttctctctttttttttttctttattagtctagctagcagtcaattttgttaatcttttcaaaaaaccagctcctggattcattgattttttagagtttttttgtgtctctgtctccttcagttctgctctgatcttagttatttcttgtcttctgctagcttttgactttgtctgctctttcttctctagttcttttaattctgatgttaggatgttaattttagatctttctcaccctctcctgtgggcatttagtgctataaatttcccgctaaacactgctttagctgtgtcccagaggttctggtacattgtgtgtttgttctcattggttccaaagaacttatttctgcctaaatttcrttacttacccatagtcattcaggagcacattgttcagtttccatgcagttttgcggttttgagtgagtttcttaaatcctaagttctaatttgatttcactgtagtctgagagactgttatgatttctgttcttttacatttgctgaggagtgttttacttccaattatgtggtcagttttagaataagtgtgatgtggtgctgtgaagaatgtatattctgttgatttggggtggagagttctgtagatgtctattaggtctgcttggtccagagctgagttcaagtcctgaatatccttgttaattttctgtctcgttgatctgtctaatattgacagtggggtgttaaagcctcccactattattgtgtgggagtctaagtctctttgtaggtctttaagaacttgctttatgaatctggatgctccggtattgggtgcatatatatttaggatagttagctcttctttttgcattgatccctttaccattatgtaatgcccttctttgtcttttttgatctttgttggtttaaagatctgttttatcagatagtaggattgcaacccttgctctctttttttgctttccattttcttgataaatcttcctccattcctttattttgagcctatgggtgtctttgcacatgagatgagtctcctgaatacagcactccaatgggtcttgactcttttatccaatttgccagtctgtgtcttttaaatggagcatttagcccatttacatttaaggttaatattgttatgtgtgaatttgattctgtcattatgatgctagctggttattttgccagttagttgatgcagtttcttcatagtgtcgaaggtctttacaatttgatatgtttttgcagtggctggtaccgctttttcctttccatatttagtgcttccttcaggagctcttgtaaggaaggccttgtggtggcaaaatctctcagcatttgcttgtttgtaaaggattttatttctctttcgcttatgaagtttagtttggctggatatgaaattctgggttgaaaattcttttctttaagaatgttgaatattggcacccattctcttcttgtggcttatagggtttctgctgggagatccgctgtttgtctgatggacttccctttgtgggtgacccgacgtttctctctggctgcctttaacattttttccttcatttcaaccttggtgaatctgacgattatgtgtcttagggttgctcttcctgatgagtatctttgtggtgttctctgtatttcctgagtttgaatgttagcttgtcttgctaggttggggaagttctcttggataatatcctgaagagtgttttccaacttggttccattctccccatcactttcaggtacagcaatcaaacgtagatttggtcttttcacatagtcccatatttcttggaggctttgttcatttttcattcttttttctctaatcttgtcttcacactttatttcagtaagttggtcttcaatccttgctatcctttcttccacttgatcgattaggctgttgatacttgtgtgtgcttcacaaagttctcatgctgtgtttttcagctccatcaggttatttctgttcttctctaaactggttattctagttagcaattcgtctaaccttttttcaaggttcttagcttccttgcattggattagaacatgctcctttaactcggaggagtttgttattacccaccttctgaagtctacttctgtcagttcgtcatactcattctctgtccagttttgttcccttgctggtgaagagttgttatccttgggagaagaggcattctggttttttttttggaattttcagccattttgcactggtttttcctcatcttcgtggatttatccacctttggtctttgatgttggtgacctttgaatggggttttgtgtggacgtccttttttttttgatgctgatgctattcctttctgtttgttagttatccttctaacagtcaggcctctctactgtaggtctgctcgagtttgctggacgttcactccagaccccatctgcctgggtattaccagtggaggctgcagaacagcaaagattgctgccttttccttcctttggaagctttgtcccagacgggcacgcgccagatgtcagctggagctctgctgtatgaggagtctgtcggcccctcctgggaggtgtctcccagtcaggaggcacagggttcagggacccacttgaggagggagtctgtcccttagcagagctccagtgctgtgctgggagatccactgctctcttcagagccggcaggcatgaacgtttaagtctgctgaagctgtgcccactgccaccccttcccccaggtgctctgtcccagggaggtgggagttttatgtataagcccctgactgggcatctgcctttcatttagagatcccctgcccagagaggaggaatctagagaggcagtctggctacagcagctttgcctagctgtggtggcctccacccagttagaacttttagacagctttgtttatactctgaggggaaaactgcctactcaagcctcagtaatggcagatgcccctccccccaccaagctcgagcatcccagggggacttcagactgctgtgctggcagcgaggatttccagccagtggatcttagcttgctgggctccgtgggggtggggttcgctgagctagactacttggctcccttgctttaaccccctttccaggggagtgaacagttctgtctcactggcattccaggcaccactggggtataaaaaaactcctgcagctatctcgatgtctgcccaaatggctgcccagttttgtgtgtgaaacccagggacctggtggtataggtacctgagggaatatcctggtctgcaggttgtgaagaccgtgggacaagtgtaggatctgggctggaatgcaccattcctcatagcacagtccctcttgacttctcttggctaggtgagggagttccccgtccccttgtgcttcccaggtaaggcgacgcacccactgtttctgctcgccctctgtgggctccacccactgtccaaccagtcccaatgagatgcaccaggtacctcagttggaaatgcagaaatcacctgccttctgcattgatctcactgggagctgcagaccggagctgttcctatttggccatcttgccagccatctcctgttttgttttgttttgtttgataattatttctcatagttctggagggctagaagcctgagatcagggtgccagcatggttgggttctagtgagggctctcttgggttgcaggctgctgacttcttgtatcttcaaatggtggaaagagagcaagctagctctgtggcctcttctcagaagggcatgaatcccatttatgaggtctccaccctcgtgatctcttcaccctcccaaaaggtcccacctctaaatagcttcatattggggattagatttcaacatatgataaaatttggggggaacacaaacattcatttcataacagctactagtcttctcttagtatagattatcaaatactaagaaaaagaagggtctatttttcaatagagatgatggagaaatactgtaaaattatgtaacatttttttttatcaccatctggttcatccaccatatgtttctttttccttttttttttaattgtggtaaagtacacacaacttcaaatttaccatcataaccatttttaagtatacagtttagtagtattaaatacatgcataatgttgtgcagccatctgcataactcttttcatcttgtaaaactgaacctctatatccattaaaaaataactctctatactcccctaaccccatcccctggcaaccatcattctattttctgcctctatgattttgactactctcagtacctcatataaatggaatcatacagtacttgttttttttttttgtgacttgcttattttacttagcataatgtcttcgaaatttatccgtgttgtagcatattgcagaatttccttcctatttaaggctgaataacattccttggatacagtatggatagaccatattttgcttatccattcatctgttgatggacactccatcaacatggggttgtgggtatgcacccagaaattgaatgactagatcatatggtaattctatttataatggaaccatcacactgttttcccatagaggttgttccattttacattcctaccagaagtgcacaaggtttccagtttctccacatccttgtcaaccccattattttctgggtttttttttttttttttttgatagtcgctattctagtgggtgtgaattttgatttgcatttccctaatgattagttggttaggaaaaaactgagctattttcccctctgttctcacactgcaataatcatcaacacagaagacaacttccatgaccaaaagtgtggagcagggagagttctcctacccaccaagcaatcaatcagttctgcagtggacaccaaatgggtgtcctttaattcaattttaacactgtctacctggagatagtgccaattcccacagtttgagggctcagtccccaagactgccctaccaccccatacaccagacaccagtcattaagtccaggcgtccagaacttctgactgatgagcttcacgtcggggttcttacaacctcctctgtgggtttatttaatttgctagagtggctctcagaactcagggaaatactttctcacatttaccagtttattataaaggatattacaaagatacagatgaagagatgtgtagggtgaggtatgagagaaggggtgtggagcttccatgccctccaggaactccacatgttcagatattctaaagctctctgaagcctgctctcttggggtttatgaaggcttcattatatagccacgattgattaaaccattggccactgatgatcaacttgactttcagctgctttcccctcccaggagattggggggtgggactgaaagtcccaactctctaatcatgcctttgyctttctggtgaccagtcccatcttgaagctgtcggtatacgttagcctacaaaaagatagcaatttggacgttccaaagattttaggattggtatgtcagcaaatgggtgatgaaaaccaaatatatatttcataatatcacagcctaccctcgttcttcagataccttacatcaaaagaacatacaactcaaaagatattgccacattagagtctcattccatcattaataactagtctagtccactagattgtattaatgtttcccagagtgagtccactcaggtttgcaggcttcccttcaatcttgtcaggttccaaagctggagcggtcttggcaaacaaatagctttacctttttagatatctgttataattgagctgagagacaatgtcatctgtttctctaagggtctttcaaggtgttaatgtaatgttggatttccctcaatttataacccattattcattcctttaccctcaactactatttctctttctctccgttaatacccaaatgtttccacctttggaagagacatcagaatcactactgttctggtttagactgcaggcaacaatgctagtctagcaggtaccttctcctcagcctactcccatgcagatagggtaaagttatgtaggtgcaaagctagtgggttatttttaccaccaggcaatatagctgcattcactcttagccccagctttgctaagcggggtgaaggagcaacacagtcacatcaggccctaaggaattttgacataagctttaaaaacatagttatggttttttgcttagaaatcagccctgcttccagcactggcagttgcaggcctggtcctagggccactacgtcaagtaggagggaaagaaaaggttttagtgatctgatttagggaagaaagaaaaaatgatcattattccaacgtactcctgccttggcaagatttgcatagtcacccgagcatcctcttcaccccttcttctccagaccagccttagaaaaacaggaacatctagtgggcagactcctttagtcccactcatgttgagtatgagcacacactcttgaaggcatgtaagccagccttttatgtttccagtgttttaattacctgttctattcatctatcaaactatgactctgaggagactatctctgtgcccattgttggacatcataggctgtacagtgtgttccttggtctgaagaaatgacgattggccatacaaatccatgcaatatcttctgtttagttgtttttttaatggtactcagagtatttgcatgttccactgagtaagcaaaagccatgccagagtcattgtctattcctgtcaagacccatttgtagccccatagggccactagcaccagtctctgtattgccagctttgtttaggacctttgcaccagggaatctgccccatagccattatcagtctctgcctttttttctggtggagagaacagttcttattggcattttgtgcctgagaggatgcaaaaggaacatgtctagattcagcccatctctgcctgctgctgtacccccatatccactaatttcatggatccaggtgaccacctcaaggaagtccacagggatacctgcttgtcaattccattcaccttccaaacctggaaaggggctcttctgattgacattgacttgttctactttaatgcacccctcaaatgtccatggggccatgcttcatatgggcatccttttaataggccaagtatccattgccctcttgcctaactgtatgggcaggcaattggtcactgcctatgagttagtaaaatcctaaacacaagtgtttctaccactgttcaattcttccattactgttaggaaaatgcatccaatacagcccactgagattatttgtttttacctcctttggtcaaaatagcagacttccaaacaggatggtattcatttaccctggtattgaattgccatcctcaaaccaagtagctcttggttggtcagtcaagagctgcttacagggtagtgtagaatcyagtggctcctcacatagttccagagtcagttttaggggaaaagagtccctctgtttgtgaggatctcctccttgcattccccaggtagcacgatcatgtataaattctgtttgataatggaatgggcattgcctcccttaytaaagtgttcctctgacatcacccaaaacagcatgggcatttcagatataaatgtaattgcccgatgtgttcttcctgcctgctgcacagataaaaccagttcattaagactgtaatattgcagtaaagagtttaattaatgcaagactggccaagtggaaggactggagttattacttaaagtagtctcactgagaactcagagactagggttttttggataattgggtgggcagggggctagggaatggttactgctgatgggttgggaatgaagtcctagggatgtggaaaccggtccttgtacaatgaatctggctttggttggggaccacaggactggttgagtcatgagtcatgggtctgagtgggttcagttggttaccagaaggcaaaaatctgaaaaacatctcaaaagaccaatcttaggttctacaatagtaacgttatctataggagcaattggggaagwgtcaaatcttgtgacctctgtccacatgattcttgagcagtaagggatgataaaaaatacactttagcaaagttcargcccctcccctgatcctaatcttgtggtctttcattagtttttggtccctgagcaaggaggagattagttttagggagagactgttagcatccttccttccaagttaaactataaactaaattcctgccatgattagcttgacctacgcccaggaatgagtgaagacagccagcctgtgagactagaagcaagatggagtcagccaagctaaatttctctcactgtcataatctttgcaaagggggtttcatcaagatcactttatgtcctttagtcataggagtagcctcagttaatgtcctgtagcaaggaagtaaatgcccttcaagtggaaattctctagttcaaagtcctagtagtcattgctgggaggcactcacaaacctttgccataagccccaggaggtactctgcagagggggctatcaaatggggaagttgtccccaccagctcttcagtttctgttctgcactatgtgggcctgggcagtcttaactggttccaattttagcawgttccattaatactgctcaaaggatttacatatcttctgttttacagtactggatagggggaacatttcccagtcagataaaatgtctcttcccataatgcagtcaggtaaaagagataaaaccatttcacatgaagtatgttcaaatatggcagctttcataatcctaacaaccgttacacttttatgttctagtcccaggaatttccccttttcatccccagatcattttaccctttcttctgcaaaaggctttgggtccccagcctggagtcccaccaggagaccctggcctctctcttaattgttaccttgattaaccagtctaacaggtaattatagatggggtttctcattttaatctttatcttcttgtctttaaaagttctccaaactgggggaaatgcagcaaactggtttgggcccttaaatgttgagagatcagccaggggtccctttcctccactcagtctttaataatgttgtattaagacttttgttttaaccccatcaatttctactttattcattccattttttaataaccacctaaatatgtccaccctcctggggtgagtcccatggctctcccctttctttttcctcttactttcattcctatgaatgttttctgtattcatcttatttcttacaaaccatttaaaaatttccacctcccaggatgagtcctttgactctcccctctccccttcatcattttcttgttaattaacctaatgtctttattagcatctgtaagacctcaaggtaaagcttagaccacaaatttgataaggcttctggaactgtcttggttttgcagcagtaagtttatatgaggtgcctatgcaaaatgggcccctttaacaacaacatgtaccatggcctggataacggtcatattcagtgggtgaatatcccagttatcataaagctagtcccggggaggagccaagatggccgaataggaacagctccggtctacagctcccagcgtgagcgacgcagaagacgggtgatttctgcatttccatctgaggtaccgggttcatctcactagggagtgccagacagtgggcgcaggccagtgtgtgtgcgcaccgtgcgcgagcccaagcagggcgaggcattgcctcacctgggaagcgcaaggggtcagggagttccctttccgagtcaaagaaaggggtgacggacgcacctggaaaatcgggtcactcccacccgaatattgcgcttttcagaccggcttaagaaacggcgcaccacgagacgatatcccacacctggctcagagggtcctacgcccacggaatctcgctgattgctagcacagcagtctgagatcaaactgcaaggcggcarcgaggctgggggaggggcgcccgccattgcccaggcttgcttaggtaaacaaagcagccgggaagctcgaactgggtggagcccaccacagctcaaggaggcctgcctgcctctgtaggctccacctctgggggcagggcacagacaaaaagacagcagtaacctctgcagacttaagtgtccctgtctgacagctttgaagagagcagtggttctcccagcacgcaggtggagatctgagaacgggcagactgcctcctcaagtgggtccctgacccctgacccccgagtagcctaactgggaggcaccccccagcaggggcacactgacacctcacacggcagggtattccaacagacctgcagctgagggtcctgtctgttagaaggaaaactaacaaccagaaaggacatctacaccgaaaacccatctgtacatcaccatcatcaaagaccaaaagtagataaaaccacaaagatggggaaaaaacagaacagaaaaactggaaactctaaaacgcagagtgcctctcctcctccaaaggaacgcagttcctcaccagcaacagaacaaagctggatggagaatgattttgacgagctgagagaagaaggcttcagacgatcaaattactctgagctacgggaggacattcaaaccaaaggcaaagaagttgaaaactttgaaaaaaatttagaagaatgtataactagaataaccaatacagagaagtgcttaaaggagctgatggagctgaaaaccaaggctcgagaactacgtgaagaatgcagaagcctcaggagccgatgcgatcaactggaagaaagggtatcagcaatggaagatgaaatgaatgaaatgaagcgagaagggaagtttagagaaaaaagaataaaaagaaatgagcaaagcctccaagaaatatgggactatgtgaaaagaccaaatctacgtctgattggtgtacctgaaagtgatgtggagaatggaaccaagttggaaaacactctgcaggatattatccaggagaacttccccaatctagcaaggcaggccaacgttcagattcaggaaatacagagaacgccacaaagatactcctcgagaagagcaactccaagacacataattgtcagattcaccaaagttgaaatgaaggaaaaaatgttaagggcagccagagagaaaggtcgggttaccctcaaaggaaagcccatcagactaacagcggatctctcggcagaaaccctacaagccagaagagagtgggggccaatattgaacattcttaaagaaaagaattttcaacccagaatttcatatccagccaaactaagcttcataagtgaaggagaaataaaatactttatagacaagcaaatgctgagagattttgtcgccaccaggcctgccctaaaagagctcctgaaggaagcgctaaacatggaaaggaacaaccggtaccagccgctgcaaaatcatgccaaaatgtaaagaccatcgagactaggaagaaactgcatcaactaatgagcaaaatcaccagctaacatcataatgacaggatcaaattcacacataacaatattaactttaaatataaatggactaaattctgcaattaaaagacacagactggcaagttggataaagagtcaagacccatcagtgtgctgtattcaggaaacctatctcacgtgcagagacacacataggctcaaaataaaaggatggaggaagatctaccaagccaatggaaaacaaaaaaaggcaggggttgcaatcctagtctctgataaaacagagctttaaacctacaaagatcaaaagagacaaagaaggccattacctaatggtaaagggatcaattcaacaagaggagctaactatcctaaatatttatgcacccaatacaggagcacccagattcataaagcaagtcctcagtgacctacaaagagacttagactcccacacattaataatgggagactttaacaccnnnnnnnnnnnnnnnnnnnnnnnnnnnnnnnnnnnnnnnnnnnnnnnnnnnnnnnnnnnnnnnnnnnnnnnnnnnnnnnnnnnnnnnnnnnnnnnnnnnnnnnnnnnnnnnnnnnnnnnnnnnnnnnnnnnnnnnnnnnnnnnnnnnnnnnnnnnnnnnnnnnnnnnnnnnnnnnnnnnnnnnnnnnnnnnnnnnnnnnnnnnnnnnnnnnnnnnnnnnnnnnnnnnnnnnnnnnnnnnnnnnnnnnnnnnnnnnnnnnnnnnnnnnnnnnnnnnnnnnnnnnnnnnnnnnnnnnnnnnnnnnnnnnnnnnnnnnnnnnnnnnnnnnnnnnnnnnnnnnnnnnnnnnnnnnnnnnnnnnnnnnnnnnnnnnnnnnnnnnnnnnnnnnnnnnnnnnnnnnnnnnnnnnnnnnnnnnnnnnnnnnnnnnnnnnnnnnnnnnnnnnnnnnnnnnnnnnnnnnnnnnnnnnnnnnnnnnnnnnnnnnnnnnnnnnnnnnnnnnnnnnnnnnnnnnnnnnnnnnnnnnnnnnnnnnnnnnnnnnnnnnnnnnnnnnnnnnnnnnnnnnnnnnnnnnnnnnnnnnnnnnnnnnnnnnnnnnnnnnnnnnnnnnnnnnnnnnnnnnnnnnnnnnnnnnnnnnnnnnnnnnnnnnnnnnnnnnnnnnnnnnnnnnnnnnnnnnnnnnnnnnnnnnnnnnnnnnnnnnnnnnnnnnnnnnnnnnnnnnnnnnnnnnnnnnnnnnnnnnnnnnnnnnnnnnnnnnnnnnnnnnnnnnnnnnnnnnnnnnnnnnnnnnnnnnnnnnnnnnnnnnnnnnnnnnnnnnnnnnnnnnnnnnnnnnnnnnnnnnnnnnnnnnnnnnnnnnnnnnnnnnnnnnnnnnnnnnnnnnnnnnnnnnnnnnnnnnnnnnnnnnnnnnnnnnnnnnnnnnnnnnnnnnnnnnnnnnnnnnnnnnnnnnnnnnnnnnnnnnnnnnnnnnnnnnnnnnnnnnnnnnnnnnnnnnnnnnnnnnnnnnnnnnnnnnnnnnnnnnnnnnnnnnnnnnnnnnnnnnnnnnnnnnnnnnnnnnnnnnnnnnnnnnnnnnnnnnnnnnnnnnnnnnnnnnnnnnnnnnnnnnnnnnnnnnnnnnnnnnnnnnnnnnnnnnnnnnnnnnnnnnnnnnnnnnnnnnnnnnnnnnnnnnnnnnnnnnnnnnnnnnnnnnnnnnnnnnnnnnnnnnnnnnnnnnnnnnnnnnnnnnnnnnnnnnnnnnnnnnnnnnnnnnnnnnnnnnnnnnnnnnnnnnnnnnnnnnnnnnnnnnnnnnnnnnnnnnnnnnnnnnnnnnnnnnnnnnnnnnnnnnnnnnnnnnnnnnnnnnnnnnnnnnnnnnnnnnnnnnnnnnnnnnnnnnnnnnnnnnnnnnnnnnnnnnnnnnnnnnnnnnnnnnnnnnnnnnnnnnnnnnnnnnnnnnnnnnnnnnnnnnnnnnnnnnnnnnnnnnnnnnnnnnnnnnnnnnnnnnnnnnnnnnnnnnnnnnnnnnnnnnnnnnnnnnnnnnnnnnnnnnnnnnnnnnnnnnnnnnnnnnnnnnnnnnnnnnnnnnnnnnnnnnnnnnnnnnnnnnnnnnnnnnnnnnnnnnnnnnnnnnnnnnnnnnnnnnnnnnnnnnnnnnnnnnnnnnnnnnnnnnnnnnnnnnnnnnnnnnnnnnnnnnnnnnnnnnnnnnnnnnnnnnnnnnnnnnnnnnnnnnnnnnnnnnnnnnnnnnnnnnnnnnnnnnnnnnnnnnnnnnnnnnnnnnnnnnnnnnnnnnnnnnnnnnnnnnnnnnnnnnnnnnnnnnnnnnnnnnnnnnnnnnnnnnnnnnnnnnnnnnnnnnnnnnnnnnnnnnnnnnnnnnnnnnnnnnnnnnnnnnnnnnnnnnnnnnnnnnnnnnnnnnnnnnnnnnnnnnnnnnnnnnnnnnnnnnnnnnnnnnnnnnnnnnnnnnnnnnnnnnnnnnnnnnnnnnnnnnnnnnnnnnnnnnnnnnnnnnnnnnnnnnnnnnnnnnnnnnnnnnnnnnnnnnnnnnnnnnnnnnnnnnnnnnnnnnnnnnnnnnnnnnnnnnnnnnnnnnnnnnnnnnnnnnnnnnnnnnnnnnnnnnnnnnnnnnnnnnnnnnnnnnnnnnnnnnnnnnnnnnnnnnnnnnnnnnnnnnnnnnnnnnnnnnnnnnnnnnnnnnnnnnnnnnnnnnnnnnnnnnnnnnnnnnnnnnnnnnnnnnnnnnnnnnnnnnnnnnnnnnnnnnnnnnnnnnnnnnnnnnnnnnnnnnnnnnnnnnnnnnnnnnnnnnnnnnnnnnnnnnnnnnnnnnnnnnnnnnnnnnnnnnnnnnnnnnnnnnnnnnnnnnnnnnnnnnnnnnnnnnnnnnnnnnnnnnnnnnnnnnnnnnnnnnnnnnnnnnnnnnnnnnnnnnnnnnnnnnnnnnnnnnnnnnnnnnnnnnnnnnnnnnnnnnnnnnnnnnnnnnnnnnnnnnnnnnnnnnnnnnnnnnnnnnnnnnnnnnnnnnnnnnnnnnnnnnnnnnnnnnnnnnnnnnnnnnnnnnnnnnnnnnnnnnnnnnnnnnnnnnnnnnnnnnnnnnnnnnnnnnnnnnnnnnnnnnnnnnnnnnnnnnnnnnnnnnnnnnnnnnnnnnnnnnnnnnnnnnnnnnnnnnnnnnnnnnnnnnnnnnnnnnnnnnnnnnnnnnnnnnnnnnnnnnnnnnnnnnnnnnnnnnnnnnnnnnnnnnnnnnnnnnnnnnnnnnnnnnnnnnnnnnnnnnnnnnnnnnnnnnnnnnnnnnnnnnnnnnnnnnnnnnnnnnnnnnnnnnnnnnnnnnnnnnnnnnnnnnnnnnnnnnnnnnnnnnnnnnnnnnnnnnnnnnnnnnnnnnnnnnnnnnnnnnnnnnnnnnnnnnnnnnnnnnnnnnnnnnnnnnnnnnnnnnnnnnnnnnnnnnnnnnnnnnnnnnnnnnnnnnnnnnnnnnnnnnnnnnnnnnnnnnnnnnnnnnnnnnnnnnnnnnnnnnnnnnnnnnnnnnnnnnnnnnnnnnnnnnnnnnnnnnnnnnnnnnnnnnnnnnnnnnnnnnnnnnnnnnnnnnnnnnnnnnnnnnnnnnnnnnnnnnnnnnnnnnnnnnnnnnnnnnnnnnnnnnnnnnnnnnnnnnnnnnnnnnnnnnnnnnnnnnnnnnnnnnnnnnnnnnnnnnnnnnnnnnnnnnnnnnnnnnnnnnnnnnnnnnnnnnnnnnnnnnnnnnnnnnnnnnnnnnnnnnnnnnnnnnnnnnnnnnnnnnnnnnnnnnnnnnnnnnnnnnnnnnnnnnnnnnnnnnnnnnnnnnnnnnnnnnnnnnnnnnnnnnnnnnnnnnnnnnnnnnnnnnnnnnnnnnnnnnnnnnnnnnnnnnnnnnnnnnnnnnnnnnnnnnnnnnnnnnnnnnnnnnnnnnnnnnnnnnnnnnnnnnnnnnnnnnnnnnnnnnnnnnnnnnnnnnnnnnnnnnnnnnnnnnnnnnnnnnnnnnnnnnnnnnnnnnnnnnnaaaaaaaaaaaaaaaaaaaaaaaacaaaaaaaaagctagtcccacatggcttacagatgaaatgtatcagctgcataatttggggtgttctacttggcatttataggtggagtctggcagtcccccttctcagggtaaacagatcttacagtggcttttattcagtccatcaggcttgctgttccctcaggaataacctcctgtgtgtctggattatgtacacccatgtgcaattgttcagcattgagttgtgggtcctgcatcaaaccaaacatgctcttccattctgcagcattcaaaaccaaagatactgcccctaaattagttattctcataatccatttttataaaggttcctcaagaggtggatgatacagatctacaaaatggaatagttcctttacaccataccctctagtttcaataattatttggttcttcccttctcccacaggtcaccacaggtctcagaggtactttctgttgttcctgcataatttttcccttgtgccatggttctgaggctagtggctgaagcttagactcactgaaatctaagtttggtgtatgtagtgtcacggtctaacccagcactttcttttaattttattttagctagtatagataacaataatcaagggattgaatagtttgcttttttctgattagtttgcattttcttatgcatccggtgaaccaattctccatctctaaattccattggtaacttttacctttagtaactcagcagagcactgtgacttcatatcacaggtgattgtttggccacccaggaatcaagggtttctcatcccccaggcttttatcctttctcttctcaaaccaaatgtttctctgaacctgagccattctagctaatcccacttcactaacatcaattgttcctgaaaaactctcagaacatttttttctgtgttcttataccacaacaatcaatgaggaagacttctgtgaccctgaaatatgtgggaatttcttctccccagcaaacaagcagtcctcttcctgctgggtgtcctccaattcagttctgacaccatctgcctggagatagccttagatcccacaggttgacggctcagtccccaagactgcttccccagacaccagtcataagtccagacctccagatcttctgactgactgactttaagttggggttcccacagccccttctttgggttcctttaatttgctggagcagctcacagaactcagggaaacacttaggtttactggtttattttaaaggatattatcaaggatgcagatgaagagatgtgtagggcaaggtatgggggaaggagtgtggagcttccttgccccacttgggtgctcaacccccaggaatctgcacatgtttagctatccaggaactgttcaaaccctgtccttttggggttttatggaggcttcattatataggcatgattgacaaccatttaaaaatgtgattgaacaagaagcccatgttctaaacccagaaagacctccttattcagacttttcttggcctctctgtgtagtatttcttcctctaggttatggggcaggacattttctggaattagagtcttttgacccacaatcagattaaattcctaccttgggcaggtacaaggacactgatagaggcaagaggcacacaaattcctaggcagaaacggccaggtccccagtgaaacccaaccttcaagccaggctatcagctcagggtggggtccacagccaggagtgagaacttcctcgatgccttttagctaatcaaatggtgcttttcccaagcccgcctatggaccagtcagcacacactccccgatcctragcccataaaaaccccagactcagccacatattgggactacctgccttagttagggcaccctctcatacagagggctacccactttgggtcccgtcttgtgttgagagctgttcttgcattgaataaaaccctcctccacctggctcactctccagtgtctgtgtaacctcatgcttcttggatgtgggacaagaacctgggacccgctgaacagtaggagtgaaaagggttataacactttcctggctggctcactgagctgagggtggtgacacactcctgttcactagagcagcaacccttctaggggcctagacctcaggattccctgagccagagctgtaacactgtaatcctcccaccctttgctggtgctgggcagctgccccacattatgggaactggcagcggtggggctgggccagcccaggagccacgggctggagtggggtggcaggaccaaatgagctgggacatgcccccattcacgaaagcatgcagatggtaggaatgaatgagctataacaggaacaagctgtgatgcttcctgggggctcagagcttaggactccctgagcaaaagggtaacaccccttggggctccgcagttgctggcatctccaagttttcaggctctgctgcatcccccaccccttgtccagatgctggcacccaaggcagaagccagtcacagcatgcccagcccagctatgggctgagcacagagccacagcaggtgtggaacctgggccaataacatgagctaagcattgcctgccaggcttaatgggcagagcaagtctagtggcaagcccagagctgagtgaggccccrgccagaggtgcagctggccaaccgtggagatttctggctggtgaagcagcactgaaagaatcttgtgtcaacaggagaaggtcagagagagagattgtttcctgacatctgctcctgaggcctaataaagcaacccagcattataataaaagactaacaagggctatgggagttaagagccaggaactctggatgtaaaccaatatatatgtattagtccatttttacacagccaaaccatatcaatatataatcataatatcacaccaggacagtggacagctcagtagtctgacagcaagaatataatgctcaattctaaactggagaatgtaaacacagcaaggaaatcctggatacagcgttgaattgtaccatgctagactggctgctgctctccatgattttgatctgtcacacatcaataagagacctagaacttgctttcctgagagcaagagatgagtagttttgtttgtaggacacagttaattttgatgcaactaacctaaaagataagcatattctttctcaaccactttgtaaagctgaaagtaaattcagtagcctagaaattgatctccatcatacaagagatgctctcagagaaaagaccttggttttagaatctgtacaaagaaacctaagccctcatgcatggcaccaggtcggggataaccaggtccacatgtctttatgtctttccacaatgtcagacttttactgatactatttcagccacaaaagccatgagctacatggagttcccaaggaatcgattctcagtacttccttttcagtcagtagagccataggcacacaggttcaagtcactccacaagtcagtcaatattgcaaaccataatagtatacttaatatataattttatagattaaacttcccataacaaagtaacatttaacatcaaggaaaaggggataggaaaaagggttaatgaaccactccagggagagagacattgacaaaaagaatatcctggtctggggcaggcagtccctcaatcttgcaaggaaaagactttgatgtgggcagagccttcagtggcaaatgccgggtgcttatcacaagtgacagcaagactgtcagttaagatggccgtttgagctgctgaagtcttgctctttctatggccacagagtcctatggtgaggactgaaaatggaggaatgtgcttggttatgtcctcatttgattgaatagagtctttattgatcaagtaaaacatctggcctctgttggcaaagtgcctaatgaaatgtaagatggagtctttttctgagataaagttacttatgtcaaggatactctatgtgtaagccaaacacagtgtcaaatgaagtaaatcaagcaaatgtattagaatgaataagataaagtaagtaaatacattggaaagcagaagtctgtaaaagagggattatcttgactatagagtaaaaatagaaagccccaaaacttatatggaaacaaatttagtacaacaagaatgtggaaacaaatttagtacaagaaagagaccaaagaaagagtaaacaagatatagtagaaaagttaaaagaaaatctatctttgcagacacaagcagcatcttgagagaacttagttaagagagaataaagttgcttcaataagaagtcgcagggagctgagaaagatctgaaatctgaactctcaaaaatgaaaactttccataagactaataaaactgagttggaaaaatataagcagctctatctacaagaattaaaagttagaaaatcattggcaactaaactaaacaaaaccaatgataaaatagcagaggttaatagcaaacttcttgtagagaacagcagatcagatttttacaccactcttattacgaggcagtcctagagtcactttgtgtgccgaaaacaggatagtgttcaaagaacattttctagtcactcagaaaccatcaacattgtcagaggccttgaccttcagacagatataaacctgattggaagtcttgtgaactctttgagcaccaacacttgtcactggtcagagtttcttttcatatattaaattcgttttcttcactttcagctttagctttattagctagggtatttttataagactcatgagtggggatgggaaaggtgatcttttcatgtactttgttttgttcttacccatccctcccaccaaaaaatgagaccagaactgttaatgttactattgctctgtgagaaaagatatcttggtgaataatttagagacagggctcagaagaagagaggaaaatgtgggaaagtttggaactttagcctagagacttgttgaatggctttgcccaaaatgttaatagtcatggacaataaactacaggttgaggtgatgtcagatggaaatgagaaacttgttgggaactggagtaaaggtgattcttgctgtgttttagcaaagagacttgtggcattttgcccctgccctagagatttgtgaaactttcaactcgagagagatgatttagggtatgtggtggaagaaatttctaagcagaaaagcattcaagagctgacttggatcctgttaaaggcattcagttttacaagggaagcagagcataaaagtttagaaaatgtgtaccctgactacgcgataggaaagaaaaacccattttctggggagaaagtcaagccggctgcagaaatttgtgtaagtagcaagtagccgaatgttaattcccaagatgggggaaatgtctccaggtcatgtcagagaccttcgcagcagctccttcccctgctcccctacctccgcatcacaggcccagaggcccaggaggaaaaagtggtttgtttcgtgggctggactcagggtccccatgctgtgtgcagtctggggacttggtgctgtgcatcccagccactccagccgtgtctaaaagaggccaaagtacagcttgggctgtgacttcagagagtggaagccccaagccttggcagcttccatgtggtgttgagcctgcgggtacacagaagttaagaattaaggtttgagaacctctgcctagatttcagaagatgtatggaaatgcctggatgcccaggcaagtttgctgcaggatagcggccctcatggagaacctatgctagtggggaagggaaatatgaggtcggagcccccacacagagtccctactggggcaccacctagtggagctgtgaaaagagggccactgtcctccagaccacagaatggtagatctactgacagcttgcaccatgcatctggaagagccgcagacactcaatgtcagcctgtgaaagcagccaggagggaggctgtactctgcaaagccacaggagaagggctgccaaagaccatgggaacccacctcttgcatcagtgttacctggatgtgagacatggagtcaaaggagatccttttggaactttaagatttgactgtaccactggattttggacttgaatggggcctgtggcctcttcattttggccaatttctcctattcagaatggctgtatttacccaatgcctatacccccattgtatctaggaagaactaacttgcttttgattttacaggctcataggtggaagggatttgtcttgtctcagatgagacactggactatggacttttgaactaatgtggaaatgagttaagacttttggggactgttgggaaagcatgattggttttgaaatgtgaggacatgatatttgagagggggcaggggtggaatgatatggtttggctgtgtccgcacctaaatctcaactcgaattgtatctgccagaattcccacatattgtgggagggacccagtgggaggtaattgaatcctgagggctggtctttcccgtgctgttctcatgatagtgaataagactcatgagatctgatgggtttatcaggggtttccacttttgcttctttctcattgtcttttgctgccaccatgtaagaaatgccttttgccctctgccataattgtgagacctccccagccacaaggtggaactgtaagttaaattaaacctcgtttgcttcccagtcttgagtatgcctttatcagcagcgtaaaaatggactaatgcattacattggtaccaggagtggggtgttgctgaaaagatactcaaatatgtggaagtgactttggaactgggtaacaggcagaggttggaacagtttggagagctcagaagaagacaggaagatgaatgaaagtttggaactgcctagaaacttgtwgaatagttttgaccaatgaagtccaggctgagatggtttcagatggagatgaggaacttattgggaactggagcaaaggtcactcttgctgcgttttagcaaagagactggtggaattttgcccctgccctagagatctgtggagccttgaacttgagagaggtgatttagggtatctggtggaagaaatttctaaggagcaaagcattcatgaggtgacctggcttattctgaaagcattcagtcatattcattcacagagatggtttgaaattggaacttattaaaagggaagcagagcataaaggtttggaaaatttgcagcctgacygtgaggtgaaaaagaaaaccccattttctggggagaaattcaagccagctgcagaaatttgtgtaagtaacaaggagctgaatgttcataccaagacaatagggaaaatgtctccagggcatgtcagagatcttcacagctgcccctttcatcacaggcccagaggcctaggagtaaaartggtttcgtgggcctggcccagggccccactgctctatgcagcctcaggacttggtgccctgtgtcccagatgctccagccatggctaaaaggggccaaggtacagcttggcttttgcttcagagggtgcaarccccaagctttagcagcttccatgtagtgttgggcctgcaggtacacagaagacaagagttgaggtttgggaacctctgcctagatttcagagaatgtacggaaatacctggatgtccaggcagaagtctgctgcagggctggggccctcatgaagaacttctgctatggcagtgcagaagggaaatgtggggttggagcccccacacagagtccccactgggacactgcctagtggagcactcagaagagggccaccatcttccagaccccagaatggtaaatccagtgacggcttcctctgtgcaccttggaaaagccgcaagcacttaataccagcctgtgaaagcagccacaggggctgtcccctgcagagccacaggggtggggcccaaggcctagggagcccacctcttgcatcagcatgtcctggatgtgagacatggaatcaaggagattttggaggttttatatatatatatatatatatataaattttttttttttgagacggagtttcgctcttgtcacccaggctggagtgcaatggcacgatcttgactcaccgcatttggaggtttaatatttaatgattgcctggccaggttttgcacttgcatggggcctgtggcccctttgttttggccattttctcacatttggaacargaatatttaccccctgtatccccattgtatcttacaagtaactaacttgcttttgattttgcaggcttataggtggaagggacgtttctaattggtgtaggttcttaaaacatagaaaaaataggctttcttagtactaccctttgtgtctacttaaaaaagttatttttcgattttattttcctataaattcattgttttcatccaaacagcagctgcagttgcaggcatttttatgaccaactcacggatagtcttactttagagaacccagactaatacactgccctttgtaagctgttgttggtaatgtgtgttaaaggcagataggggccaaaaggtattcaaaagtataagcaattagacacaaaaagttctcagacttgggtggccttattgagggaaacgagcatggttgtgcctcattatctgaggatttctaggatagcctcactgcccaaattctcttccccacctgccagccaggggcccaacatgcatttgcatctcagtggctcctttttaggccatcaggaatttttttgttaaawaccaagttcatctgaaaagatgtgaggattagttcacactcacttgaaaacaggactggtagaaataagatctagagcacactggccaacttcacttcagtaacctgccactctcaccacacaaatcaggcagccgtattatggcaggggcttgtaaaaactgaggaacaagccccttgtgtctcagtttctcttctgtttccagtaatgtacagtgttcatgcattcttttctttttttgttgttgtttaaaaattttatttattytataagtcactcaaatttcttctcttaactatttcagtttagtattacacagtatrcagagtgggatgtaagaaccataaactgttccataaccacgtttgaatcaaataatcatgatttgtgttccctttggcatctcagtatctccaggctccagcacttgcttagctgttatgactccrgcragcctgtgtttctgggagagcgctayggctacggcctgggcactggtggctacagctacatcacgggaggaggagggtaactatgatcacagctttcttcaactactttaaacataaacttccctttccacacgagaggtaggtctctggcactgggatctatactgtacgtgagtactctgtgaatggtggttgttactataataggaaagtgaacattatatttgctaaatattaaaagaacactcagtaaagaatattttagcccttgaagaaatgatataaaaaagtatgtcatacttgctagaatgtccctaacaatggttgcttctagacagccaactagttttgattgtctatttaaatggaaaaaaaaaattggttatagattttaatctcagagaataagccattagactattaaattatgtaatgcttaataaatcgcctttggagaaagtgtagtatagaagcttacttaggcaattaagtaatatttatgtaggatttataggttttaaataacagttaaaaatcagtgttttaaatgaagcatctgcctaatctcatacgaagaaagattttaacttgatttatatgggtaaatcaattaagcagttttccctattacttctgtagtcttactattggtgcgtgtaggcaaaatcttatcaacggtagtcatttaaattcactcagtagatatttgttgcatgtcttctgtgttccaggcagcattctagtttataatctaatggattatacacttctggagggctaggacctttaattcctactttgcaattccctagattggaacaattcctacaggaacctgcaggatctcaacagtcgtactacaggcatcctgattttgtttagccaatacagtggtgaagataacacggttatggtggtggctcttttgtagtgataaccaaacctgagcatgtgtgctgatctttgttagacgatggcttgcatctacctgaggtcattaacaacaggagggggagtccagggaggcctttgaaaagacactagagtaagcccaaggagtgttgacctccttatcaaaaaaggttcaagctatttgcggccttactgtaatgcatcgggctttctgggtgaagagttagggccaattaaggatcagaacatggcacccattgagccaggatgttccactttgaaagtggccctgttatttgtatatgggtttatatactttatagcatgatggcgttcatataatatttttaacacagaagtgacttgttatatgatttctgcaagaaaaccattttgttgtcttcattgcatattggatttagctgttgtttccaagactggcactcaaggccttctgaaacctcactttaccttacctatctagaattgcctttcatcatcccagttggttgtttattcgttcaactggccttgtgtgggccaggcacagggaatgcacagatgaaagctgcacagccccttccccacaggacctcacaggccagtgccagatttgcaaatacattgcataattgtcactgctcccccttcccttgcccctggcaggctgtgctagaccaccaaggtggcacctttaacttctgtgctcagcgtctaccctgcccctgggtacttcccaccacctctagtttttctgtcttaaaacttctcaccaccaccatgccttctccttcctaccctgcggaacatcttgagttcactactctatctccattttctcagctccatgctcagccttctaagagtcmtaaactcccagcctcctaaactacctcaccaaggtttccagcaaccttgctgtcgctaaatcaaattaataatttccaatttttatcctgtttcactgacagcctttaacaccagtgactgttgacctgaaacacccctttctcttgctttccagagcgccatcctatccttgttcatccttctttctggtcattccttctcagttgtttctgtctatcccttcaatgtcttgtgttactcaggcatcttttctagtcctccttctcaccctgtattgtccctgggtgatcttatggcttgatgctgaatgtacccagaactctttctccagcctagaactctgctggcctctggattcatagattcaaagggcatctccacttgactgattgacagacacatcacactcaacaccttgtcatttctgaccgtaacccctgatttgttcttccaatgtccccctctcagggaaaacattggcatatatgagttcttatcccaggagtctgtgagtcagctctcaccctttctttccttctttccccactccctgcaatcaactgaatcacccagtcctgtccattttatttcctaaatctctcttccatcaatacttctctctacctccagtaatctcagccaggtcactgtcatatcctatatgagctcctgccacagcctcctgttccccctactttttggtcttaaactccactccatgctgttgtccacactgtagtcaaagggacctttctaaaagcagatctggtcctgtctcccctctgctcagaggccctcagtggcttctcattgtcttttctccaagagtgtgaacctttttctacttttgacatctaagacaaagagatgatcatttagattttaacaagagtcaagttgatctgggatgagtcctcaatttaatcttctctagtttgcctgattaccagcctccctgggtgttgctgaggccactgctttgggccygaaagcccaagaaaagttttgtcttctacccacttaccaggcccagtttgccgctgaaagctgccatggctgtcttgctactcccctagcaaggatttttctctctagaaattcattcatctaggcttcgtgtcattcacctctcttcaatttcataattacatatgattttcctgttatttgaatatttttatttgagtgttaccatggcatgaaagtcttttgcatcttctgatatcctaactggcagtagaacttctcccattgcctttaggatcaagtctgcactccaaggcttataagacctctcatgatcttggcagatgctgttttacctttctagcctcatccatctacacccttatcttaaagaactcttgctgaacttgtttcagtttctctgaagcactatttttttcctctcctcccaagatacgacattcgctggtctctgcataccattgtttccccaactttctgcctgtctagttcctccttgttcttttggactcaccatagctatcaccatttactcttgaatgcctttagcccaatctagcctctcaaatctgggtttaatgcatttctaatgtactttcatagcatattatgcaaaccattatcatttaattgcctatttacttttctattttccacttaaattatgcattatttgaaggcaacacctgtgtgtttcatttctcgttatttcctcgcttcttagcatagggactcatgtttttcaaggtacagtgaataaatgaataaacaaatccatgaacacaaggcactgatctttatatagctaacattgaccaatgtgatgttctgtctttaatagcgcttttacaaagatgcaggaacattcgtcatgagattgtctcttacatcaacctttgataaaagctgtaagacataatgttgaatagtttctctagtattacagcagaattttctgatgctctagcttgagaaccaatatgccttttaacagcaagtcagaatcagtggcttgtaaaaccaattcatggaccatgactagcattttaaattaatgaactattgagtggaatagaataaaatggaaaatatcagagtgcattccatgtcataagggtaagtattgtttgtgacatttttgtttcagctttatacatacccatgcacactcacacatgaaacatataaatggttgcaatgtgaaattaatttcttgttttctgatggcgggtcacagtccagtaagtttttgaaaaccactaccttaaaccatccatcttaggtaaggatgttttgacagagccgagtcagacatgtaggttcctgtggtttctgtgtaggtattttgcgttgtttggagcatgagacctttgtactatttgaatccaagtgtctgtttttcactttgttgcttactccatgaaagttttggtacttggagaaaataaattgaatgaccatttttttttattatttcaacaggcttttgaggggcaggaggtgtttggttatatgaatgagttctttagtggtgatttctgatattttggtgcacctgtcacccaagtagtgtacgctgtgtccagtgtgtagtcttttatccctcatccccacccctcttccgagttcccaaagttcattgtatcattcttatgcctttgcatcctcataacttagctcctacttataggtgagaacatgtgatgttttgaccatttctttttgaaaatacttatttacatatgtgcatttaggtaggaagctgtgcttaggctatctatcatcagcctttttggcagccttgggagcaaatgactacaccagaataagatgttgggcaatgtcctcggaagaggccgcaggcagtgttacccagagagactgccatgacctatttattggctgaaggccaggaagggcaggcatgtttctcatgcatgttcccttcctacatcgtcttgatctgcactgtgttcttgggcaagtcccagactcccatttcagtttttcttattttaaacatttgtatattgtatattgaaggaaataaaataatcctgtagcctttcaacatctttttaatgtttaatagttggtggccagagcagacaagtgttctttcccacgatgatatgactggtagttttccattttggggagcaaccttatttggaaagaactcatcagcatgctaataaacaagtgttattaacggctcatattcacttagtttatgcaaataattaatgtaagactgtgtgagtwggcaaaagtataaaataattacatattaaaatttcatgctcacgtttcatcttcctataaagttagtttttcagagagcggatcaaaaaaatgaaagtctttctcattttttctcattttactagatgctgacaaaagaaaaaaagcatttttactatttactgtcaacacatcttctcatgtgtgctcttttcccggagtcagtagcttgagcccaacgtggccgattgggtgtaggagttccactcagccacaaaaaatgtggccagggaggtttcactgtggacagcaggctttctaagagaaaggcaatttatggtgggttttcagacttgcagttttcctttctctgtagttgacaggaactttctttttataccttcctattttgttacaacatcttaagtaaagaaattctcttgtctagtcaagggcagggagggagttctgcactgttgcaggggacggaggagggggttggccactagcattaggtaaaactgctgaattgagcccagcatgtggaatcagtatttttgattcagggattcaagctctttgtccttttttccttcctcctagactgattcatagaatgttycctcccccaggaagaaggtctttgtaaaggcgactttgttctcacttgtttgatgcatcaaacttccattgagtgctgtgggcaaggccctatatgtggcagtgggactatatggatgaattttaaatagttttgccttaaagaaagtctttgatgattgagactgaacttatgaaccatattgtttccttcggccctttcagttattgagctttttatggtatgaaaagattcatttctaccttaggatcagaatgaaaacaagaaaccaatctgtattttaaaacgaagagaaattattttgggaacttggtacaaaagtgttggaaagggccagaagactaaaagagaacaggtagggttttacctagagctcagtaactagagaaagctactattgcctctcagtctgcaggagtaaagtcctgtttcccggggcccatttgtgcagcagcggtgtctgtggagcttctctaacccctttctctgctctggctcccactagaatggtcttcagcagagaagccgtcaggagacttctcgccagtaaatgtcgatgctacagcaatgatgctcccgatgatatggtcctgggaatgtgctttagtggcttgggaatccctgtgacacacagccctctcttccatcaggtgaggaaatggtttttattcttccctcatggcaggtgagggacagattcttctcacttaaggatttgacttctttctcttcacatattcgggaaacagactaagaactgtgttgacaggctccaggggaatgtccttaaccaggactgttaccctgtttgatgtacacactgtctcatgtacgtcatgaagatgggaggcaaaaacgtctcgaaaaccaagtggcgtttgaccaggatcctcgccatgtaggaccagggaaaagctgttttttggtttatctttttagttaaaaggattggtagcatttaaaaattattggatactgcctagaartatataggactgrcctaatattgtcctactggccactgagtctatgtaattctacaccatcctcagtttttacgctatctgtcttttcactgagctttttctccttcacttgccattaaaatgaatggctaaaatctattaagttgcaaatgggtatctcaataagcatatattctgagggttatggaaaagaagagatgagcttatgtttatcagggacgggtagtgcttttagcctccccatattgcagtttgggggttggagaaggaaatcctcctgcattatgtttagtatcttttaagaaccaagtcagtgaattttcttttaagaataatagcagttgttcacaaactaaaaataaccatagatccatacccatctaatatcctcctcaagaaatttaaagtttttgaaacttgaagtgtgtatgcataagtattttagatgccttctcttatattgaaaatactttttttatgccttatttatttatttttatttatttatttattttgagatagggtcttgctcactgcaacgtggctcactgcagacttgatctcgtgggttcaaatgatcctcttgccttagtctcccaagtatctgggactacaggcgcacaccgccatgcctggctaatttttaaagttttttatagagatgggggtcttactatgttgcccagactggtttcaaactgctggactcaagcgatcctcccacctcgacttcccaaagtgccaggattacagatgtgagccactgcacctggcccatgctctatttatttggtaaccagtagcaaacattatcatagcaatatagaaaacttagcatgacagaaatagtatactatagaaaacaactcgaataagactaagaaagtgtttgcatcatcaggaaaggcagaatccatttctgtatccttgagacaataagagaggataaaaagagacctttaatataaggaaatgtatgagaaacctccttcctggtgtcagttagaagatacttacttgtcctttaggactttgagaggtcttacccactttaagcctgtgtattgtgttaggatgacttaggaaagaaagcgttattctctgcggttccctctcttgctctgtctcatggtgtttcagtcacgcaataaaaggggtaattaaaactgttagtgtataagggaaataatttatcaaggttagtgtgacaggtcttagatttttgtagcagccgttttcatttagggaagaataaattagctaataaaatgataaggagaaaagaaggaaaatcatctataggcaaaagtcctttgaagataatttttttaaaaataaggttgttgtttcccccactttagaacccttgatttctctaattcacatacattttaaacttttccaaaatcataaaatatgtttaaaacctatcctccccaacagataatgctgtatcttccaattcttaagcctcttttagagagtttggtaacgatttggatagtgctttccatttatagtgtttaaacactgatccaaactgtgtttgttcatcttcacaaagaaatatgaggcaaagagataaaatttaagaatcctgatgagctagagacagagtgggcatttggaagcagtctcatatgcaaaattgcctgggccgtcacatttcttctgtttttagagaaagttattgtgaattcgcagatttagaaggggactccagggaaaatctagtatttccctttgttgaaagcacagcacctagagcatatggttttctgttcttccaaaattatgtgccactaatggacatggcagtgtgcaatgattggtggttgctcaactctggaaatttcccgaaaagttttagaccaccattatggtgggtaaactgtatgggatggaaatcatttttcaatacagttatagaaaggcacttgtctaaggaaatgtgattttaatctccatttgctgccctgtttagtgtgctccagtatttacagatgaaaggttctaattttgcccaatgtaggaggtctttccctttttttttttttttttttttttttttgagatgaagtcttgctctgtcacccaggctggaatgcagtggcatgatctcggctcactgcaacctctgcttcctgggttcaagcgattctcctgcctcagcctcccaagtagctgggactataggtgtgtgccacccgcctggctaattttttgtatttttagtagagacgggatttcatgtgttagccagggtggtctcgatctcctgaccttgtgatccacctgcctcggcctcccaaagtgctgggattacaggcctgagccaccacacctggctgtaggtctttcttaggcagtttcagcccctctctcttcctgtatgcagatgcctaccacactctgtgtctgttcctcaagttcttcaccacccctcatcctgcctgtttgggatttcctcttgacattttgggcacagagatatgattattagaggctgcatagagttcttggtattaaagataccattttggatgtatttcacttttctggttttgtctaatgcttttccattacctcatttgtcaaaaatgaccagtaaattgtaatgtttaataagccagctcttttaatgcatgtatagcctccctgagatgcagcaaatcacttctagaatctgcattaatagagtggaaaatgttatggtttattttttttcctgttagatgcatttctatcttcaacagttcatttttaaaggtgaaaaaccagcaaggatttgtttccattgcttttacagtagtccttccttaaccacaggggatacattccamaatccccccagtggatgtttgaaaccttggmtatactgaaccctacgtatactatgttttttcttatattttacatacctatgatcaagtttactttagaaagtaggcagagtaagagattaacaacaataactaataataaaatagagcaattataaccatatgccagcatcactactcttgcttcaggctattcttaagtaaaataagggttccttgaacacaagcactgtgatactgctgcagttgactggataatgaggcggcttctagcgactcaggggcagggagtgtagacagcatgaagatgctgaacaaagggaggattcatgcccagtgcgggatggagtgggacaccccagatttcatcctgatactcagcagggcccgcaacttaaaacttaggaattgtgtatttctggaattttccatttaatattttcagactaaaattgactgtgggacactgacacttcagaaagtgaaaccatggataagggggaactactgtatttctttcttctgggatcattgtggaattatcttctaacggaattgagaggatgtttctccttggttttcttccttgccagtaaactctcagagggccttgcaaagaaacgtcgtataataaatgaattccttcarctaatattcaaaactttcccaactctgttagactgtattccagtgtgtattttttgtctgtctcactgttttttccttttaaaattccttttagatttttaactccctgagcagttataatttcttaaaaatagcaattgtgaaagttctccccttagattattttgaacttttcttcgcagatattattgttggaacactcatctgagcagtatatttgtactggtgaagctaggttaggccaggtgctgctgagtgtgcccaaccggcggtaagatggcttgagcagaggcagccggtgtcctggcagagcactggccctgggctgagcacctctctctggtctctattccagtgtttgctagtcatgttacttctgggagctctggttttctcagcggtaaattggaagtgaaccataatattctgtccattttataaggctgtttctaggattcaataaggcaaaatttaacaaaggtattctgtaaaccatttaagtgagtttaagtattcatatcaaagatttaggcagactgtaataaaaaaagtagcctacaaaagacttgtttttaaaatgcatcacatctagttttagtagtcaagacaattttagtattgatgacctaatgagttactttataaaacagtggcccatataaattaataaacaaatgtaagatgattactggctgggcaaagtggctcacgcctgcaacctcagcactttgggaggccaaggtaggtggatcacctgaggtcaggggttcgagaccaggctggctaacatggtgaaacccccgtctccactaaatacaaaaattagccaggcatggtagtgcatgcctgtaatcccagctacttgggaggctgaggccggagaatcgcttgaacccgggaggcagaggttgcagtaagctgagattgccccactgcactccagcctgggcagcagagtgaaactccatctcaaaaaaaaaaaaaaaaaaaaaaaaaaggtttaccgagagaaactggatactttgcttagagaaaacaaaatagtatctgatttcagtttccttctaaccctatatgctacttcttcaatcttattctaacctgtatctagttctgcttaagttttattttctaacttctaaaaaattttgcaatgtagataatataaaaactttttaggtcctttcacaaactatttcgggttacttgcaattctcatttacacctctggaactagactagatatttggtcaggaagagagcatgagttacattatcctcctcccgagtgagctccttgttttctttcttcgaatgacatcacctaattacacattagagcagtagagaggccaagggaaatctgagaaatccttgtcccagccccccacaacaaacttacggccagtttccttagaagtacctggaacataacagtttttctgtctttgtgcagaagtgataatagtaacttaaatggcttatcaaagaaagctttttgtatttattactattgtttaggaatctcccagaggcaagactatggaacatagaagcaaaaagcagtgcatttggggtattaaggtaattggagacacaaaagcaaagcacctggagttagaagaaagatatcagaaaatagtttcctttttgcttttagattcctatagccaatgttaggtagtgaagtaaagcagtccactttataaattcaaatgctcttctgcagcaaaattatattcaatcaacaaggaagcctaactctctatttttcctgcaggctcggccggtggattaccctaaggactacctttctcatcaagttcccatatcgttccacaaacactggaacatcgatccagtgaaggtgtatttcacatggttggcacccagtgacgaagacaaagccaggcaggagacacagaaaggttttcgagaggagttataaatcagggtgacctgtgcgcctagcctgckcagggartgaactggagactgtggcctcatcccactgtgctgtgctcacaacacttgtgtctgccacatggcattgggtgcttcctgactttagggggagattttatgtatggtattttttgacagaggaagaaaaggggtcacaggagaaacatttttttttctgggaaaaatcacttgcttttgacttatgcagttgttttaacacttagtgatgactgtgtattctccaagctgtgatacagcagtttttttttattgtcacagggaaataaatggtaccagaagtccctttcctgttctgtctcttcattgtaatggaagtttcagttgggcatgagcctggagagatgtgactgtctacagttctatttgtatatataaaaagaagactgaaagtcttttgacatggatattgtgaatggtatgaacttttaaaccatattattgatgatgaaaattatttcctgggaactcagtaggaataataccgtattaaggaataatactgtacataaaacatcatgaaaccctagatatgaaatcccctgaagtctgtaatcatggtggttatgttttgtctattcttttgctgtttgtgcctcataaaaagagaatgaggtcttctgctagagcttcgtattgctttggaagttcatctgtgttttatttctccctgaagccctatctttatggcttacttgtaacatgaaagtagtagatgctgccagaaaatagtgtcctcaatattttaaaacaatgttgacatgttttgttcaagtcagcaagctctatgtgagtctcaggaagtgaattaaatttggaccttatgttttactcttgtttttttttttttttttraatgttacttaatgactctctcctgactcaggagagaaaccccttgtggaaggacagcatggtgatcaggcaatttctctgggttcccaaagaatgacatttgaacacagtattttgaaacagctctagttttcaaattatatctttaatatatagtaatgtaacatattcagtattaatgtataaaaagcactctaattatataattcagtttttgtaaaggtatttgcataaaatttaatatgtcttaaactaattttggtaaattacttcttttttttctttttaataaaaactgttactcattaactttgcttataatgctttttatagcccagcacagaatttaaagccataccaccaaaagtacctgtgtgtgttaatatgtttttcttgtagcatagattgactatttgcaatagtattagtatttaccatttttccaaattagcaactaccagacctcacgtgttgcagtgataacacaatgcattggattcagttttgtgaaaatggattctgtggccatccaagggatgtatcagggatgatcagctgatgagaggctccagaaggatttctagatcgcttcaagcctatactgatggccttagctttgttcagtcrttgtaactgggattgttgtcattgctaccgtggtagtcaccttcatgtcatctataatagtacycctggagagccctggctgcctacaccagtggaaaagagtctccagttctgctctggcctactawctgttaccactgagagaacaacatgttcatttgacatgattgaagctggcatccgtatatgaagatccttgtcaagctttcttctgtggtctgattagtgttgataccggggcacctcctctggtacttttaagtgttttgttaattatrtttactttttggaatggtgtaagcctaaccacaartaaaagatctttgcctaagtttttgatttctcaaatattgtgttcattagtctagactgggaatggggaggggaaatggggaaaatgaatgaatgaaatcagaaaaaagtcagcggctcagtaaatacagtttaaagagagaataattacttcagagctacccttttaagagaaaaccatcagaaattgataatgtttatataaagtttataaagccattgtgttttgttrtataacaaatcagakatgttattttagaatcgattcccatctaaagaactcaattttgagtctgacattyccaggaccagatattgtcttactcacatttcctttgctttgaaatagggctttccttccaaatggctatttttaggctagggatgttaacatcagggatttgtgtgtggaataactggaatgtcatttttgcttttaagccatttctgatgatatagccaaagcaggttgtctgactatgtaggatttttacatcttgmaactaaatcagaaatccagacatgaaaataacctttctagaatgcctaggagcagaaaacaataatagcatgctaaatcacaaatgatgctatgtatgggtatgtaaatatcagtgctgtctgcatttctgggtttattgaagacctctygttgtatatatcctcaaaaattaatgtaattgacatcttcaagaatgtttctattgtcttccattcataatcagagatgtaatttgtatggactaaataaaaactttattatgtaatgaaaagttgaacactttcttacaaagaaaactctaggcccagatggtttcatcggtgatattctccaggcatccaaagatgaaatactatgtttatgggacataaactctttcagagcataatgaaaaaggaaacatttcccagctgaatttatgagacccaagtttctctgacaccaaaacttgacaaaagaaaatcacagactaacaactttcatgagcataaaagacagtgatcctaaacaaaatgatcagcaatatgtaaaaagaggatacataaaaaggatagtaactcatgaccaaatgggtttattccagggatgcaaggctactgtaacattcaaaaatcaagtaattcaccacattaatagaataaaggagaaaaattgtataaccattttaatagctgcgcaaaaaaggaggaaaaaaagcatttgacagaattcagcagccaaccttgtaattctcaaactaggtaaattcgtcaatataataaagagtatctacagaaaaaagtatcataaatacctaatgctttcatattgaattatttctccccctaaatttggaggaaagactagaatgtttaccatcactacttctattcaacatcgtttaggagatcccagtcaggggaaagaaaagaaaattatataaagagtaaatagaagtaaaaagatatttacagatgacttgattgcatacaaacagaatccaaagtattttataatgaatttagtaagatcactagatacaggactgatataaaaaataattgtatttctacatactggcaacaaacaatttgaaaataaaattagggaaacaatgttatttacaatggtttacaaatattaaatactaaggaaatcgatcttaaatgttaccaccactgccaaaaaaaaaaaaaaaaaaacatgcaggaatggatggatatgctaattggcttgattgtggcaatcattttacaatgtatacatatatacaatcatgtacactaagtatatacactttttatgtgtcaagtacacctcagtaaagccggaaagcattagcaagcatctagaaatatctagaaataaatagttgcaagatctctgcactgaaaaccagaaaatcttgagagatattaaaaaggaactaaggtttatcattttatgtactgaaatgttcaatattgttatgactacaattatctcaaattgatctacagatttatttccagtaaaaatctgagactttgtgtgtaaaaattgacaaattggttcaaaatatagaaggaaatgcaaaggaccgagaatagccaagccaattatgatgacaaaatttgaagatttacaagaacagatttcaagacctaccaaaaaactactcaagtgttttactggcatgacgattgaagttaggtaaattgagcagaatccatatataatatgattacttaatgtaagacaaaggtgatacatgcagttcatgagggaaatgatcttttcaataaatgtagagaaattagatatatggaacaatatgaagcaactactaactcggattacagacattatattcaaagattaagctataaagcatctaagaacagtacttttcaactgggggccttttagccctgggagacatttggcaagatttttgaatgtcacaactggaagggggtgctactggcatctcatgggtaggccagagatgctgttaaacaccctacaatgcacaggagaagaattaacaaggaattatctagcctcaaattttagtattgtcaaggttgagaaacactagtctagaggaaaaccagactaaaatatcttcatgatcttaggtaagcaatgaattattaaacaggtaataaaaagccactatctagggccagtgtggtggctcacgtctgcagtctcaacattttggaaggctgaggcaggagaatttcttgaggctaggagttcgagaccagcttaggcaatgtaatgagaccctgactctacaaaacaacaacaacaaaacgctatctacaaaattaaaaagtggatacatttgattttattttaaataaaacattttttttctatcaaaggaaaaggcaagttacagactggagaagatatgtatgatatatctgacaaagactctgtggcagacaactctaaaatagtccccatgacccctgactcctggtattcatacccttgtgtaatcctctccccttgagttttcatgggacctatgtgacttgattttaactaattggatatggcaaaagtgggatgtatgtgattatgtgtatgtgaatctgttccataagcctgtaatattcatctcatgaggagatactcttccttgttggctttgaggaaacaagcagtcatgttgggaaagcctacatggtgagaaactaagggtaacctgtaggcaacaggcagcaagaagcagactggaaagcggtataccacaagggactgaacactgccaccacatgagtttggaagaagatccttcctcatttaagcaaaagatgagaccacagccctggccaacatatctattgcagctgtgtgagagatcctaaagcagaggaccaagctaagccatgctgagactcttgacccacagaaactgtcaaataacaaatgtatgtttgtttatacccctaagtttgcagtaatattgctatgcagcagtagataatacaggttcatagccaatacaactcctacaaatccgaggacacaacgcagtcaaaaatgtccaaaacacttgaacaggcacctcacaagagaggaaatacaaatggccaatacatgtattttgagtgttcaacatcattaatgagatcacaaacccactgtgagacatgctatgcggttacaacaatggcaaaactaaagagacttgatacttttgagtgttgacaaaaatgtgaagcatgtattgaattcttataaagtattgcttaagagtactaaatagccacactgcaaaattattctcagcattttctactaaagcaaaccaaacatctatgccagggttcagccaactgctgcccatgggctaaatccaggccaccacctgctttggtcaacaaaattgtattacacaggcacgcccatttgtttgcatattgtctatggcagagttgactcattacaatggagaacgtatggcttgcacagtctacatatttcctatctgccttttacagaaaaagtttgctgacctcgggtctacactatgtctcagtaattcctctcctgagtgcacagttccacaaaatgaaatgttcaaaagagttcatatttgctttattataacagccccaaattgaaaaaaaatttctaccaagaagagatggataaattattatatatccatacaatgatggataattacttcacagcaattaaaaggagaaaactattggtagacattacaatgttaatgattctcacaggtatattgaacaaaaggaggcagacacgaaagaaagcatagattctttttataggaaattcaagaataggtagaaatagttgatagaagttgaaaaaataggaattcctggtggtggggtaaagaaaaaaagctgcctaaggggcgttcactgtcaactcttagtggagcctttgctggcagtggatagcaaaaaactacaattctccaaaaggatttggtgtgttggctacttcatatggctaaatatacatttatgtgttctggatgctagaagaggcagggataggattgccattctattgtgaaagttcagaaatcttcttcagtattcttatgtaattgggagacaacaccacctgtggaagaacatgaggggtggcaattagaatcaaataacagtaggtgttttggggtcagactgagcagttgctgtggcagcacctcacagactaggggatgtgagggccagagctgagtgtcgacttgggcccccacatttgcccgagtgccctccaagtcagatggggtgaggtgcccttgtggctgtgggcaaggttgctctgaactgccctggcaggacagtggaggttgaggagtttcagttttctgaggaaaaaaacacaggtgaaaacatgatgtgaagatggaaattgtccataaaaaagcaaagcctggtggaagtggcacttcaggttgggtcccagtggcatcattcttaatattgggatgtcgggggttatggggtgaatccatgccctggcagcctttctgcatttggcaggagagcttcttcttgaagcaatgaatcaggtgatgggggagtggccatgggaggttaccccaaagaggttgcaagagattaaagaaagagtaattgatgaaggtaaagaaatggatgctcactcctattcaacatagcattggaagttctaaccagggcaatcaggcaagagaaagaaataaaggtattcaaataggaagaggggaaatcaaactgtctttttttgcaaatgacgtgatcctatatctagaaaaccacatcatctcagcccaaaagcttcttacgctgataagcaacttcaggaaagtctcaggatacaaaatcagtgtgcaaaattcacaaacatttctatacaccaacaatagacaagcagagagccaaatcataaatgaactcccattcataattgctacaaagagaataaaattcctagaaatacagctaacaagggaagtgaaggacctcttcaaggagaactacaaaccactgctcaaggaaatcagagaggacacaaacaaatggaaaaacattccatgctcatggataggaagaatcaatatcatgaaaatggccatattaccaaaagtaatttatttagattcagtgctattcccattacgattgacattcttcacagaattagaaaaaactactttaaaattcacatggaaccaaaacaaagagcccatatggcgaaaacaatcctaagcaaaaagaacaaagctggaggcatcatgttacctgacttcaaactatattacaaggctacagtaaccaaaacagcatggtactgtacaaaaacagacacagaccaatgaaacagaatagagaactcagaaataagatggcacatgtacaactatctgatctttgacaaacctgacaaaaacaagcaatggggaaaggattccctacttaataaatggtgctggagaactggctagctgcatgcagaaaattgaaactggactccttttttatgtgaaactggaccccttccttacaccacatacaaaacttaactcaaaatggagtaaagacttacatgtaaaacccaaaactataaaaaccctagaagaaaatctaggcaataccattcagggcataggcatgggcaaagatttcatgatgaaaaagtgaaaagtgactgcaacagaagcaaaaattgacagttgaatctagttaaactaaagagcttctgaacagcaaaagtaactatcaccacagtgaacagacaacctacaaaacgggagaaaatttttgcaatctatccatctgacaaaggtcttatatccagagtctacaaggaacttaaatacatttacaagaaaaaaaaaaaacattaaaaagcgagcaaaggacatgaacagacacttctcaaaagaagctatacatgcggccaacaaacggaagggaacaacacacacaggcctgtcagaggtgggtggttaagggagggagagcatcagaaaaaaatagctaatgtatgttgggcttaatacctaggtgatgggttgataggtgtggcaaaccaccatggcacatctttacctatgtaacaaacctgcacctcctgcacatgtatcttggaacttaaaatatttggtagaacttaacagtgttgggggaagaagaagttgaagctgacagaaatgttcacactcccagtcttgtcctaaaaaagatttgaagagggaattcactgaagtcttttcaaaggaaattatttgaatctctgtgatccatgcttccatggagttt

SEQ ID NO: 93887 - DNA, 40297 bp, Homo sapiens
tgtccagtgtcttgaaaaccattgttctgtatgctttacctgagttttcttggttgtttcaagtagaagcataaatctaatctctgttactccatcttggctggaagatgacagctcttcccattttcatttcttcagttttgatattccaatttactgatactttgctcttcagctgtatccagcctgttattcatattatctgctgaatttatttcaaatttatttcagtagctttcaagatttctaatttctaatttctcaccataaacacttgttttataactaaatgcttatttatagtgacaaatttcacagctgttgttcctgccttcgtctatttaaggctatattcttaaactgtatttgagattgctctattatctctatttcttggagtataagcaagcagcaaaagacagtggttaggagtgtgatctctagagccagactacctgtgttcaaattctagctgtagtatttagtaggcaagttactctctctgtgccttatttcaccattctcgaaagtgaggataataagagtacctgttttaaaggattagtgtgagaattaaaggatacacttagaatggtatccatttgttttgctgacactgccttgcagtcctttggaatggtgcttggcatacggtagggctcaataaaaaagagttccctgttactaccactttccctctttttccttttccatgttagttgctcatgtttttcatctaccttaggtgctttgtcattcttggctgaaaactcatcttccatagatttattttaggtgtcctggactggtggcccattctaagataggaagccgtaccctagctttaggcctctagatcaggccttgtagtatttttggtccagatccaaaaaacacatggatggtgcttctcaatctctggctgtgacaaatggcacatttctgactcccaacttcagtgaggcagggtagcatgctttgtcagattctattcccgacaatcccctgctgtggttcccatctgctcctttcttttggggggaaacctctctcttcctaatcaatggagacttcccttcttgcttttgaacaggtctatcctgataattatattttcttactatttcctatttttttatatgcttagagtttcagcaagtgctcaatctaccatattgaatcttcactttatttttgactgtcttcacaaatggattctacttagcccttgtacattctaagtggttaccatcagtatactggaacactacatattaaactttttaatcaccagtcaccttgatgaattctatgatgcttctaacagtttttcagttgattctctcccttctctctccagtttccagtttgttctcttcatggtagacccccccacgtataaaggctatgcttattcctgacttcatgcctttgttcttgcttttctcctctgccttttatcctcccttcatataactcaatgctgttttcttagtccatctcatttgtggtttcttctttaagccttcttttcaaatggacacctatttttacttcctattttcacaaatcgcctgtaatcaaaaactatttctttagtgcctaccatatgatcagtacaggttgaacactcctaattccaaaatctgaaatgtgaaatgccgcaaaatccaaaacttattaagtactgacataacaccatagtggaaaattccacacctcatataatggatcaaagtcaaaatgcaggtgcacaatacacagttcattcagcatccctgagggaaaaaaccaaaattaccttcaggctatgtgtataaggtatatataaaacatacaagaattctgtgtttggacttgggtcccatccccaagatatctcattatgtatgtgaaaatattacaaaaaaaaaaatctgaaatccaaaacatggtcccaaggtttttggatgagagataatcaacctctaactatatgtattttgtgcctattatgctactgctgcaaatacagttatgaacaaggtatatatggtcccactcctcacagatattagtccaggaggagagatagatattaaagtaataactgattccagatataagtaaaatagtggaatacttctgaaacaaattacaagggcatcttaccaagtttggaaggacacagtgtttagcaaagacttgtctgaagaagtgacaattacacttagacatcaaaagtgagtagaaatcaaccagactaatacagaggcaggaggaagggtgatggttgagagcaaagaaaacagcttgtgtgatggtccctacactagagggaacttggtaaattcagacctgaactgctattgtgaaggcaatgtaattaacggggtgaatgggtataaaatatgaggtaagtcctagtgaagatcttagaactgtggaaagctactggatgatataaaataggaacataaaaaaatcaaacttgcattttaaggactttttggctgagtatcaaatgaatctttaaaaagtccagttatatcacaattttgataaaagactggtgggtaggatgaacaggagatatttagccaacctgaaatgagtcaagaattgaaagggcttagtgaagaacaggaggcagaggaggtgagaaagcaagactgacttctagatttctttctcaaatgtgcaactggattgatggtggtagcatggactgtttcgctggtactgccttgcagtgctagtcaaatggaatctatataccatagattctcttaactcctttctctataacgtgtttttttttttttttttgagatggagtctagctctgtcacccagtctgcagtgcagtggcgcaatctcagctcacgacaaccttcgcctcccaggttcaagcgattctcctgcctcagcctcccaagtagctgggattacaggcacccgtacttactactaaatatatatatatatatatatatatatatatatatatatatatatatatatatatatatgtgtgtgtgtgtaaagtggtgctacaggccgggcacagtggctcacgcctataatcccagcactttgggaggctgaggcgggtggatcacctgaggtcaggagttccagaccagactggccaacatggtgaaaccctgtctctactaaaaatacaaaaattagctgggcgtggtggcgggcgcctataatcctagttactccagaggccaaggcaggagaattggttcccatccccagcttcaacctgggaggcggaggttgcagtgagccaaggtcgcgccactgcactccagccagactcggtctcaaaaaaaaaaaaaaaatagtgctatgataaagcctctcataaggaataattatcaaaattaaaattcagatgcacaggacgattttagaggaaaataaaaattaaggtataaaaagcaatcaatagagagtacctaacataccaaaaagttgaaaagcaaaagaggcaaccatacacagtgggttgcgaggggggtgttgttgaaaaggcacgactattttaagcgtgtagaattttagggatataaggatgaaagcagagatctcatgcagaccttattctaaataggcagagatagttcttttcagagtgaggtgcacagataatttattaatagaaagtcagcctgcttcctcccatgtctttaacaaaatcctttcatttcatgatcaaaatgcaaatgtagccaagagttctgcaattcacatgacttaaagggaggttcaccaatgctaccattgaggggagaaatggtattcaaaaagttttgaaaattttatttttgatctcacgggttgatttaaatactgtgtaacaccacatcccctctccttcattttttgttttacttcacttttttgtgttcttactctctttataatcttcatttcacaccaagttttctcagaagagatcttgatgatgcagccaacacaaaccatcagttctcaattgtacatcagtgattccaccagagaaaatgtgagttttctgttcaaatgggatcctgtggccatatacataaggaacctaagtacagctaacctaagaaaataggctagaagtgaggtcttatactctacctttttccaaggaaatatacaagacagtaaatttatatttatatacacacacatatatatattcatacataaatccacttacaaaataaaactattaagtgttgatacatcgaaaaggatagaaaaataagctgaatattaagagtaacattctcagaaaaacagcaaggtagatactgaacaagtgaaaaattagatgcaaaggctctaaaagtgtaattctttgaaaagaaaaccagaatcagtgcagaaaaagccagcagcccctctgcaagtgctacataagaaaatgaggccgggcatggtggctcacgcctgtaatcctagcattttgggaggccgaggcatgtggatcacctgaagtcaggagttcgagaccaacctggccaacatggggaaactccgtctctactaaaaatacaaaaaattagccgggtgttctggcgggcacctgtaatcccagctactccagaggctgaggcaggagaatcgcctgaacccgggaggcggaggttgcagtgagccgaggttgcgccattgcactccaccctgggcaactacagcaagactgtgtctcaaaaaagaaaaaaagagcctacggtgaaggagagagagatacagcagtgagaatttcatagggttatcttttaacagagacggaagctgacgtgagtagaccctggaaaacgtctaggcccactgcaaataacaacatcgatcaaacactcataatacaggtggatgtgagtaaaaaggagacaaagaaagaagactacaagagagaggccatctgaaataatataaaaataattgatcatctttgatatgtttttacatggttgtcttatttaaatattcacaactcctggaggtagggttttattttacagaaaaaaaaaaaaaaaaaactaaacaggctcaatgatgtttaagtatctagtccaagctcaccacaggggcataaagtggcagaaccgacattagagggtagacagagggtaaccgcaagacacaaatttcgtgttctgcaacacttgtgtaggcttcacacacacgtgcctccggggccgaaaacaggcgacaccatagcacttgggcactggtgtcacccgcttcaagaggaaactaggataattatgaccaaaggggaacttgttcattcgccggatattaaaggtgcctacttaagtgcgaagaacaggaggcatagcggtgaccaaacacctggcccctgtccccgccgggatcccaaccttggggacccccgaagcgccccgggcgggaatcgggtgggacgcggcacgcaggagggaacgggtgtactgggtggggtgggcgtggcgctgtcaccgcaggagatcgggcgggtagggcggacctgggatgcgggatagagggggcgcggcattcgcgctagagggacgcggtgcgcaaccggctgactaggggccgcaacgcctagcgcgcgcgacaaactacgcagcggcggagacaactctcaagggatagggccatcagccctgcggccctggcaggtccctaccaaagatcttggaagatgccgtttggggcactaaggggacctgaagtcctccccaggctcattcccgcctgggggccttggctctgggaaggcacgcaaggtaaagggagcgcaacggacactcaccgtccatggtctcccgcaccgcattcagattcgccgccgcggccgccgccgccgccccagcaccgccgctactcgccatggctaaggccgagggaggcgggagaagggcctgacccggaactggagcgccttcctctctccgaggcaatcacacagcgcgtctcggcccacgccgggcaggctccgcccctcgcgctcgccgccggcgwgaggctgcgttgatttgaatttggagccacgttcctctgcgcggaacgtggagcgaggagttgccatwcgaatttcctacgcggcctccgtgcgattggctggttcgcggatggcgggacgacacgattggctagtcgctcacaagccccgtgccctggttggcccaagacagcgyggaagcggggagttaaagagtctatgcctgtcgtggaagctggcctggcccccggagctccctggagtcggtactgggggcttcgttttgtacgcaccggtaggtacgctcttgtggtccctggcctttcctcctgtctgaatggagaggtttcttttcccagctcctgacttgcctgcccgctcgcccctggtgaatgggagcagtcagggartaggtgtggaagagaggggcaccagaaagagtggccacgtagggttgggggcgacgcctccttcgcactccatccagggaagccggctgcatctcaaccttccagaagtagactcttttccaccccaccccgccaaggtgtagcctctgtagcctcctttgattgcaagtaatgcagtctccctttctatcccgggaggggtggaggggaggtcttggcraaaggaggatttttggaggaaaggggaccccaggcagttaatttcctagcccctgtcaatcatacttctctggctaggactcatgtgcaagaaaggcacaagcttcctcatctcttacctgcttgctacaaagaattgtttaatagcaactgtagttggatagggtatccgaagaatgttcatagtgttgagacatgagatgatgaatttaaaaaaaattgtagytataagtcctttagttgagaagagatctgggcctgttgtaacctttagtttcctcagaggcagatctgaattcattcatatttgattgctgcgtataagccacttcacttctctgagcttaatactttcgcaaaataatatcactagtaagttactgctatagctttcaaggttgtttcgaggatcagttgagaacatttatatgtgatactttttttgtaagctgtatcatagccccaagagtgtgaggttttgagttgttttttktgacacatttgtcgagtacattttaatagttaaaattaatatctatgggactttgtaattttaacwtgcatactcttgatttctttttagttttctctctgtgctatgggagatgtcaaggaatcaaagatgcaaataacaccagaaactccaggaaggatccctgttttaaatccttttgaaagtcctagtgattattctaatctccatgaacaaactctcgccagtccttctgtttttaaatcaacaaaattaccagtaagttattcctgactagtgtttacaactaattttaaatgtaagtaattacaaataattttaaatgtaaacatctgtctttacaaggtaaggaggaaatacattatggagcatatatagctgcaatatacttttttaaattgtagtgttcattataatctagtggttaggttaataagttagctagaagattttttttttttaagttcaagaacatacgttagcttcctgcagttgtgggtgtagctacattctgtggttgacgatatagctactaatacattagagaagaagctgcatcatctaatattctgttctcacttatttggcaaacattatttgagtgttgctatgtgtcaratacagtgctaagcagggattacactgtgaacaagttaggatcattaggcacaaatccttaaggaggttatactccgatgtatgggtcacaaactttctgttaggggccagacagtaaatatttaagctttacaggtcatttggtctctgtcacaactactcacttctgtcttgtatcacaaaagcagccataggcaatgtgtaaagagataaatgttactctgttccaatacagctttatttatggacacatttgaatttcatataattttcacatgtcacaagatatttttttgtttgttttcccaaccatttgaaactgtcaaaataattcttagcttgcaatctattataaaaagaaactaacccctattttaatgtgttaaacagaactagatgagtaatatcaaggcagtgtgataggtgatatgattagtgcttagggcaatagtaatatgaaggaaaagtgttcttcaggatattagaaaaggcttcatcactttatcttttttttttttttggtagagatgggatttcaccatgttggccaggctgatctcgaactcctgacctcatgtgatgcacccacttcagcctcccaaagtgctgggattacaggcatgagccaccatgcccgggccactttatcttattttactgttatttgctacactggataagttcttttgaccttggatctttcaacctaccaagttacttagaaaaactgcaaatagggtggctgtttctgctacactttcatacaggttttacaatgagcaagtatgtactagtggaaggtcgagcagtttatattgagtcatttcatcaatctgaccttatgatttttaattgaatcattaaaatttatctcttggtcttactaaaaataaataatagattgacggcagcttaatcctcaaagttggaatgtatggcatcttgcgtttttaggactgaatttgcctagaatatatttctaattacagattaggatttggataaacctttaattcagttgcatggttgagtacagaaaggcagcactggttgccattcataattattttaaggatcaactatgttgtgagcttttgcagccacctccaaagtgactaaggactttaatttcagttccttcttagtgaaagtaaagacgtttgttaactgtgagagatttttacttttacatgggcttagtttatcacactgatgagtgttaattgtgaaagttttatatctttattactctgttgtgatttttctcgtattacgtaattccaacccaggtgaaagattctgatattttaaaagagatacaggctgggcgctgtggctcatgcctgtaatcccagcactgccaaggtgggctgatgacttgaagtcaggagtttgagaccagcctggccaacatggtgaaaccccatctctactaaaaaaaaaaaaaaaaaaaaaacaaaaattagctgggtgtggtggcgggtgcctgtaatcccagctactcaggaggctgaggcaggagaatcgcttgaaccggggaggtggaggttgcagtgagctgagattacaccattgcactccagcctcggtgacagaacgagactctgtcttaaacaaagagagagagagatacaattaagtcagttgatcgaatgtgatatgattaccctttgccatttaatttcatggtaaagtcaaattttaaaatacaagctttaaaatattttcatattataaccattcatattatttctcacataggttagcattttgatgaactattttagtttgcctttactcataagctcactttcttttgttaagactccagggaaatttagatggtctattgatcaactagctgtaataaatcctgtagaaatagacccagaagatattcatcgtcaagctttatacttaagtcattctcggtaagttttcctttcttgcacctaagtctaataacactctcaagtgaagagaggtaggaaattctaaatgttgagtatttttctatgtaaaggtatcagggagaaaaaattttgatgcagattttttctatctaaatgaatgagttcaaagaactacattcagaaagattttcttgccaacagttccagacctgagtagatacctttttcttttacaagtaaccttttccctctgctactgaggtgacagctctgtacccctagcactcagttaagagaagaacattttgaaatttgcacttttctacatggttgtggcttctgccattaacttgtttcagtttgtctttttgatgatttggggtaaagcaaaatgctgtttcattgttatctatgtttggggaaacctaaaaccccctcaaagagttacgtatgcactgaatggaagggtatccattagcaacagagcggttttttagacatcatccaactgtaacaattcacttggaatctgaattacattttctagaattctacatatcacccagtgcagtcttatttgttgatgtgttgtttaggtttcaaggcactaatgtactgcagatttagttttttattacaaagtgtaaggtcatattattcttttgtagttttagggactcttgtttatatgttttatagtctgattttttaatatttgaaaaaaatcaaatacatggtatgaccagattttaatttgctgtcctaaggtagacatgttgttagtccaaaacaaaggataatccttttccctttgacttaagaattcagtcacacaacgttgcacacatattgagatattctggtaaatacttactggcttttctcctccatcttctctttgcttggtaacatgatgaccattcamtcataaaattaatgtccacccagagtgttaataggaagggaatagaatgaggatgaagcatgaaaggattttaacttaaatttaaataatacctttgaggccaggtgtggtggctcacacctgtaatcccagcattttgggaggctgaggcgggcagatcacttgaggtcatgagttcaagaccaggctggccaacatagtgaaaccccatctctactaaacatacaaaaacattagccgggcatggtggtgcacacctgtaatcccagctactcgggaggccgagacaggagaatcgcttgaacccaggaggcaaaggttgcagtgagctgagatcatgccattgcactctagcctgggggacagagcaagactccatctcaaaaaaataaaataaataaataagtaaataaataatacctttgaaagagaaggtgagatgaatatctaaaagcaaatgagtcacagtgactaattttttgtttcacacgaacttaattatgcttaattattttgtctcatttcttcaatatattgaatgatggacaattattatattgatcagtcaagagatacttattgagtactgtgagggactgtaagaaacactgaagaagtacaagatactaagagtcaagagtcaaaaatataattagaccaaagttgtaacacagtgcttctgttcttactactaaatgatatattgtctgcaaaggtttataaagataatcttggtgtctcttagtacatagatttatcatatagaagaatggaaaagagtgggaaaatattataatttaatttaataatataattcaatgaatggttatggcttctaccaaggatagtcaatatattcttcacagagcatctcgtttcatccttagaaacaagcagtgtctttcagtatctcttcttacatattagccctctacttcaattcttcccatccttttcatgccaccatccacacagaaaattgtaactgaaaagcataccagtgtaagcaggtgagtcttggccatgtaggtgaccagtcctgaggtcccctctcctttgccaccctgcaaaggctcaacattcaggccacacctgtacctatatgcatcatactggtgttcagtggtatgctggtcaggatgctctcccctgtatgacttcttagaatcttgtttgatctgactctagagtatttggccacagtgatttttacagtttccagcaatcacctgagtatttcatgttcttgaagtccctctgatgaagtagcaaaaggtttctgaatgcagtaatcctagttcagagcttacttgctatttgctaagcttgttatgtgctgccattttgaccatgataagatgaagagaaccattgataagatgaaggccattttgttatcctcaaaatggctactgttcaagctgggatatgtgggttgacactgtagtttattttctcatacttctcccacttgaaaaatctacttaatttctgaaatgtatacattctcatataagctttattaagccatgagcaagtctatatgtgaaaaaaattcacaccatggaatactatgcagccacaaaaagcatgagatcgcgtcctttgcatggacatggatgcagctggaggccattattcttagcaaactaatacaggaacagaaaaccaaacccctcatgttctcacttataagtgggagctaaatgatgagagcatgtggacatatagaggggaacagcacacactggggcctggtggagggtgagaggagggagatcaggaaaaataactgatggattctagacttaatacctggatgattaaataatctgtacaacaaaccccagtgacacaagttacctgtgtaacctgcatttgtacccctgaacttaaaataaaagttaaagaaaaaattctgagacaaaataattttaaattgtaaaaaaaaatatgtcttaccaatttactgatggaaggcaaggattctttcctgtaatggaataaagaagtggtcctagaaagctaactgctgagtccttggcaagtatatgctttgtgcttggacccaaaattttatattaaatcttgtagctgagaagtttatataacagtaattgcagattgtatcaaagtgaaaaaaaaattcatttggaaaaaatgttatattgtcagtgttttatttcagagttaatatttttgactgtttagaactgtgaactatcctcatctattttacagtaaaagttgattctaaaattattgccatgataaacttgttataattgaagagaaaaactttggacaatttttagatgtatgttgaattaaatacttcttaatttgtattaagggacaaagtttatcaaatttatattgttaaaagcaatttaatatcaatgtaagtcttttgaaataaagtatcattgcattcaaactttgaatggaaaagagggaggtaagcctaatagctaactgctgaatttcagaatactgcctaaatgttactaaatgttacaagataccactagtattaattataaagtgagcttaacatttgccagttttcaatgaagggagattatttatttgaaagrttattttttaaaatgttcaataagcttaagtaatagcrtggttatttttcttctttatctttgtatagaatagataaagatgtggaagacaaaagacaaaaagccattgaagaggtaacttaaactgttactgatcattaaatcagttaaggatcaattctgcatgtacatcacttcttttaggaagactttcttcaattccttcactgtcctatctcccctccaagcccttcacagtcccatctatataaagcacccttctgtactgtcctaagaccaataatttccagctatcccagtaccttgcatagcacttgyatactgttgtaatgatcagtttagtgtttctgtcccctagacgcaatcttttttggccaatactgtacttcatcctttcattctcaggacctagcacaatttgtcttccttgtgccttcaaaatgttgattagcacaaactttgtttcaagttggagtttatgtagaggaagtcgaatattctcaggccttcagagtctagattggcattgggaatggctttgtctttttttgttaatactttggatttttaagatattcatgaaataaaatctcttactgttaaacaggaaaggtatatcataatgtaggctttctaaaaaataaaaataattaagttttttgcttttttatgtctgttgaattgcctttcttagcatctaaataaggttattattattattattttttgttttttgagacggcgtttcgttcttgttgcccaggctggagtgcaatggcatgatctcagcccactgcagtctccgcctcccaggttcaagtgattctcctgcctcagtctcccgagtagctgggattaccacacgcagctaattttgtatttttagtagagacgggatttctccatcttggtcaagctggtctcgaactcccgacctcagatgatccgcctaccttggcctcccaaagtgctgggattacaggcgtgagccactgcgcctggcccagcatctaagtaagggttacttaccttgttctttcctcagaaagtctttatgtgatggcagcatttctgatttttacttttctgcccctctagccccctcaaccctcctctgttccttagccgtacttggctcttccgtaccacaaaagactatgtttactcctgctaaacattacctacttcttcttctatctagtaactgcacagttttcattctgactcagtcacttggttcttccccacctgaatattctcagactctcaaaatttccaacattttgaaaaaatactttctttaagaatccttaattttaaagagaaacccagcaggtaaacttaagaaaatttgtttcttttcaatatatatttttgaaaatagaagaaacatatacatatagtaaaaacaaaaagaaaaaatataaaataaaaagcctcctgtttccccatcccacttcatgaaggtaatgactataacatttcttatgtgtactttcagattaattttacttatttaatagcatatgtccttaaaatattttcgacaaataggattatcattctcatactattatcgttctcatactgcatcctcctttttttgcttcatgatttttcttagaaatttttgataaccagcatatacagatttttacattctcttagcaacagcatagttacctagcccctgttgacagatgtttaaattgtgtttattatttttctgtcacaaataatgctgcagtgatttgtatatatatctttatattcttgaaatggacttagtaagtcagaggctttgtgaattttcagttttggtagattttaccatattgccctcctaaaaggttataccagtttatactcctgattacagtgtgacactgcttgattttccatatctccaatattgattattatcagaattcttaatttgttctactcctattactttaaaaatgacttttttttttgtatttctttacttttgagtgaacttatacatcactttgtaagtttataggtcctttaattttttttctggtaattgtctatatctgccccagtccacctttaaaaaaaaaaaaaaaaagaatcttttcctcttagattcatgggtaatttagttaagaaaattagctctttgtcatatgtatagcaaaatatgaagaaaatatgtttggttacttgcaaaacctagggaagggaaaacactgtgktagaaatgaaagaggaaagaaaagtatacaaatgctctatctcatttgaatatactggccagtagtgtgctggtgaatgtttaacaacttgctctctggtcgtggaaggagtacgatttatagcgattcctgctatccatagtgtaagtactccaaccatggccagtttcaagctactgatgtgacatcactgaatgggaaaggaagaatagtggcacaccattatatgtaggaattccaccatacagatacaaaatacattattaacctcaagagcatagacattgataaatatataaaataattagcaagtggtgagttttggatatttgttacctttatttttaatatatttaattgtaagtttacataattttatttttaatattggttttaacaactggtgcacagaattcttgaaaatttaataatcagatcttgagagccagaacaaacaagccagcttcagtgccgtcattcatactggcctacttgcatgtctctgtcttaatatattccttcccttttcatccttttttttgtaaccccatcaaaaaaacctgggaaagaaatttaaaatactttgtctatgattaatcctcttagtttagtttkcaagtttcaaatttaactggttgatttgaagtattaagattcctctttatatatactttaaatttcttccatttttcctttggtcatttgtattaaaatttttgcatacagttataaagttagtatatgacatgtttaataattacttggaaaaacacaggtaccgtctcacattttgggtggaatttatgcctaattgtatgactttaattttcctagtttttcactaaagatgtcatcgtaccctctccttggactgatcatgaagggaaacagctttcacaatgtcattccagtaaatgtgagtgtactaaaaatgatatgaataaaaatcaaaaaagtcggtgaatataaagcaacatatcatgaagtgccagtatatctgctttgtaagaagcttgctttaaaattctggataacatagaatttaactccttttagggttagaattaaaaatttgactaaaatttattgaattgttttttagctgttatactctgaatttaactttttcttcatgactattgtgaatgtcagttataatgatggttatagaggatccatagatgaagaaatagttggtattgaatatagagatgagttgttaatgactttagcagtattttgaaggttaatattttagataaaaccgtaaattgtgttgccttttgctaatttgctgatttcttataaaggtaaagaaaggatgaagacttaatatgacctctgggacagtgtattattgctgagtatctgcaaaattaataaggaaattaaagggcaagccagtaagctaacaattatctttctacctccaggcaatggttgtcatatatttgttctcactgctctttgggttgtgaggcagtattcaggaatcacttgtatatatgcatccctcatcacagtggaattacactgtctattgtagtataccttaattatgctctcagtataagagggaatgtttgttccattctttatcaaaaaacacaacataataatacaacaataataggtaagctgggttagtactttctctatgccaggacagtgctaagtgctttcagtaatttcttataactcatatgaagtaggtgtaattattggccccattttataggtaagaaaacctagttttagaaagatgagagcatttgtccagggttacagagatgataaaagtgggaaaacctgaattcaaaattctcaaatcagatgctgtattcttagccattatgaattagtggtagcacrcaatagtagatggaaatctggattgtaaaacctcctacttttataaaccagagaggtgaccttgatcaaattattctctttgtacctcagtcttttatttgtgaaataaaaggattgaactagagttgtccatttacatccccccagctctaaaattgtgtgtccaaggtggcattctcatagatactagtttttcacccccagattctttactgttggattttttcaacagatgaatcaaccttcttaagtgattttttaaataacatttttgtattccaagtatcctgttttagttcaagtgatgcaggatcaagaagatgcttaaaaacactttagactctttgaaacctaatcaagcccacgataacagtgcagtggttaataggataggctccagagctgtgctgtttactgtgttgttgggagacaattctccataggcctcacatttctgcacacctttcatgaagtggcatggacaagttctgttccaaactatcttttctagggtgtttgtcttggaaggtagagatagtgtgtcccaccagagcagagggtaagtttgttttgctgtccagtatagtaaagatgatgtctccctctggagcagatttgtttgcagtctctcttaaaagaatgggatttcctaagcttggggttccttagctatggtgaaaacccattgtgtgtccaccagccacctgggtattttaatttagaatcttttaagatagagagcactcctcccatgattaggagagacacaagatggaaataaaaattttattacttacaagtcctaggggtacacagcatacctgaacaccacacagggaggtcaggaagagagagaaagggacccatgggccaacgcctttattgggtccagggcattatccaaacagagttttagttggtgggtttaaagcaagcaggcatgcattgaggaggtcacacagtgactgagagatagtcactgtggcatgtctgtgtagtccatgtgcggtatgagggttggggggtcagtcaggtaggccatatgtagatggcccatagggaggtggttaccaggaggaatttatataaggcagatatctggatcaaccacattgaggtatagaactggaaactgtgtcgggtgaatgagccctgctttttgtatgagaaagtccagcttgtatgcagaattataagaattcactgcactggactgtttcatgtcatcttcttggcacttgggagcaaagggaattaataggaatgttaagttcatgctgcctgctgtgctgaaaataataaagtcctttatctctgcccccagaagcctcatgtctttagccagcaccaatggaactttgacatgttcacctgttagttgccaagttgggtagaatcttagaccctttatagttcttgacagttgtggccacgtgtgactatttaaatttaaagttaaatttaaaaatggagttccccattcacaatattcacatttcaggtgctcaatagccatgtggatatcgagtagtatagatagagaacatttccatcatcacagaaaatgttctattggatgctactttagggccaaggttggcagcccttaagtgtaaaggattcaataataaatacttaagcctttactgaccacacaacctctgttggaaccactccactctactgccgtaccacaaaagtagccgctgacaatatgtaaatgaatgtgagtgtgtaccagtaaaactgtatttaaaaaaataggtgaaaggccagatttgcaccatgaacaatagtttgctgacccttactctagtgtaatattatctaggtttgaattgtacccagtaaagctcactagctgtgtgactttagatgagttacttagcttttctgtgcctcagtttccttatctataaaatgatggttattgtggtacctctaagataatgtacctagcacatggtgtttggttatctacctaaagattaacaaataaaatggtgaatgaggggaaaagtggttttgtttatacatgttagcttgtgctggtagcatttactattattaatatttatgcagcaaggtgcttcagtgcatatcctcatgtgtttttatttatggacttsagtgagaatttccctgggatatatacgcaggtagaggatttctgagttatagaatatatcgttacctaatctgactacacagtattagagtgctctctagaatatctgcacagtctgcacagccccagcagtccctagggttcctgtgtcccagcatccctgcctgcccttggcattatccagcttttacatctttgcctttcctataggttatttgacattctaaatgattgtttcagttttctttttgtcttcatagactaatgaccttttacatttcatagaaaatgtctatttgtaattcattgatatgtttcaattggagttgctaaccttttttttcctgttaatttctaagataccttacatattgtggttatattggtcttaaacatttcaaatgttatctcccattctgtcatatgtatgttactctttgttcttgatatcctgggttgcatagaaatttttattttggtgcagtcaaatccatcgatttttttttttcctcatttgattgtggtcttaaacttgtctaagcccttctaggggaagcaaccaaaacacttggaatagagttgaaaagtgatgtgataatgttgctgtaggtgtctttctggtctgaggaaggcaaggaaggcatgctggcagaagataaaatttaagctgagatttgagttagactcttggaatgcaggggagaaaaggcagggaggagagagcataagataatacctagagatgagagagatacctgtttcttgtttgtttgttttaggtactcaaataatatttaattagatggcaaccatgctagagaaatagacatggttttgaaaggctttgtaagccattgaggtgtttggattttatcctaaagactattgcagggttttaggcagagagagtattgattacatctgccttatagaaggtcactctgcatgcagtgacaaagtcatctgcatccaaaattttctttatttacccgttttgatagtatttcacagggaaatttaatttattcagcaacccacttacccattttaaaatttagaattgttaggttactacactctattttgtcattttattttagaattcctgagttgtttctggttttggggggagggggggtttgtttggtccccttgctttttcttccttttatcttacttatattagtctttttgagatggttttggtttttgagtttttttaatctggtgatttttcaatttataaaactttagagttaaaataatttgcacccatatttttaactcttcttgtgaaagaaactatatggttttattgatcaaatttcaggttttgtcaaaataatctggcattttaatctgttgaggacattgagggtagctaaaaggtatccctaaccttttaaggttgacgtcatgaagagtaatcatcatttccttaaaaaaaaaacattactttgggattcatcagtcctactactgggtatttatccaaaggaaccaaaattactatttcaaagagatacctgcactctcatatttattgctgcatcgttaatcacaacagccaagatatggagtcaacctaagtgtccatcaacagatgaatggactttttaaaatgtgatatatatatatatcacayacacacacacacacacacacacacacacacacaaaatggaatactattcagccttaaaaaagaggaaattttgtcatttgtgacaacatatatgaatctagaggacattatgctaagtgaaaaaagccagccacagaaagacaaatactgaatgatttcacttatatgtagaatctaaaaaagtcagactcttagaagtagagaatagagtggtggttaccagacggtagggaggaggggtggtgggggagatgttggtcaaagggtacaaagtttcagttagacaggaggaataagttctggtgatctgttgcacagccaggtaactatagctgataatgaggtatcatatagttcaaaattgctgaaagtggattttaaatgttcccaccacaaagaaaagtatttgaggcaatggatatgttaattagcttgatttgctcttgtcatagtgtatacatatattgaaacatcacattgtaccccataaatgtatacaattatttaaagaaaaatgtaaaaaaaatattgcttggtgactccttatttgctgtggtaatcctttagttttatccttgtattccctcaaaggtaaaaaaataatagaaacataccaaaatatatacttatatatgcagattttttttaatgttgcaaaataagtttcyactttcttaattttttactttggaaaaagtaatgctaaagcaaatgaagagtataaaacataggatttttcacttaaaatgtcttacaggcactaacataaatagtgactctccagttggaaaaaagctgaccattcattctgagaaaagcgatggtgagtatgaacacaatttgaaaagaaggatgttccatattaagctacattgaattctaaacccagttcaggtagtaacactttactctggaattgaaattgtttcctttttttttttttaatttatttttgtttttttgagacagggtcacactctgtcacccaggctggagtgcagtggcacaatcaagagctcattgcaaccttgacttcccgttgacttcccgagctccagtgatcctcccaccgcagcctcctcagtagctaggactacaggcacccgccaccacacctggctaatttttgtatttttttgtagagacagcatttcgccatgttgcccaggctggtctcgaactcctgggctcaagcgatctgcccactttggccccccaaagtgctaggattacaggcatgagccaccaagcctggcctgtttggattttttcaatgagctacataataaccatatgagagctgacctttaaaaacaagtatagtagaacagatgcatccagccatgttttagaaatagcactagtgttttgttttcttgttcaaagcatgtgaattgatttctggtcttggaaagcattcttttgaaaattggttaatgtgagaaatctccccccagatataggctggcttccttttcaagtgccagtaccagagccaggagttaacttttactattaacacgtttacaccagttgcggagagtgtgggaaaccacttctagaaaggtggcagggtatgtgatagaatgcagaaatgaataattccatttggctggaacatcacggggagatgattgactgggcagcacatgctgaattgtatagtgtatactttcattgatttatcccatgtttgaatttgtttatttatttgcttgtttccagctgcttgtcagacattgctgtctcttcctgtggattttaatttagaaaatatattaggtaaatactgtatttgtttaaacttttaataacttgaaccaaaggttttgtttggctggctttttgtaaatggtaacatgggaaatatgtggcagtgcctctttctaaagaagtggggaaactgccctgaaatttctctttttcttgaacatggtttgaactagccttattatcatagtgaactttattactatagacagaaactataaacattttattgatattatactaacaatgtagcacttaaaaactaaggaataatttaagatgtaaaacatcaaatatgcaattaaactttgccctctttttgggaaaaaattcaaacatagtgcatgctggcttcttaaaagttgagtaacagaagtataattgccctttaaaatgactagctttgccttttctcctattattaaatataggtgactattttagagctgatgaatttgcagatcaatctcctggaaacctcagytcttcatccctcagaagaaagctgtttttagatgggaacggaagcatctccgactccttaccttyggcttctcccggaagtcctcacagtggtgttcaaacatcactagagatgttttattcaatagatttgtctcctgtaaagtgtaggagccccttgcagacaccaagttcggtgagaagtatactaaaaagcagttggctaatatgctgtcaagcttgaacccacattttgttgttgttctatcttaggctttcagcagcctgaagccatggttgctttctgtctctagtaaataagtggaaaagagggatgaggaagggsctttactggcctaaccagaaacagaaactaagaactcatgactgtattctctcccttggacacccctgtgagctgcccagattgctttcagaaggagggatggttgtcttttgagtattatgcttcacagaaactaactctagttcgtatgttatcattagtcatagggatgttttaggtcagactcttcaattttgtatttagatatgtacaggatgaccagatttatcatgagtctcaaggaaattcagcataggttatttactaaagtgtgtgagatttacagtataatacaactggcttggcattaataaatttaaaaatttttcacagatggttgcttagtgtgaaacttaatggtttgttcaaatacaatgtgtttatattttgactaacatatttgatactatttcasaatttttgtagcaatcttcttagttgtctttgttgcaaggtgtcttttggtggttctcgtgaactattactagtttataagtgtgttttgaagaccatgataaatagcatgcagcataagagttaaggaagagaaccatatacatttatttactatttaattttattacaggggcagttttcttctagccctattcaggctagtgcaaaaaaatacagcttgggaagcataactagtccttcgcctatttcttcacccactttctcaccaattgaatttcagataggagagactccactctcaggtatgtctcataataaaatacctarttaaaagttttatactatcaatatttgttattagagaggttcttttaatttgtcttaatgatagagctcaaaatgatcactaaccttctaacatttaggaactttgatttttaaataaaagaacagtttaccttcaaaggctggaattctcaccagtttgtactgtagtgttaaatatagttactttaattagcaatatttacatcaaacactatyaaaggaaatttagcaatttccatttgtgctattgtttttgacatcacaatttcactttggtaaacaacacaactgttacagaaatgcagtttttcctggcatgaaacatgattaccatttagtagtgacttttccattttcatgtttttatgatgtgattttttttcccttcccacctttcagaacaaaggaagtttactgttcattctcctgatgcttcatctggaacaaattytaatgggataactaatccgtgtatcagaagtccttatatagatggctgctcgccaattaaaaattggtctcctatgagacttcagatgtatagtggtggtactcagtatcggacctcagtgattcagataccttttactcttgagactcaaggtgaagatgaggaagataaagagaatattccttccacagatgtctcatcacccgccatggatgctgctggaatacacctacggcagtttagtaatgaggcttctacccatggtacacatttggttgtgactgccatgtctgttacacaaaatcagtccagtgcttctgagaaagaattagcactgttgcaggatgttgaaagggagaaagacaataacactgtggatatggttgatcctatagagatagcagatgagaccacttggattaaggagccggttgataatggcagtttacccatgactgattttgtaagtggcattgccttcagtattgaaaactctcatatgtgcatgtcacctcttgctgaaagcagtgtcattccttgtgaaagcagtaacattcaggtaaggtatttaatattctatagccccttcctcactgccttggtgttctttatcctttctaagattatagtataagaaagataatggattaaacatgagkactacagtattatataatattttttaaaaatattaataccaagtgatatgagaagagtaaatttattttaattatgacagataaggcatattttatattcacattaactgatatttgtatggagtaggaaaaggtaagagcagaaaagaaattagcctgctctagagaaatsaatcctgctagagtcaggcaggattcatcactgtttcatgtggatccagtcccccaaaacatgcaaggtctggtatagtatttgcattctaaaaataaaatcatttttgtttttcctttatgtgatttaggggggataaaaagagtttagagcactggttttttttttgagatggggtctcactctgtcacccaggctggagtgcagtggtgtgatcttggctcagtgcaacctccaccttctgggttcaagcaattctcctgcctcagcctcctgagtagctgggactacaggtgtgcgtcaccacacctggctaatttttgtatttttgtagagataggatttagctatgttggccaggctggtctcgaactcatgacctcagttgatccgcccacctcagcctcccaaagtgctgggattataggcatgagccaccgcgcctggccttagagttcttttatgtatgcatttttgtgcttttcttttagaaacatgatttatagcaacatttttcatgaaattatacatttccaattttgcaatgtctctgacaacaggaaaacctgattcatttaacagatacgtatacttcataattagcactttggaaaggcatttgttccattcattgttgtgttctttgagctgagaattttgaaggaacttctttagaagttctgactttagtcagaaggggatagcaataacatstaacactaacgtagcattactatgtgccaagtcctattctgagacctttacatgttttactttgttgaatttttacagcaatcctgtgaggtatgtgtactgttatccctgttttacagatgaggaaactgagggtcagagaggttaagtaaattacctaaagtttctatacaactagtaagtggaagagctgagatttgatcccagcagtctggctttagagtccatgttctttaatccaaaagttaatactgacttataataatagctaatacgcacatagtgttttgatataccaggcactcttctaaccactttattaattcatttaattctcacaccaactctataaggctttagtgttgtcagttttggcatgctgaagttaaaactcagggaaggattctaaatgacccaaaattaaatatagtattttgctcatatttttatgcttctgttgcctatcctgacttacagcttcattgctcaaaaaagattatactagaatcacttttacatattttagcttctctaaagttggtttcataaatagaaaaaagcacatataggcttaaaagtatatgccttaaaggcattgtttgctgcttttactctctgccttttttcactttctctctctctctctctcttctctctctcttttttatatagaggaattacaaaatacttttgttgaaatacaccttaatcatcatctaatccaactaacctttggaagccgtgggtagcatattctcccataattgtagtcactactaacttgtcaaactatctatgcttaattacacttgcagggctattccattcattttttaacttctcttactattacaacctcttccttctattgggtaaaaatatgttatgtgataccccccaagcagtctcagttttactctctgggccataacatcataatgtctactaaaaatgtttcatacattacatttctgccacatggttagctttctgctagctttctgaggaagagtacatttctaaagacattgcatgtgtgatcatgtgtccgtctctcacatttgagagttcagaaatgtccttcagagtttgaaggcattgcttccatttcagtgagagatctgaagctatttcagtgcttaatcttttgtttatgatctctttttatccccaactccctggacatggataggcatttttctttgtctacagggttctgaaatttcagtgatgtcctttaatgcgggtttctttccatccattatactcttcactcagaatgcccttacagtctgtaaacttactcccctcacttcttggatcttttcttgaataatatcttagatttctcctctgctgcttctagtgttctctctggagcaacttttgattctccaatttctaaaaatctttttttttttaaatctccttttttgaatttttgggcaatttcctccagtttatataataacctttctattgagttttttattttctacacttttgaaatgcgttcggtactaattttaaaagtctgcaatgtggctggcaaggctggtctttctactctccagcttgtttccttcattctctgtttaggtcccactagctttccaaagttttaaaaagccacgttttctcttgttacagggcctttttgcacatgctatgtagcatttctatcccattttacttagttaactcctatttatttttttcattgacaacttattgattacatcctcaagccttcccagatcacattagccaggccagacctcattatatgctttcatgattccatgcacattttgcattctttccaatcagaccactaatgcagcagtcatgcatgtttttatccccagtgcttattaaaaagaacccgtcacgtaatagccgctcattaaatatttgtgtaacaaaaacagaacgaatacgtaggttaagttcaaccagagggatggtatttactgagagtaacggggagccaggatttggaactctgargaagaattgagagggatcaggtaaaggaagtacagcccctgaaggagactgaaaagaaccagccaaagaggagaaagggacacttagaaagcacagtgtcatgaagcattttaagcaggaaagaatggttagcattgccaaaataggagcaagcaacattgggcttgaaaaggggctaatggactaataagaaaagtaattaataactgaacagcctcaaggtgaatggaaggaaggttaaagaagaagtaatgaaataacgtgtgtagataactctggagtttagttgtgaagggaaagaaaatgatacctagagaagagcatcaaagtcagatctttttgtagtttgcttttttactttgtttttacttaacccatttatgcctaaggttgcaattttttgaatttttgcaatcagaccttggcgatgaccttgaacaacagggtataagtaactcccacatgcttagtgttccagtaatggaacacagaagaaacagcatacagcatttaaatgaagagagagaagatttttaaaaactaggagttgggcagcataattattaatataattattaataggtatcagtcacatgtccttttcaagtaccagagaccatgccaagcattttacagtcagaagctaatccctgtaataccttacagatataatagatatcgtcatctgtcaaatggtgatctgttttataaatgagggaactgaggcatgcaagagggggtagaatctagaaccctgataggagtagccgcagtaactcctccatgtttaaaggagggcagggtgccaggatgggtgtgggtgcaaatgtatttagttgaggcgcgagcatggcattaaagaacatgggcttgggaaaccgtaatggcagatttcagtttatagcccagctctgttagctttataaatcccagaaagtgacagtttctttcagcttgtttcctcttctttaaatggggataataataggattacaggatattagcatgatcattgtgattaatataagtaaacagtgcctgaacactgttggtgggaatatgaattagtacagctattatggaagttcctcaaaaaactaaaaatagaactaccatgtgatccagcaatcccactagtaggtatatatccaaaggaaaggaaatcagtatgtcaaagagatacctgtactccagtgtttattgctgcactattcataatagccagaatatggaatcaccctaagtgtccactaatagatgaatggataaagaaaatgtggtatatatacacaatggaatactattcagccataaaaaataatgaagtccttacatttgcagcaacatggatgaactggaggacattaagtgaaataagccaggcacagaaagataaataccacatgtactccctcatgtggaagctaaaaaggttgatttcatagaagagtatagaatagtggtaggtagtagaggatgggaagggtagggggagcagggatagggagaggttggttaatggatacaaaagtacagctcgataggagtaattctagtgttctatagctctatacggtgagtgtaattaacaatttatcgtatattttcaaatagcttgaagagcagattttgaaagttcccaacgcaatgataaatgtttgagttaatggatatgctaattaccccaatttgatcattacatattgtaaacatatcaaaatatcatgtacatcataaatatgtgtaattgtgtgtcagtttaaaataataataaaagcaaaaacataagtagtaatggaaggcaaggtcctttgaatggtaacaaacaagggggactgagaatgatgagggaagggctaaagtgctgggcccagatgtcaaggaatgttatcacagggcacaactgttgccaattgaaagttttaaaagacaatgacatctgatttatgtggtagaaaaataaatttagtaacaaagtgcatgttaaatgactgacatagagacaccatttaaaggcaccatgacccaactggaatataaagtttgcaattagaaccaagtttgaattagagttcttttatttccaggctgtgggatcttaaggcaagatttacatagcagtgaatagaacatgactttttaatttttgtcccctcatccttcttagctataaagtgagattgatgcctgccttgatgcctgtgggggataacaaggtatctgttgcctggttggtacatattaggcattgacattagcagaagtctagatgagagacagtgaagtcagccaccatctcaacttggctctcatcaatcctgctcttcccatagtgtgggacaaactccccgcatgccttacttcctgctgtactaatgagtaactcttccctccatatatatccagttacatattagtattgcattataagccagctatttggcagtgatgaatattagaaggaagagctattggcagaatctctgggagcaatctgacatttatatttttgatcaagtagctattgaatgatagcagaacaaggcttttccccaaaaatgttacacatcacaaggcttttgttctaattggaacatgacctctagtagtaagcagatatgtatccagccttgaaatctgggaacattttttcaggattattaagtgataaagagtgccgtttctaggctagtctgtacctttgtgagggaaacaaaatgacagtcagctttttccttccctctgatcctaacttgcagggagggcttaaatgcaaaatgattcccttgtggattgctttctttggtgctcagcattatacaggtaaatggagcgttgtgcagtgaacagaacctggacttaggtctcacatcttcatcacctcatcactggatgacattgtgaaagttaagctttttaagccttaatttccttctctagtaaagtattagggttgttgaaaggagaaaaaaatattaaatatatagagatagtgcctggcctttttagacactcaataaatgtttccaagctggaagttcgctagaatctttcttttttgctcttttgcactgaaacagtgtatcttaggatgctacaatttttattaacatgaaaagctgaactaacatctagagccattatatatgtggcattattgtgaacaactaggtgtaaatataatataatccacttttttaaaggcagcatgcctcaagccatttagagacaagcctggaaaatgcgttggaaggtgaagttagttgtaatactcatttttgtctactaggtacgatcacaaaataacaggaaagcattgtgtcagtaggctgttcactgattcttaaggaagttacaagatatatttcattggaaggaattgtaaaatgactacaataatcagtactatgcaggactaccttttatatttgtgcattacttttgaattttgttcaacatgatcamtattacatgttaggatcattcagatgtagtgaatgagagtttatagtggtttacttatttaaatatttgacttttaagttcctcacaatatatttttttcttttttctcctgtcagatggatagtggctataatacgcagaattgtggaagcaatattatggatacagttggggcagaaagttactgcaaagaaagtgatgcacaaacatgtgaagttgagagtaaatctcaagcatttaatatgaaggtacggagaaaatatagtgaaagcttaatattgtttagattagaaatataaaataattttgattattagacaatagtactattgagaaactatatgaaatttaaaacactaaaaggtaagcctgttttcttaacatccaataacctttaaatattttggttactctgaatacacaagtatcttacatactacaaagtgtgcaaaggtagcgtgtatttgatgagggcatttactgaaccttccaggtggtggttatatattcatacttgaagaaactcatcataatttcaggcactagtcaggacagtctttaattttatgtgccaattttttttgcattttatttttttgtagagacagggcctgctgtgttgcccaggctggtctcaaactcctggtgtcaagcagtctttctgcctcagcctcgcaaagtgctgcgcgattacaggcatgagccaacatgcccagccttgtatgccgtttcttttttttctttttttttttttttgagacagggtcttactctgtcacccgggctggagtgcagtcgtagaatcagatcactacagcctttaactgctgggctcaagcaatcctcctgcctcaccctcctgagtagctagaactacaggtgtgaaccaccttgccctgctgttatatgccagtttcttataaaatactataaatatcagcaaatgtgcaacaaatgtttaatagggaggccaccttagttttcctttctgttgtatgtagtaggagcaaactgcctttctgttgtatgtagtatcagagcaggtctcttctaatattaacctgaacaaaatccatcctatttcaggatgcagttgtctatctaaacataagtagagataaatgaaggatttttttaaattttattattttattttttttgagacaaggtctcattctgtcacccaggctagagtgtagtggcacgaccacagctcactgtagccttcacctcccagactcaagcagtcttaccacctcagcctcctgagtagctagggctacaggcatgtgccaccacacccagctttttaaaatttttggtagagacagggtctcactatgttgccagggctagtcccaaactcctgggctcgtgcgatcctcccaccttggcctctcaaagtgttgggatgctttttgatgcagaatattgatttataaaatactgtatctttactgtcccttcagagttcagctaaagaaacgtgcttttaggttttaaaaacagtcccgataattgcatcctccagtggtcctacttaaactgaaaacaaggtattgtcttctttttcacagcaagaccacacaacacagaggtgttggatgaaaacagcaagcccttttcaatgcagcagtccatagaatrcctctgtcagaatcaaagactaagcttaagagttcctcgcatatatcgttgtgcacaggatcaacatgatggtgactgggaaaaaattacttcaagtaacatgcttagctttccctccttaatgtgaaaaatcaagggcttactgacataggaacaacagaaatgctcctggaacttcaagttgctgaattataagtttattttttatcaataaatatttttatacttacattgagtgatgtgtttaacaacaaattgtgacagagctgagtgctcctatcttacagggtcaatgaactacttattaagccttactggtagcactgaatttagcagttctgagaacatgtgaaactatgttaaaactgaaggcactatatatttttacataaaagcttgaacatacagatgaattataacctatgtgaagaaatcttagatataaaactaacttttcaaagatacaaaagaaattaaacaggtttcctgaaattttagttcttggtctgttcacctctgtggggaaaattcttagttccagtgataactgttctagttactacttttaagtatgtaaatactagaaaggtagtactagtgacatcatcacgtgtattgttatctatggggcaaatgtgtggtgcccagaataaaatatacctcatgcctagggtagggacatcctttccagctcaaacgtgggtagggatgtgggagaataagaatgtgggagaaccaagagaaaaagtggggctgggagagtggagttcccgtagggcataggcctgtgaagtaacactggggcagatatgtatgttatatacaactatttttttaaaaaacttatatccatgttgggagtagatgggtatataacagtttggaaatactatctttggagaatgtatttttgtatttataaatcaacttttaaaaactgtctcattcaaaagggaataaagacctgtgttatcaatgtgtcattttcttctttcctccataactgtaccttgaaaccttactgctgacctgcagaaaatgtgccgcgttatgtacctggctcatcttcaacacactaaccatgaacactaatagccattaggggacatggctacagatactacattggaaagttgtctttaatcacacaggtgttaaactcaatataaatttacctaaaaacaattgctatacctaaaaggagttctgggtactaagggtagaagcctcactggctacagttttttaatagtacaaaagtcaagaaataacacaatagtgactataacctgtattcaaatccctactctgtcactacttgatctgggctgatatggtatggctctgtgtcctcacccaaatctaaccttgaattgtagcaatccccacgtgtcaagggtgggaccaggtggaggtaactggatcatgggggcggtttcctccatgctgttcctgtgatagtgagccggtctcatgagatctgaaggttttataagcgtctggcatttccactgctggcagtcattttcatcctgccgccctgtgaaaaaggtgcctgcttctcctttttctgccatgattgtataagtgtcctgaggcctcaccagcaatgcggaactgagtccattaaacctctttcctttataataattacccagtttggggtatttcttcgtagcagtgtgagaacagaccataaacctccattttctcatctgttaaatggagataacagtcctggcttaacagggctttttgagttaagtgatatattccacgtaacctgcttagcataagaactggcactagaaacagaacattttagattatggaatagaacttaggggaaaatagcaaagtctctgatcatcttgaactactcaattgggacttatccctgaattaaacctttctagtagctgaagcacaagaaaataaacttggaaagaaaaaacctaaggccagtcatgcactgccctacttccctttcttctctattgcaggttaactatggcctgtaggcagtttttcttctttttttttttttttgagacagtcttgttctgtcacccaggctggagtgcagtggcgcgatcttggctcactgcaacctctgcctcccaggttcaagcgattctcctgcctcagcctcctgaggtgggattaaaggcacttgccaccacacctggctaattttcttttctttttttttttttttttttgcgatggagtctcactctcatcatccaggctgaactgcagtggtgcaatctcggctcactgcaacttccgcctcccaggttcaagcgattctcctgcctcagcctcccaagtagctgggattacaggcatccgccgttacacccagctaagtttttgtatttttagtagagacggcgttttaccatgttggccaggctggtctcaaactcctgacatcgagtgatccacccgcctcgtcctcccaaaatgctaggattacaggcatgagccaccgcacctagccggcaaacttttttaaatggttggcgggggtgggggaaatcaaatgagtaatgttttgtgacacatcaaaattataatgacgtgctgcataacttttggtcaacaatggccaaatatacgatgatgatcccgtaagattacaatggagctgaaaaattcctattgcctggggacacagccatggtaacatcatagtgaaattactttatgtagcctaagtatatagtgtttataaaagtctacagtagtgcacagtaatatcatggccttcacattcactaaccacttactgactcacccagagccagcttccagtcctgccaacttgttcatggtaaatgtcctaaataggtgtaccattttatatcttatatatatctatatatatatttttactgtaccttttctatgtttagatatgtttagatacacaaatacttagcactgtgttacaactgcctacagtaatcagtacagtaatatgccatacaggtttgtaggttaggagcaataggctatcccatataggataccatagggtataccatctaggtttgtgtaactacatcatgattttcacacaatgatgaaattgccaagtgacatgtctcagaacatatccctgtcattaagtgacatatgactatatatgaaacttaacaaatcaggccttgttgaaacacagtcatgttgatttgtttacatattgtatatggctccttacacactatcaacggcagagttgtgtactatagttgcaatacagaccatagccaacaaagtctaaaatgttctagcacttcacagaaaaggttttttgactcctactctactgtttcagtgtcactgacccattttacctggaccaaagactactcaagtctattttcctccaactgacacaagtttctgcctcagtgtatggaggttttcctcagtaataggaaactggaaaaattagtcaacatttattgagtgcctaaatgactacctatttagtatacctgctgatttacttggcaggcttttctcactatactgcaagctccttgaaggcagagatagtttacttgagtggaacctggcacaacgtaagtgctttagaaattgaataagccaagtaaaatgttttaaggcaaccctatcccaaaatattcctgaagatattaatttaatcattactaatctctgtgattagcaagggaagtagtcagtctggcacaccaaattttattaataatacttattttaatctgttccctttagtatgtctttatacagttcccctcgtgtatatacactgatataactacaatttaaaagccactaattaatctgttttttattttgtaagtaacaagatatagacatttgaatgccaatgtcttattctggagagacactggagctgaagttcaacaatgatcacacttattacctggcaataaaaacacaaccatctttccagtcaggtcaaaatatcctactttttgcctttctaccaattcccaaacattcacagtttttcaaggaccactaataaaatacaggaagcttttaaagacagtaagagaacacctagtgtaagttaggtgaattaaagatggcaaaggagattacatcctcaacactgacagcttccaagacttagaaaagagattgttccttgcttctaaaattgttctattttcctctgtaggaaaatgaaagttttttcttacaaatattaaataatcaaagtacttacgcaaaattaatctgctcctcaatgagatgagcactccatttaaatgatctttacagatccctgaagttgctgtcctgtcactgtatttaagtgatggatattcaattgaattattctgcataaataattctgttcaacccagaagtatagtagtatgatgggtcagatacagtcaactgttcaataaaaatgcagatgtctgaaattattaaaatgtacttaaaagtaacaaactgtatcacacacttaggcttagaagtgttctttcaagttttttcttttaaaaaagaaaccagtctttgaagatttttgttgaatatagctattttccaagcttcatcttctttttctttggtccattaaggtccatgtttgaagtatcagtaggaatgcttattcctggtatctaaagtaatgcaaatggggggaaataaggtgatttaaaggatagaatacatctcaacctcatcctccccttccccactgccagcttcaaatttaaaaggatgtagtggtagggaggggaaagggggctaattaaaggttttatacacagaaggtattttacaaagtagcagtggttcaaaaatgtaaaagctagacatggtctcaacaggtgagaagcatgtcatttaggaagtgttctttttaactacaaaacagccttcccaatggggagccactgtgattgacagaatcagagttgatttcaagtgtgttggggaaggacaaaagttaagaaccagtatcttaggtgaaacacctacacttcatcttcaaaatgcagagttcaaaacttctagatagaaaagactaggcaggagaatggaagacctttttattttagcaccaaagacctgaacagaatctcagatgtctagaatcccgtggcctaaagaaatcagtgagaaaacaggatttgctatgcaaatatttggtttctacactacttacagggttccctctaacattaaacagaaataactacgtcccttctttgacaaaatatgtactgtttgttccatcacaacaaggaaattttaagtttggccttacctgtggttctaccagggacattcggatcttctgatgttgaagattagatgagtctaacatgattttcactttaactttatcaaatacatggaacactgtatcttctattttaagtgagggtatctaaacaaaacacattttatcattcttaattgcttccttacatttgaggctttgttctaatcctttacaatttatcttacatagtagaagtttaaatataaaaattagtaagcatctacgtgttcaacataacaaaggccacaaacctagtagtctcatataaatatgacctacttatgtgcttactttctccttcattaaggtatttctaatatatatgttcattaaattcttggtgattaattaatcaccccactaataaataggaaatttttagtctagtagaggaacacaaaggtattttggccagtttattgttcaaatattctctcagggctgtggttctcctaaggagaatagggagtatgtgtgtcaaataagaaacactagaagtaagtttaaaaaaaaagttccttccccgagttataaagagtcatttattgttccatgtagggcaaaactttacatggtataaaagaaagaaatcaaagacaacaattgcatatgagaagacatatagtggtgagaaattgtgagtaaaaccatagtttagttggcaaaattaaatgtagattttctggcatgtatttggatatcaggataaattcttcagggtacaaaaaataattttatgctttataggtaccatttatgaactctcaaagaaaaagtgccccccggaaaagaaaacaaacatgagaaataccgtacctcatcatcataaataagctgtgggtttggtttgtccttttcttcaaaaaagactgtcccttctaaaccatactttggaattaataccacaatggcattctttcttacaaataaaatataggcttcttcacttactattcctttgcttttgaagaataactgtaaaataacatacaacttatttaaattgtcttaaaaatttttaaataaacaaaaaattgaaattaaattaaaaatgaacaaaacttcattttttctagcagtatcgacaaaaggcaaatacctgggtatgaaaagccactgatgcacgttgggcatattgagccattttgtgccggaaatttagatttttacatatatctgcaagcttgtgtttgtctgtcaactctggataagtacagtcagccccaatagccacagccaaaagccgatgaacaatgacatctgcgtatctagatagatggaaaaataagaaccatggtatgtcagtactaatatgtgcttttaaaattcaaaattaaccattttctatctcctttaatttcataaggaaaaaataccttctaatgggtgaagtaaaatgtgtgtatattggagacgctaagccatagtgatgaaaatcattatccattccagaacagaagtacacagcttgcatcatacagcgagtggctaatattctcaacagagtgt

SEQ ID NO: 93888 - DNA, 15021 bp, Homo sapiens
aggttctgagacacatgggcacccagaaccccttcccacagagccagggccagggtgacaatgggccacttagccaacagcagcctgagggaagagaaatgatcccatggccgctggccctgatggaggaccaggcacctctgacagatcctgtgatacccttcgggggctaggccctgtaggtgggtcctgaggccctgagactattgcaggcagccaggcagttcagtcctctgccagggggaaaggctgtggtgaccacaaaggcaagccccagcatctcagagccagcccaggccacacactgtgctgaccacgactgaggtgttgcatacctggttacatctccagggtctaggatggaccttccaggagaggatacagaaggaacacaggatatcagactcgaatcacctgcttggtcaggtacccctgtcaccaacaaaacaagccacttagtcacagattcccccagctcattcccacactccctttcttcttggagaggagggactgcagcaagtttacatcaaccaggacttattgagggaacacagtaccagcctccaccagttactgagtgagacccaatcccgacatatcgtaatcacagcactaaatctgaagctgtcataatcacagcactaaaatggaggtcagtcacactgagactttgaggggtgtgttgatggggagaaaagacaagagacaaataatcccaatatagtgcctggctcccagcaagagttctataagcttgaaatggaatacagagaggaaaagaagggacaggagaaggagggaaagagggggaagtgaggaaggaagaagggaaggaaagggaagggaaattactaggtgatagtgatctaattgcaatttcttgcaatgctttaggtgtcgacaggaaacgctgtgttctgatgtaaaatggccacacaacaccatactctacaagcgcacataactgcaggcacactgctatacgcacaactgcccatagccacttctacctgggtagacagcctcacactatagtctcaactccccaattctccactggtctacaggacttgtttaaaagcacccctccactcctgtccactccccactcacccaggcactaggaaggcccccccaccccacagccttcatagcccacagccactaccactccatactcagctcgcactcagatgcgcagccacacccccgggggtacagccagacacacaagcaagatgccttgtccccccaaagattgggagaagctggaaaggacaaaagggagggagacaaggaaagaagcagaggagacactcagcccaaaacactagatgacctatcagccctgagcctgcttccctgaattgccaggagcaaagagaagaacaattccttatgggagcaggcgtcctcctcctggaagaggccttatatatccaggttcccgagcaagcagatgtctgaaaaagtaatctgaccctctgcgtaatctcaagggacacttcctagttctgttattctctggttccttggagaagggcaaaaataatacatatcatctcatgtttgaaacaccttactgacactaccatcttgttataaccatgtgtggtactttgaatccattacctcaacttacgcaacttggcttgtcattgcattctatgcaaacttggctgggagaaaagaggtctgggttccagttctctggaggtcatttaaactcctcctgtgccaaattcctcacctctaaaaggagaggacactctaggtgatgcctgaggcccttcaagttctaatgtcttaggcttctacccatctagaacagtgcttccaatagaaatatcatgtgagccacatagataattttaaattatctggtcaccacctaaaaaagttacaagaagtacactttgggcagatcacgaggtcaggagttcgagaccagcctggtgaaatcctgtctctactaaaaatacaaaaattagccaggcatggtggcacgtgcctgtagtcccagctacttgggaggctgaggcagaagaatcgcttgaacctaggaggcagagattgccgtgagccgagatcgtggccactgcactccagcctgggtgacagagcaagactctgtctcaaaaaaaaaaaaaaaaaaaagaaaagtaacaagaaataggtaaaaataattttgataatagattttatttaaccccatatatccaaaatatcagtatctcaaccactaagcagtgttttaaaaaatcttttgtttttttgagatggagtttcactcttgttgcccaggctggagtgcaatggtgccatcttgactcactgcaacctccacctcccaggttcaacggattctcctgcctcagcctcccaagtagctgggattacaggtacccgccagcaagcccggctaattttttgtatttttattagagacggggtttcaccatgttggccaggtggtctcgaactcccgaccttgggtgatccaccccctcattggcctcccaaagtgctgagattacaggcatgagccacagggcccggcctgttttaaaaattataatgagatattttacatttttttttccttctacgtcttcaaaatccagtgtgtattttatacttacagcacatctcaattaagatgctaaattttcactggaaatacctgatctgtttttagatttcataaaatttgcagttgtaaaaggtatgacccacatacctaaattgttccaaatacatttaaaaattttttccaataactgaatcaagcattaggttttccgctctttttagttgacaagtaataattgtacacatttatgggtacagcatgatatttcaatatgcatatttagtgtacaatggccaaatcagtgtaattagcatatgaatcacctccaatatttatcatttatttgtgttgtggacattcaaaatcctctcttctagctttgtgaaaacatacaataaatgacagttaaccacatttaccccacagtgctgcaggacaccagaaccattccttctatctaatattggtttttaaattaaacttgaattaatatacaattgtgatcttctcttgcattagtcacatttcagggacttcactgctgcacgtggctttccatagtggagatcgttgcatgggacagtggggaggggtcccgtaggtgtgacccttcccgccctgctcacagccccaactgactgctagttcagagtgagagtggacaggtgtcacagccaatgtcaagccaggcaacacctgcttggccacttcattgtctgcgtaccaaggagaagccaaagaagggcaggcctatctggtccgtgggcacagtccccagcccctttccatggagctgctgccaacgtttccrcaggcagaggccatgtttccagctcagacgcaaaggcatggggaggcggcaggcatctgagcttccttttcttactcaaaggaatgcccaccaggcagccagccagggcacagcccagactctacgtgtcactttggggatttgggctttattagcacaagtcagatgcagtgtgataggggcggtggtagtggtgagcaggcagtagggacaaagttccaggggacggtgggggaagcattagcactagcaaacaaggtcaagagaagggcatatctgctctaccaagggtacagggagagttcatagatttcagaaatgtcacttggaaactcacagcactgcttgaggggaagcatcgaaagacactgccaggacaatccttttatgccttctggaactgtggagaaacgttacaaccagcaagggctttacactttaattttttctttttaatagagatacgattttgccatgttgcccaggctggtcttgaactctgcgctcaagcgatccacctgcctcgacctcccaaagtgctgggattacagacatgagccactgcgcctggccagcttcacgcatattgttataatcttcatggacaaatcgaaactcaagtaacttgcctaaggcttttcatctacaaagctgaaatttaaattcaagtctatttgactccaaaggctgcaccaaagatttaatactaataacatttttattattattattatttcagatggagttttgctcttgttgcccaggctggagtgccatggcgtgctctcggctcactgcaacctccgcctcctgggttcaagcgattctcctgcctcagcctcctgagtagctgggattacaggcatgtgccaccacacctggctaattttgtatttttcatagagataggttttctccatgttggtcaggctggtctcgaacttccgatctcagatgatccacccacctcggcctcctaaagtgctgggattacaggcgtgagccaccacgccccgccaatagtaccactgttaattagttattaataatatctaataataacaggttatgtttattgaatgatgccatgtgcctgacaccatgccaggtagtttatagacttgaactaatttatactcacatttctgtgaagtatgatttcatacccatcttacaaataaggaaaactgagtttcacagaggtcatgtaacttgtccaaggtcttgaaatttctaagtaatagaacagattcgagcctaacttccaagcacatgagcttagccttgatgtactgcctcttatgggaatacttatggtggcagatgctgctgatgtcccacactgtatcttcttggtccacatctgagctcactacagcatcccacctcaagtgcctgcatctctgcttctctgcctgaaggctttcttgggcacctggggagctgtgggggacttagcacctttggacatgcattagagtctgagagctgctatgacaatgttccataaatgggttggcttaaaacaacagagatttattctctgacagttctggaggctagaggtctgaaggcaaggttgataccttggtggttgataccagcaaggccacactttctctgaaggctcttggggaaggtcctgcctcacctcttcctggctcttgggggttgctgaaagtccctggcagtccttggcacgtggcagcatccctccaatcctgcccccatcttcacatggctgccttcctgctgtatatccctgttcttgtgtctcttctcttctcaaggataccagtcttattggattaatggctggctctactccaggctgacctcagcctttttttttttctgttgaggcagagtctcggctgtgtggcccaggctggagtgcagtggcacaatctcggctcactgcagcctccacctcccgggttcaagcaattctccggcctcagcctcccgagtagctgggattacaggccccgccaccatgcctgagtagtttttgtatttttagtagagatgaggttttgccatattggccaggctggtctggaactcctgatctcaagtgatccccctacctcggccttccaaagtgctgggattacaggcatgagccactgtgcccagcctgacttcatcttaattaattacatctgcaacaactttatttccaaataaggtcacattctgaggttccagaaagaacatgacttttgggggcacactattcaacccagttcagggggcagtcttcagccgacgagggaggtgagggggtagccaaatgctccagccaccccatcctctggtggcacaattcaaaggcgtgttccacgtgaattcccagaggttccccagtgagactgaacctcagctgcccataagagccctgctcattaatgtacccattattgacttttcttatttccctgtctcactttccctacttcttcatttgggcttcctaggatcaccacccaaataaactacatgtccccaggttttttttttgggggggggggcagggaattcaaatgcatgacctatttttggttaaaagtgaaaagagattcttgtcttctgtccaagttggtcacttccctgcgccaaagtgaacagtagccaacatgtcagggtgggagttgtattacaaaatcgagggcgatgaagaagcagaagaagaagaagaagagaaccttgaagcaagtggagactataaatattcaggargacatagtttgatttttttggttgatgcctccagggctatgtttgaatctcagagtgaagttttgattccttttgacatgagcatccagtgtatccaaagtgtgtacatcagtaagatcataagcagtaagaaagatcataagcagtaagattataagcagtaagaaagatcataagtagtgagatcataagcagtgagatcataagcagtaagatcataaacagatcataagcagtgagatcataagcagtgagatcataagcagtgagatcataaacagatcataagcagtgagatcataagcagtgaggtcataaacagtgagatcataagcagtgagatcataaacagatcataagcaatgagatcataagcagtgattgagatctcttggcagtggtgttcyatggtaccgagaaagacaaaaattcagtgaattttaaaaatatttacgtcttacaggagttggataatccaagtgcaaaacaaattctagagcttgaccagtttaaggggcagcagggacaaaaacrtttccaagacctgatgggccacggatctgactactcgctcagtgaagtgctgtgggtctgtgccagcctctttagtgatgtcyggttgaagatgagtcatacgaggatcatgctgttgaccagtgaagaaaacccccatggcaatgacagtgccaaagccagccaggccaggactgaagccggtgatctccaagatacaggcatcttccttgacttgatgcacmtgaagaaacctgggggctttgacctatccttgttctatagagataccatcaacatagccgaggatgaggacctcagggttcactttgaggaatccagcaagctagaagacctgttgccgaaggttcacgccaaggacrccaggaagcaagcactcagcaggttaaagctgaagctcaacaaagatatagtgatctctgtgggcatttgtaatctggtccaaaaggctcttaagcctcctccagtaaagctctatcaggaaacaaatgaaccagtgaaaaccaagaccctggccgggtgcgttggctcrcgcctgtaatcccagcactttgggaggccgaggcaggcggatcacctgaggtcrggagttcaagaccagcctgaccaacatggagaaaccccgtctttactaaaaaaaaaagacaaaattagccagtcgtggtggtgcatacctgtagtcccagctactcggaaggctgaggcaggagaatcgcttgaacccgggaggcgaaggttgcggtgagccgagattgtgcattgtactccagcctgggcagcaagagtgaaactctgtccaaaaaaaaaaaagaaaagaaaaacagaaaaaacaaagacccggacatttaacacaaatacatgcagtktgcttctgcctagtgataccaagaggtctcagatctttggaagtcatcagattatactggaaaaagaggaaacagaagagctaaaatggtttaatgatccaggtttgatgctcctgggtttcaagcccttggtaatgctgaagaagcaccattacctgaggccctccctgttggtgtaccctgaggagtcgctggtgattgggagctcaatcctgttcagtgctctgctcatcaagtgtctggagaaggaggtcatagcattgtgcagatacacgccccacaggaacattcccccttattttgtggctttggtgccacaggaagaggagttggatgactagaaaattcaggtgactcctccaggtttccagctggtctttttaccctttgctgatgataaaatgaaggtgtcctttatgtatgtatgtatgtatgtatgtatgtatgtatgtatgtatktatttatttatttatttatttttgagacggagtttcactcttgttgcccaggctggagtacaatggtgcgatctcggctgactgcaacctctgccttccgggttcaagcaatactcctgcctcagcctcccgagtagctgggattacagatgcctgccaccatgcccagctaattttttgtatttttagtagagayggggtttcaccatgttggccagtctggtcttgaactcctgacctcaggtgatccgcccgcctctacctcccaaagtgctgggattataggcataagccacyrcgcccggcgaatatgccctttactgaaaaggtcatggcaactccagagtagatggacaagatgaaggckatcattcagaagctccgcttcacatacagaagtgacagctttgagaatcccgtgctgcagcagtaagtacttcaggaacctggaggccttggccttggatttgatggagcctgaacaagcagtagatctgacattgcccaaggttgaagcaatgaataaaagactgggatccctggtggatgagtttaaggagcttgtctacccgccagattacaatcctgaagggaaagttaccaagagaaagcacaataacgaaggttctgggagcaaaaggcccaaggtggagtattgagaagagaagctgaagacccacatcagcaasgkcatgctgggcaagttcactgtgcccatgctgaaagaggcctgccgggtggatgggctgaagagtgtgctaaagaagcaggacctgctgaaagccctcaccacgcacttccaggactgaccagaggccgcgcgtgcagccgcccttccacaccattcccaggctgcctggccttgttctcagccagttaaaatgtgtttcttctgagctaggaaggactttaagtttttgaggctttctgttgccatggtgatggtgtagccctcccactttgctgttccttactttactgcctgaataaagagccttaagtttgtactattaaaaaaaaaaagttaaaagaaaatgagcctcaggccttttgtctgttcagtatgccttatcacaggcagccaggaggcttttctagggtcctgtaatgatggtttttgctccatgttggtttaagcaggtttctgggggcccacaacaccttggatgagtaggtgggagcctgctagggagggctgggttgggaaagtgggatatatacctgtagctggtgctaggcctgtggctttatgtagaatgactttgctgacttgtgtcattgaggttgacgattttatcagttattcacaagaaatagtataaacgtcaagaagtgtttctcaaaccaagggaatccaatatgatagcaactgagggaagatctagggaaggtggaacatagcgtggtgataatgtcaattgggaatttctattatctaatattcatattatgccatatcatctatagcatccaccagctctgtggttttgttcacaatgggctcatccatcacctagttcaacatttctcaaatgtatcttgccagatgctcctgagaaaaaagtttctgtgatccaatcacgtggatgaatgctgattactattcactctttttgaagaggcacagtccatattaatatattaaaagttttgaaaattttgctgttgaaattcaaatccagtttagcattgcttcccatacttattttgctatggaatctcttcctcatgtaatacctatttaatctatcatagagctggtattccacagaatccactctgggaaaccccaatctatttaactagtgtgggtgcaaaaatgtcttctgcagcccacaggacttcctttgcagagtgtgccagggcacaactgtccttttttgtccacacctcacccccaatctccaacctcccttcctcctttttgcttttttctccatttgggtttaggtcacatggattcttggctgtgggctaactcctccactgccattgccttgacacttaagtcctcttatctaagtcctgcttggggaccttggtccagcgggggttcggagcggctccctcatccctatctcttccaggtactaaaagggtctggggaccctccaggagacagacatctacaaggaaatattctatcaccaaggagcatccacaagcagccagcatgattcagatcctcctacttggctagggacactggaactactttccaaacgtggggtctgttgtgggtttaattgtttccccccaaaatttgtagatgtaagtccttaccccagtacctcagaatgtgaccttcttcagaaacatagttgttgcagacataagtgattaagatgagatcatactggagtagagtgggcccctaatccagtatgactggtgtccttatgaaaagggggaatttggagacaggcgcgcacatggggaaagcaccacatgaagacgggagcagtgcctccactacccaggaactaccagaagccaggagtgtggcttggaacagatttttccttagtgcctcagaggtagcacagccccgacagcagcttggtctcagacttccagccccctgaatgtgagagaatcaatttctgttgtgtaagccactctgtgtgttgtactttgtcactgcagccctggcacactcgtccatgggggagaagtctctgcttcttctcctctggattcaccagcagtggttcctgacccagctccctcacagtgggaggaggtggagatattggagctgatgtgcagagcctccccagtcccaggccctctctttgttaggacgtgatcagttctcatggcaccctggtggctgtgtggatagactcaggacccctcttctggcagaagtgtttgtgtccacttcttgagttccacagtgtctctgacctctgatgatcatagtcagtgggagtggtactcccagcttccctctcaggccccatgctcagactgacccctgaccaagcagtgaggatgtcacctggctgggaaagcatcactgacagggacaagccaaagtcctacccagaggcagaacgtgagatcccgacccctttgggatgcagtcaaagctacaggccttccccgccactcaatcatgctgcttcttctgcattctgatttgttgccgtggagagaagcaggatgcggccccctgtatccaacaccaacaaaaccactgtatttgataattattaatcagatagacaaggggtttcttaatcttggcactattgacacttgagccagataattctccttgtaggggctgtcctgtgcactgtagatgttcagcagcatgcctgcctcctacccacgagatgccagtagcaacccccgcaaccaaaaatgtctccagacatttccaaatatccccttgggggcaaaatctcacacagttgagacccactgaaatagatcaacctcaatacactgatgctactctgaggtccttccaatccaaggtcatttcattatttcaatgattttaggtttttaaaatgtatttactattgcctgatctcaattatacaagaaaaacctacaaaaaaaaaaaagactagaagaaaatgttaatgcatggttgtctctgaacgctgggtagtgaatttgtgagtgaattgtctttctatttttctgaatgtttcttttatttgctatagtaaacatgtattagcttcatacttgaaaataatctatttgactagtgacctaggtattttcatgttaaatgcaataataagaccctattgcacacaggattaaaaaactggttgagtataaccaaagcaaagtgataaaggagaaagaggcacagtttaaatcctggcacttctactcacttaactagccatgggcatgctgttaatatctgccctgctaggccgagccaaggctgagtgtgggaatatttgtaaagcatctagaatagtaggggttcaatacatggtggctcccacagttattaggctcccttctggttcaagactcgagggccctcttcatcctgtgcctgtggtactgcaaagtcctctccatacagagttaccagcatggatgtggaaagcccaggaaagccttcctgggtaagtgggtcctttttcccaacccttccagactcagggactcttctagaagaagaataatggcaattatcatttatagtattattattttatcccacagttttcacagatggcccttcttcttctcaaacaccctatgaggtaggaataataatcctcttttcagagatggaaaaccaagctcagagaggttatgcaacttctccaaggctgcacagctggtaagcaacaagagccagcatcaaatagtccaaccccctccaataagcaataaaattgaagctcagagaatgaagtgacttgtgcccaaagtcacccaggtaataatgtctcaaagaagagccaggctcatttccaccttcacagcacatgcacaggcagctccgatttgagggagaagagagaggatgccaatttcgctaaacaacatcacagtttagaaaataaaatttggagccagacagcccgagttcaaattctagttctatcccttgccccagctgtgttattccgagcaaactacttcaagtctctgaattttcatttcttcatctccaagaagaaaataagatatttaataacaaataatccacatacgcacttagaatataataagcagtagaaaaacattaggtgttaacaaattttgcacaatgagctactaagaaattaggcagtgactaaatcttttgttccttttactgccaaaaagcatttttcccatgatttaaagtaaaccactatcactgtgaaaaatttgaaaaacagggataagtataaagggaacaataacaatcacctgtaatggcaactaattaaaaacaaccacaaaaagctctttactttgggaaatctcaaacatataaaaaggaaaaacggatagtatagggaacctccatattcccatcactcagcttctttaaatactaacttttggccaatcttatttcatttatagccccatctgcctctctcccatttctaccttcaatcttttgtggcaaatcccagacattatataatttcatttccagatatttcagcatacatctctgaaatatacagattctcttttcttaaattataattccaatattataccttttataattaataatgtttaatattatcatattaccaggtccaaatttcccctaattgtctcataaatattagtttgtttgaattgggacccaaattgcatccacatgttggattggttcaggtttctcaaatttcttttaatctatagattcctcctccatctcttcttttctccttgtaattcatttgtttaggaaattgaatcatttgtcctatagagtttccatagcctggattttgctgattgcatccctatagtattagttcacatattccctggactgtgtgtttcttgtaaattagaagttctatgtcaagaatacattatagatgatatggtggacttccactgggacacatgtaatgtctgtctcttaatctctcactttgagaagtgaacagcctttgatgatcatagcccagatccacaaatttcatcaggggttacaaaagagtggtgttttaaacctatcagtactttccatgtattagctagaatgtttctacaaagaaaaacttacctcattgtgagatatagttcacctaggaaaagcaaagtaaatgcttatttatttatttttatttttttttttttttgagacaaggtctcactctctttcccaggctggagtgcagtggtaccatcatggctcactgcagcctcaacctcccaggctcaagcaatcctcccacttcagcctcctaagtagctgggaccacaggcgcatgccaccatgcccagctaattttttttttttgtagagacaagctctcactatgttgctcagcctggtctcaagctcctgggctcaagtgatcctcccgagccactgagcccagcaatacttgattttttgtggccaactttcaaaataaagatgcttggcatcaaccaaagtgaccaatgagttttgttgttgttttgttttgtttttgtgtcattatcagttgatagttatattattaactcagaaacattaaacatagcttacatgttttagtccactgtagaataaattattaaaactcaaattatctgaagtttttcttctttttctttgttattaagtagtatcgggattagttgatctttagaggtctgctggaattttcctgagaaactgttagggcctggtgctttttgttggtgagctcttcatttcttctatggtaattggtctgttaagactttgtgtctctactgagaccaatttaggtaagttgcattattctagaaaattatccatttcatctaagttttcaaatattttgcatagagttgaaaaaaacagtctcttatgtttttagtttggatttcctctgctttgatggtcctacccatctacccacacacagtatttctaatcttgtgtgtccatgcttcctctcatttatcttcttgaccagtttagttggtgctttgtatattttgttgattgtttcagccttaggtttatttttaagttctactttctagtttattaatttttgctttcatctttattaattccttccttctagattattttggcgcactctgtggttcttttcttgctttttgaatggggcatttagttcacttattttcatttttactgatatagatatttaatgctaaactttttcctttattaattgcattagttgaatagcctagacttgattatttgtgtttccattatcattcttttccagaaattctataatttcaagttgtccttctatctctaacagctgcttagtaacatgctttttcctaattttcagatacagtagtcttttcagtttttttttttcctt

SEQ ID NO: 93889 - DNA, 61741 bp, Homo sapiens
tctgaagagacaacagccaatttctgcctttttcttattggtcaaaaccattattatctggctactcctaactgcaaaggagactggaaaagaacttttgtagcctctatcatgaaaggaacaagggagactgggttagaaatgtcttgtgggttggctaacagcctttgctttagacagtaagtaagaatacttgaaatcagagcttggttaaacaacagagttcatgtttttactttctagcttcttagctgtgtgggcggtacatgaaaacctggagtgtaatcaagcaaattcctgacattatatcatttcactccaaaatactccgatatgtatctccggcataaaaaacctttaaaaaagtaatatagtggccaggtgtaactccagcactttgggaggctgaggcaggaggatcacgaggtcaagagatggagatcatcctggccaacatggtgaaacctcgtctctactaaaaataaaaaatttagccaggcgtggtagcgcatgcctgtagtcccagctactcaggaggctgaggctggagaatcacttgaacccaggaggcagaggctgcagtgaactgagatcatgccactgcactccagcctggcgacagagcaagactctgtctcaaaaaataataataatactaatatagtaataatgctattataacatcagacaacattagcaataatacctcattatttgatattaaaactatgaagaacttatgaaatatgggtgcagctaactccttccatagaaacattcaagtctgagactttcaaagatgctgataaaactagaacattttttaagaaacagcaaaagatattgcccaaatttcaccaagaataatgtttaattcattcattcattcatttaagaacacagttccaaactttgacttatcaggtgggcaaagtatgatttagcaaatggatttgaatggaagggtagtaatctgtatgaattcttaacagaagagagtcaaagactaagaatgtgtcaatggaatgtcccctgcacagctgttggaaggtcctcttattctaataatgagtacccagtatttagacagaaatcatgttaatttttaaaatgtcaaagaaaaaagaaaagaaacatgctttaacagtatcttcccttttgcatacgagatcatgtcctctgcagggacatggatggaactggaagccattatcctcagcaaactaatgcaggagtagaaaaacaagcaccgcatgctctcacttataagtgggagctgaacaagaaaacacatgggcacagggaggggaacaacacatactggggcctgtcggggggtggggtgatggggagggagagcattgggaaagatagctaatgcatgctaggcttaatacctagatgatgggttgataggtgcggcaaaccaccatggcacacgtttacctatgtaacaaacctgcacatcctgcacatgtaccctagaacttaaagtacaaattaaaattaatttacagaaaagaatatctaccctttcgctcaaactctatacttatgaatgaaactgtgttccataatacaattttctgagtgaatctataaagaaggagcgaatgcccctaaattgaaaaaaaaaccaataatataaattatgcctattatactttaattttacgtgaattatttaactttattaatgaatattgatttattctccaagttatttacaatcagtcagcccctttaaacccagtcacctttaagtaaattgacaaaatgaaggtttggaatctaccaagggacaaccccaacccaggcaaactccttccagagtgcagagagactggcaagcccggcctggagctactccagtgctttcccacatggccctctatagcgtgctgtgtcttctgcttccaggggcgccatcatgagtagcagtaaacttttctctcattggcattggcctctcagaattgtcacgcagtcaccttttgtaaattaagaccaggacacaaatcagagtgttgagagctatgcagtgtatataaccctcacatggtgtcaaaacaggagaaaatgggccaggggtgttatgagagaagagcgtttcaagaaagtcatgcattaaatttctatgtagtcaaagtagtgaattaagttattcctttaaaaagggttgttctttaatcttcttaaaaattataattatattattgtggttctatttcatttttgataaatcacatgctttgatttctataacagtcaaggtagtgagagaacaagcatgaaggattcagctaaatacttatgccattttttttaaagtctctttcccatagtactactgtatgttaaggctttctgtatgttagagtctgggctttctctcttcccttgcctgagaccattttacatcccaggagctgatgaatagggccgtgacccattaatgggcagccaaagggggatggtggcatgactgaagaactatctgagagatcatttcctaaacagttatgacctgactgataggggagaataggatcagcaatgctcacactgtgctagggcaagtcggtgtactcattagcaaagtctgtacgtgaccacactcacctctaaaattccagagttacacaatttcctgtgaaaaagaaagcagcgtggttatctgtccgattggtcatagtcagagtgacctgctattttgtacttagagtctcctgctgtcacaaagtgaaggacagttctcgatgatttcctaataattctgttggcatggagtaggggttaagagccagttctcaagggtcagcaaaaaatgaaactagaaggtatatacaggaatagcggcagtaaagagagattgcatcctgccagacagaaataaacagaagggttgttctgtaaaggaggctgcttccttgacgttagccactcacagtctcagaatcatgattgccaaatgcagataagattcacccagtccagaaatccttaagacgacaaaaaaagaaaatgtggaaaatgattaaaacttctgctacataactgtactcaggttactaagctgttaacttagacatatactagttgtttataaccaagatataccctgggattctgaggtaaaaaccttttgacaagcacagctaagaggacaggctgtttggcagtctagattcctctctttcttgcaatgctctaagtttcctaggcttcttctggtgcccctctgctccttcttgtctaaccccagtctgtgctgttgtggtacatttcttgagtacagaaaactctcaattggaacattatccaaagttcatttttaagtactatctctggaatcactgtaatgaagtttgcagtgcaaaatgactctgccaatggctgagcttattagctcccagtgccttctccctcctgtttatttttactgtttatttatttattatttatttattttttattttttgagacagagtcttcttctgtcrcccaggctagagtgcaatggcgcgatctcggctcaccgcaagttccaccttccgggttcacgccattctcctgcctcagcctcccgagtagctgggactacaggtgcccgccaccacgcctggctaattttttttttttttttttttttttgtatttttagtagagtcggggtctcaccgtgttagccaggatggtctccatctcctgacctcgtgatccacctgcctcggcctcccaaagtgctgggattacaggcgtgagccactccgcccggcccctctccctcctatttaaatagtcctaaggctcagagaattctccccacttcctgccacatgccttttgatgagaagagtaactaccacaaaacagaacagaaatayggactgcatgaccttttttgcattacaccataaaacgttcacaagggcactggtcacagtgttactgtttaaccatttcatttcaccaccaatatgaggggtgtgctatgcatacattctggaaccctcagcaactatttgaacaggtttgtttgttggatggttggttggtacaatttgctgaaacaagtgactctgggcatggttacggtgctctgatcaacatctttccatgcacaagattggggctgagtttgagcactgagtgaaaaatgaaaagcaaatggctgagacagttgctggttcacatcgtggcttcatgccaattagaaaaagaactgtcccccttctccatgccctggggaggataaacggctgaaaaatgccccccgtctgtgtggaccattaggggaaaagcagcttcttgcaaggcacagggtatggccggtggcatctgagcaagattttagtccttcgtcagtcctctcagtggacatgacggcacaattgttcaaggcagtcctagaaggaggccttggggcatcctgggcaacatgattcagttttctgtaccaagccatttagttaagattattaccagctggtgagagaagctcctccactgtctgccttaacataggtcatttcaattaacctgagattttcagatgaggaaactgaagctgggctgaagtatcttacttgaggtcatttggtagcatcagatttttccctagcactccttattctccttctctgctttatttttctccatagcattcaccactaatattgtgtatttcatttttcatttttatattttcagtttccccaagtagaatgtaagttgcatgatggtaggtgttttgttctctgcggtattcccagtgagtagaacagaacttggcacagactgctgtattcccagtgagtagaacagaacttggctcattcaataatatttcctaaatgaaggaattgttcaaatatcgcatgctttcttctataccaatctatttcaacaagtggccttcagcaaatacacaacgttttgaggtatttgagagaaaaaaaattatactaacacaaagtgtcaactgttatcaggattttcttcagctaaaaaaaaaagccatttcatacttttagacatatacttcctgactaaaaacagggttttaagaaaaagtcttccaccttaaaattcatatccacttcaaagagaaaaatttcagtctaatgataaactggggtactttctatttactaagactaatctttgcctctgaagacaggtttagttatggtttgtttatttgatgattaaaacaaagttattagcccctgttaggctctgctagttatttgcatatagcaatacagaatgatctggtaaagtttttatgcagatttggtccaagctcataaaacagataaattcttccaaattaaattcttatttttgtttacttaaatttggcatgctagatatcatgtttcatatcataaagctgcaattaatcatttgttagacttttagaaatagtcatgcaccacataataatgtttgagtaaatgacaaactgcatatgtgatggtggtcccataagattataataacatatttttactgtacattttctatgtttgcatatgtatagatacagaaatatcattgtgttacaattgtctatagcattcagcatagttatagactgtacaggtttgtagcctaggagcaataggtataccatatagcctacctagatgtatagtaggctatatcatataagtctgtgtaagtacactctgtgatagtcacacaatgacaaaatagcctaacaatgcatttctcagaacgtatccctgtcattaagaacgactgtagtaaaaagctacatgttttgattcattttacataattcttatcctgatttactaaaagtgcactgtttgcaggacactgtgctgtgacatattgtcagaggaacaaagggagcatttagacacgttctctgccctcctggaatttacacaatgaatggaaaaaggcacagagttatgcacaccctaatgcctccaacaataactgttgactttttattttcagtcagagaagcctggcaaccaagaactgtttttttggtggtttacgagaacttaactgaattggaaaatatttgctttaatgaaacaatttactcttgtgcaacactaaattgtgtcaatcaagcaaataaggaagaaagtcttatttataaaattgcctgctcctgattttacttcatttcttctcaggctccaagaaggggaaaaaaatgaagattttgatacttggtatttttctgtttttatgtagtaccccagcctgggcgaaagaaaagcattattacattggawttattgaaacgacttgggattatgcctctgaccatggggaaaagaaacttatttctgttgacacgtaagtcactatttttattgtttatagaccaaaattttaarttatttttaaaggatagagccaataagatgaaatatttttaaaatttcttatatacagaaactgcaaaatgtgggcttgaaacccaagacacttgaatcaatctcctttatattcctgtatattttttatttggtggactaccctgcttctttcctgttgttcctggggatctgtgttcacatcttactacctcccatggtcgtaactgcatctccgattaggaatctgtctttttatgtgtttatgcagaagttctttcatttaaacaattactgtatacaatgttatgtttattgcaccatttaatggttattcatgataggcataaaatttttttatatctttcaaaacatcacttatagaaataaaatacaattttagcaaataagatcctgcctgatatttattgagagactccagacagttaagtaggttaatctttcacagcttcagggtcctaatttgtaaaatgaggataataagcatagctcatagggttatttaaagagcgggtgcatgtaaagctcttagtacaatgcttggcacatatgtgcataaaaaaatgtcaggtacttattaggatggtcctcaaaaagctccatgtaacttaaatgtcttcatttttcagttggaaaatccccttattgaaagcaatattcactacacagtaaaacaaaaagtttagttctccttgaagttttttgtacagaagtttatctatactgaggtcttcacttttaatgatgttaattaaacattaaccaccaaatgggaacttggaattcaaaatcaatattcactacattaaaatgtatttcagtggtaataaaacacaaacaagcccaatgaccatcagctgccaagattatatctttaaaaaacagctaaataaggatgccgaagtttgtaattattgaatcttattgatgagtatatactattttctttaacattatgtaaagttgaaatttttcaccataaaaataaatacataacagatactaatatccarttattatattatgaatttaataatatacaataargaaagtttctgacctgaagataagtggttgtaaataaaactaatacatcttgtaattatttctttttttaacctggttttaaggtggtattatcttctaaggaatatgacatatttttacagcttcaccagaaacattattttgcatggattcagtattttcttgattaaatataatataaattatatgtggtttttatttccaaggaaaaagtcagacacattaaaaaaataaaaatactatccttctctatgcccccactcaccaccactctgccattgttcgtgatcaaaaatcaaatcagctttatcaggcataaactaagtgcaagacattgccctgaatatgcttcaaaaaaaaatctttaattctaaaaatcagggagtagaagagtgaaggagtttgtttagaatttggtgaatgggggcggaggaaattcctttgtttttaattactcctgtggcctgtctgtgccagggaagctacccaatgagtataagcctgtttaccccattgtgactatattagtctcttcttatgctgctaatagagacatactcaagactgagtaatttataaagaaaaagaggtttaatggactcacagttccacatgactggggaggcctcacaatcatggtggaaggcaaaggaggagcaaaggcatgtcttacattgcaaactttcccataccttcctgtcatctgagccctccaagtctctaggaagttccaaactttcccacatcttgctatcttcttctgagccctccaaactattccagcctctgcctgctacccaattccaaagtcactttcacatttttgggtacctttacagtagtgccccactccaggtaccaatttactgtattagtctgttcttacactgctaataaagacatactcaagactgggtaatttataaagaaaaagaggtttaatgaacttacagttccacatggctgggaaggcctcacaatcatggcagaaggcaaaggaggagcaaaggcacgtcttacatggcagcagccaagaaagagcttgtgcaggggaactctcatttataaaaccatcagatctcatgagacttattcactaccatgagaacaatatgggggaaaccacatccatgattcagttacctccacctggccccctcccttgacatgtggggattattacaattcaaggtgagatttgggtggggacacagccaaaccatatcagttacttaaaaagtatacttaatagagatacttaaggctccttaaaaggaaaaatggagcatcttctagttgcaaagtccacctctctttttgttattgtcctgtgactttaacatctcctctggcttcaacaatatgctacagttttgcaaactctaggtgggactgctttctctgtgatttttttcccccatatatcttaccagtgaattttgaatacagcttcagcaattttgccaatactatgctaaactttttgcatagatgtgtgcagatagcaaccttttggtcccttctttgtcccagatttgcagcatgtttagcccagtcagtgaaggatgatggagtatcacaagacatggttggcacttcttatcgtatgatgactaaaaaggagtggaaataaatgggctgaagaataagatgtgaaagagtgtaatatgaattttaggtaaagaatcgagtttaagctgaatgttgatcttgaaggtctgggatgatgaacaggaaaatatgcattgagagtactagtatatgcatatrcaagtactagtgcttggtcactagtacctagaatataggagacactaaataaatatttctgaataagtttaaatgagtaaataaaagatacataggaagataggaaaaatcatagactgtattgtaaaaacttttccttgctcctcatgtggagagattcatgctatagaacaaatcaggtaacagaataagatagaaaagtcacctgaggggattatatgcagggttagtgcaactgaaaacactggcagatattaaargagaaaaatgtataggttttgggggggactaaaaaaataaagtttacttctctggtattaatgccaataatatttatttctaaaagagtgaagtggaaaataatttccttatactcagtactgctatttacttgggtcagtgccttatctgtcacttcaacacatcagtaagtagttaaagactttataagagataattcctgatcctaagttatatatattcaaattaaaataaatgacatacatataaaaacaattagtaaacacaatagtgtgttctgggtccatagtaggcattagttaattatttactgaattaattgactatataatagcaaaaattatagtaattctcttatcttcagattacttttttttctgatgacctctaggaagctggaaataagtgaaaatttttttaagtatacgaacggccatcacaaaactcttttatacttgacttcataggctctcactcaggcttggcaactttcttaacatacagttcttacaaacattattaccgggtttttcattccattagaggtttccaaaacaaatggtacagtgaagatgtcactataagcaggcctaatgaccaagaagaaataacagctcaaatcctgaccaaaaaactagacaacaaagaacattccaccttacggtaatcataattactataattatgatcttgagtgatcaggatataataagtattcaataagtgttcatttcactattgttatcaaaaaagttactttttttccattatatccgctgtttaggaaaacagggaagcaaataaaatatttttaaagaaaaagcttgcactaatgacattcattttacccctattaaaagataaacttgggcatattgaaagtttaacaagtttattcaagcattcagccacagcaattgggtgccctaagaccacaagcagttctgtcaatgctcctctgggcagggaggaaacttttataacgtattctcagactaagaaatagatattagactggttaaagtggagactccctagttagatgttagttggcggcttctgattggtaaagtctctagttacagattcgaagtttcattttactgtttactacattgaattgggttttggtttgcttacgtaggaacccaaggcgctgatgttgtctcagcctagtggcctcccaagttatatagcatcccttcaaaaatgatttttaaatttttaaatgattcttaaataggtacaattactagctaaaattttctggaaaatttactttaaatgactcattctccaaggttgccaaataaaaaatagcaagcaatagggctgggcgtggtggctcacacctgtaatcccagcactttgggaggccaaggcaggtggatcacaaggtcaggagtttgagaccagcctggccaacatggtgaaatcccgtctctactaaaaatacaaaaattagctaggtgtggtggcgtgcgcctgtagtcccagctactcaggaggccaaggcaggagagttgcttgaacccaggaggtggaggttgcagtgagccgagatcacgccgttacattatagcctgggcgacagagcaagattccatctcaaaaaaaaaaaaaaaaaagcaagcaatagctagtgcagtacacttccaaacacttcacacaagacagcttgtatggaagagctaattaagtgactaacatttcacactgaccaaattccatttattatcaagttcctatttctcctgagaacacagacaaaagaaaattcactaggtactgcattcatgctgcgccagtggaggaaggctggttagaaccggcaaatcacttgaatttgtgttatatatacctaggttgagtctctgccatattcttgcagcagttaatttttgactgttttccttatgattcttgtttatggtaggcagcatttccaaagtggctcccagaagaaatcctatcctaaatctccagaacctgtgaacaggatgagacatcactctcatgatttatgttttagtcagtgagattatctgaagagtccacacactgaagctgacttgaagatgaaagrggccacctaggagggcatacgggtgaccttaagaaactgggagaggctctcggcccatagccagcaagcaaacaaggattttaattctatgaccccactgaactgaattctggcaataacccaaatgagctaggcagatttctccacagagcctcagataagtactcagctcagcagccccttgatttcagcttggtgatgcctgaggcagtgaacccagccacaccatgccagactctgacccatagaatagtgagattataaatgggtgttgttttaacctactttgtgataatttgttatgcagcaataaaaaatatatgtctcaattaatgaagtcaaaaatccagaaacttttcacctataatacccaagttttgggaaccacgtctaagcataaaccaagatcacttgagtgaattctaaatttatgggagggaatagcattattaatatcttaccaaagcaatactaaaaaatagttatgctactattaaaaactcatttctgggtctaagactaccagaaattataggagcgggcttttctttttttaaataaggggctaaaaagagagaatgtgattgattacttgaagggagatatgtctacagtaatgagtagaaaggaacatactacagttgtcaacaggaagaactacaattaaatgtgaattatttggttgaaagaacagctataatagattcttgtggctgaatatctaactggcaaacttcctgcaagcttccagtaactggccctttgtcctcaagctgtgctgtcgaaattaaatagagagcccctaatgaccttttaatgtttatttggagacaaagcataaacaaatagacttctcccaaagtgtcacacagtgtaaaatattttccagtttggttaagacagtttttttcacaataaaaggcaagatgcaaaaagcagtttgcatattgcaatgtgtataaaaggaatttcagatgttaaaacgcctagatatgttataccttcagatcaataattttaaaagcaattttaacccccccaaaaaactttgcctagaaaaattagttacaaagcctaggcaatataggtcttggtcttggtcttaggtatttgtttatggcaatgctcttcctattttaggaaatgattaatacaggagcatttcaatgcaataaaatcattttgacaaagcctgctatagtttatcaaaataggacatgatgtatgccaaagtgtatttacattcagaaaatataaagaaacattttatttaaatgaagccttaagaatttgagggctaacttttaactttggcctatgtaagatgtgtaccaataggacatggtaaagcatggagtaaagtctccaaatattatcaaatcaatctctcagaaataaaagtgtgttcagactcttaagaaaatttaccctggggcttagacaagtctctgtgagattgattggtccagggttccggtgggaccagagtggaattgtacctttgtactgtagactttgcagctgcagttgtgtacctaactgaaattgcactcttattgacctcctctcagtcatatggactgaatgactctctgcttttaaacttagtagtctttgatgcaacaattttgctgttgttaagacatatatttattaagactctttctgtgcattccttgctatgggtttagggacagagttcaccccagtgtcttgcccttttcccatgcctacctgtgtccatgaagtctctcccaatcttttcctattttgctttaacaaattgggaaatggcaacaaacaattagaaagtgaaaacaaatagaaaaaatgagggtatactcacagttttgctgctccacacaggctgcaaataatgacactttatttttctaacttctagcttagccctcccaccaggacaggggatggacagggaaacatcatctcagtcatttttttagtgaataattttatcttctttgggaattcgggtttatacaattcaggaaaattggtattcccagtgtattggtatatggtagtgactaggaggaaacgctcatcatagaaattccttgatcaatccagagaatggtgactcttattttcaacacctgctcactctgcccaaactcagccaccaggaccattgccaagtggccatggtacctggccccagcactcaggcttaatctatatagcctccaccgcagaggtcctgccacttccaggtatgacctggaaaccgagttttctacctttctgtctcatggtatcaggaatcccactgcttctgggattgggcagctctcttaatcttcaaccttagagcctcttcaacacaggttacccagggccccagagcagactatctcatcaaaacacaccagtgtgttggttaataatgcagatacctgggccctgccccagacccacagaatcagaatcaatggagttgtgtcccaggagtttgcatttcactaagttcatcagtagattcctgtgcatattcagacttaagaaacatcaggccttagacttttgaaaaaccacatctttaaattctgtagcagtgaaagtccagagctctcacacaagctctgctcttgtcttaaagaagggaaagaaaaatatatctcacttttaccagtgagcttacaactgaggaaacaagacaaaacttattcctcagtcagattactcggccccacaaatgttgagtagaaattggtaaagtatcaaagatcaataagatgaaagaaggcaacacacacacacacacacacacacacacacacacacacccatgatgatgagcagtttttattcaaatggaagagccttggttgtggaggggcttgccaaaggccagaatctaagtgggtcctgccaaatggcaacatgatgttgcccatgaatagatcccactgggctatataagccttcagttaaggttgataacacaagaaattaattcaaaccaaatttactttctttccatcttttcttttccagattgctatttacctcactgatattttaaagaaagttttaagcaactattaatggacattcactagaatacaaacattcaatgttaagtatctgtactagtgagggattaaaaaacacagggattatttaaattcaaaagtaatttaaaaaccacacacattgcatgcatcaacaactctagctttgatttagtgctgttaaaagaaatataaaagaattaatttagctttattaatcttactttaaggaaaaaaatatataaatatacacacacatactttgaagtctcaaatatccagattgattaattataaactcaaatttttccagtagctaagagaggtagaagtgaaaaaatgtcttaattaactgctttattttaatatttcaacttaattttgtattctattccattacataatatgcctgtgtcttaatataaaaatcatggagaaaatacttcagtaagatgcactacatttctatgatgccttcgcagatggttctctgacatatacctgatatggaaagcctcacatcattaaaataacagggctaactaccagccctccacttcaattttggaggcatccctacaacaggcaaacattcaatgtgatgtgctcattaatttctctaattataatgttattaaattataatgataatgtcatccctagaaatgatggcttctgatagagttgtcttgtttttctttgcagggaacattccaatatctatcttcaaaatggcccagatagaattgggagactatataagaaggccctttatcttcagtacacagatgaaacctttaggacaactatagaaaaaccggtctggcttgggtttttaggccctattatcaaagctgaaactggagataaagtttatgtacacttaaaaaaccttgcctctaggccctacacctttcattcacatggaataacttactataaggaacatgagggtaagttcagctcatgtagytggaatttcctcttacttttcagtagaagtgccttttagcttctaaaattgtggacttctctcctggataagacatataactgccattcagctcttaactattttttttttatttttttttaattttttttgacttctgtcacccaggctggagtgcagtggcrcgacctcggatcactgcaagcaccgcatccggggttcaagccattctcctgcctcagcctcccgagtagctgggactacaggcgcccactaccatgcctggcwaacttttttatttttattttttttttgcatttttagtagagacggggtttcaccgtgttagccaggatggtcttgatctcctgacctcctgatctgcccgcctcagcctcccaaagtgctgggattacaggcgtgagtcactgcacccggccractattttattaataggtactttgtttccatataataatggcatgtttctcttggttgtgctctttcgtggaaagtgtgaatgtgagagaatttctaggtggactcagtgagagtcagagagagctggagcttctttcccagagcccagtcctttctggccaaatagaataagagaaatggacaaagtgcatcagagcctagaagaggcaaaatccagagggaagagaaagaaggactcaagatgtggattgccttatctttgaagttcctacatgtaaacatactgtgctgttgttacctcccatcctaactttatataaactctgccccagctaaggtggcataagtagtctcatgtcagtcaaatggtacatatgcctggatgactgtagtcacatatgagacacaattaactgaaaaagtcatttgaatgtaggacttggaagccttgaaaatagtacctgaaaaacaaagataaggtttggtgcctgtgatctcattcttagtccttaacaatgatggtaaaaaaggtggtattttgtagtgatgaaaagcaagggctttgaaattaatagacaaaggtctgagccccagccttgcctttcactgtttgagtgaccttggacaaattacttaagttctttcagcttcagtttcctcatctataaaatagagataataagaatacatagtaatacctcaataactatcagctgctatcataagcaaaaatgctgaagtcatgctacagttcattgaaattataatgatcgaatagggaaattaatttaaaattagatttgattcattattagttgtcttattaaaagagatattggtttagaaagtgaatgtgttgactttttttgtttttgttgttgtttagggataaattacattcatagcataaaaggctgactgccatcctatttctttttaatgatttcatggcttactagggaattaccattcattttaaaggtatggtaatggaactgtggttttgttagaagaaaaaaagggttcctatcttttagagatacatactcaagtatttatgaatggaatatgatgtctgagacgtgctttaaaataatttgatgatactggggataagagtgtgtgggggtacagatgaaacaaggttggccttgagtcgatcattgttaaagctggtttgatgggtacacagaggttcagcattttcttctctcaacctttgtgtgtgtttggaaatttccaaaattgagagtagaaatgtttttaattttatggttacttcgtgggcaaaaatctgagatcatataagaagttttgaatttagaagagggtagcctttttgctcagactcccataccatgacccgagttctttacattgcaaacaaaaagtcattatgctctctgaaaacccaatcaaatataaaaaaataataaaaatgtctgtgaagcttctacacaccctagccattagcctttcattttcctgtgtccaaataggatawcayatccccaaggatcacatagtagatgtttaataaatgtttgctgaatgaattaatggactatctattctctcatttaagttcaaacacattcactttgcaccttcattgcatgttgcttcctaggggccatctaccctgataacaccacagattttcaaagagcagatgacaaagtatatccaggagagcagtatacatacatgttgcttgccactgaagaacaaagtcctggggaaggagatggcaattgtgtgactaggatttaccattcccacattgatgctccaaaagatattgcctcaggactcatcggacctttaataatctgtaaaaaaggtacatcttctccttattgcacatgctatatgaccaaaagacaggggcagggcagtttgtcttttaaaaagaaatcaagtcttctgtgctgagattgagcaggtraggtagagaggtggtaagtagaaraaaaggaagrgaagagccaggcaggactaggagaagaagggataaatagaacaagcattcctacggggaaaatgccaatgaaggtaatgtgaaagaaatatattctctcagggwtcagtttgctgtatctaacttccaacagtggtgctgaagagacatatgactttaccaaatgtgactaccaaaagggcactccacggtgatagatctgtagttactcatactatattggtaaacataatatcatagtatttatttctaacatcatgaaaaagacaacggagctcaagagcctgaaatacaattctaacttgaacaatcsttacctgtaaagacttgtctctgtttgtggctatatgcaccagaaaatagacgcacaactttgaattccaatcttcccatttgccaaaaagcatttaatagttatgtggtcagtggacatccagacacaggagtgtcttccaagcaccagatactgatcataaaaattccctgagtgtttctgtctgtaaaacaggagtgactggtccagacttgtgatttattcgaaaaaataaatactaacatttttaaaaactataaatcacctgaaaacataaatcaaaatacatgctaaaagtttagtcttgctaaaatagtaactttaactccagattctctagataaagaaaaagaaaaacatattgaccgagaatttgtggtgatgttttctgtggtggatgaaaatttcagctggtacctagaagacaacattaaaacctactgctcagaaccagagaaagttgacaaagacaacgaagacttccaggagagtaacagaatgtattgtaagattacagcagacatgttaactttacttttttttcccttgatccattaattctgctaagcttattccctcacataaataagtactgtgtgtctagtctgtggtccttataacaaagcatattggatgtgcaatttgatattcagctaartaagtcagaataaaaactctaagccaggtaaagccagatacaccaaacttgttccccaactggtaaggataaagcatcaattatggtttaatgcatatgtatgtgacattaatatatttatttatccactagactcattctaaaaattatttgaggcagctccaaattattaaactaaatgcttaaaaccatattatattttaaagcatctaactatatttaagaaaatagttcaaaccacgagttctgaaaggtattcgttttacatactatgttgccctcactgggccccttagtctgcatcattcgtttctacatttcagttcactttacttttctagaaatgctttttttacagtttagactttttcttaattctcagacacaaaataatgagcttagtaagattatctatttctcataatttgcatgagaaacagagtcccttaacaacaactagaccaataagtagatattttcgtttatttgtttgtgtttaacttcttcaaaataacctgtactcagaaacygagagcacaaaaataacgatactaccaaagtagaaaaataaactagttaacaaagtacagattttgtttccaacttttacttatatctgggtggaaggtcctctttccatactttaatcctgtctctgttgtgtactaacaaaaatagttgttataaaaagatactcaaaattctagcctgagcaggtttgatttggtaccagtgttacatgtggtgcactcaggattcttcccagaactaatttccacttgggaaatttttagggccacccagtttgaacagtgaccataagtttcttctgagggtttcaggccaccttgcctatgaacttttaggtctttgtggctctgtccctgctgcccttctacattttttccctccttcatatctcttccaatcttaaaaattttgtcttgcaatctttaaaaaaaagctattcttatgtactttttacaaaataaatttatggtagaaaattggaaattttctgacaagcaaaaacatccatactaccaacatgatgaataactgattgaatactaatattcaatcttttttctattaattctatgtgtgttttgtttatatgtatgtatatatgcacacctctgtatttacacacacacacaatgtgtacagtttataacaaagacagcaaataggttttatcttcagtattgtgttcatctgttaatatggtattgataagaatcctcaggctgaattcagttccaaaatgaaagagtgctgtgattgattagcaatgtctgacatgagtatagggggcargaataccagcatgtgtgccagatatttgccattccaaattgattctatttatatagaggtaactctcactatctcaagcattaatgactcttagtcacaaactctgytcttgacttacagctgtgaatggatacacttttggaagtctcccaggactctccatgtgtgctgaagacagagtaaaatggtacctttttggtatgggtaatgaagttgatgtgcacgcagctttctttcacgggcaagcactgactaacaagaactaccgtattgacacaatcaacctctttcctgctaccctgtttgatgcttatatggtggcccagaaccctggagaatggatgctcagctgtcagaatctaaaccatctgaaaggtaggacatctttacctgaaattagcagtcagctgaaaaaggtggttactgggaatcagaatctaaaagctaaatatctttgaaataatctgagctttgaactggcatcttagttttatccctatgatggtatatataataatgtaataaaaaaagactgtaagacaggaatattataaagtaatgaaatttgaaaatatattagtttttggaaagaacaactggccctgaaagtatagtactatatatacttactcagctttgtaaaatataccagtgttgtaacatccagaaaaattgtatgttgcactggaargcaccctgtttttcgacttatttctgtcaagtataattaactttgttctttatttgagcctggccatcccttagtttaactcgataaatccttcctttatctctttaacttaggcaataaaaacattccttgttcttgaaaaatattagtttttaatattggtctactgaataaattaagtttaacataggagttcagatattttactttgacgtgcaaatataattgcttttatcaaatatgctctgggccacagaaggcccagcacagcagatgcacaaccatcttgtacaagacagcaataatataagctcatttggtacctcctccttgtacctcctcctccacccaatgcaaccccttaaaatatgtcaaagcctctcttctctgcttatctacagatttgttctttttctctcattgaaagaactaccaagtgaaaccccacagaaactggtaccatattttgaaaacatatatgcttaatatctctatgctgtatgtacataaaaaacaaagtatatctgttttaaacttgagttttccatcattaatttatttacagctgtctgccctagtttatagtactgttgctatctgtctrttccttcaatttctacttgtcatcacccragcagtgtttacagggcaataggrgagagaaacattgtcttcattaatcaatgcctctttctgtttcatttcagccggtttgcaagcctttttccaggtccaggagtgtaacaagtcttcatcaaaggataatatcygtgggaagcatgttagacactactacattgccgctgaggaaatcatctggaactatgctccctctggtatagacatcttcactaaagaaaacttaacagcacctggaaggtaatttacaaaaaaagagtactatttcaaaatatgctctcccccgcacaaaggaactacaaaaggctaattcagcaattaaaattttaattggtatctgaaattgagtaactagactgctaaatatttattaaggtatttgatgtaagagtctgagcttgagaactatgagttttgagtccatgaaaaaagatgggttcaaaagttatcaaatgcttgacaaagtcctaagaaaacactgaatactattagataaatcaattaatttgcttcccatttcagaaaacgtggcactgtaygattcagcagcattaagtacagttacactattgcatagccgtcaccactatccatttccagaactttttttttatcatcccaaatgaaaactctgaaccctttaaacaataacaaccttcttccactctttctccaccccctgataagctcgattctactttctgtctctatgagttttcctattctaggcaactcatacaagtggaatcatacaatattggttcttttgtgtcttttatatcacttagcataatgttttaagatttgttcatgttgtagcatgcatcagaatttcattcctctttaaggctgaataatgcttcattgtatgtatataccatattttgtttattcattcatctgttgataaacatttgggtcatttccaccttttggctattgtgactaatgttgctatgaacaattgttatacaaatatcactgttcaaatctctgcttttaattattttgcatatccagctagaagcgattccgcttctagctggatatgcaaaataattaatagaaatggtaattctatttttaattttttgaggaaccacattactgttctccatagcaactgcaccattttacaggctcatcagcaatgtacaggggtttcaatttcttcacattctcatcaacacttgttattttctgttttgtttttttttttaataataaccatcctaatgagcataagtgatatttcatagtggttktgatttgcattttcttaatgactagtaatgttgaggatcttttcatgtactttttggtcatttgtgtatcttcttcagataaatgtctatttaagtccttcagccatttttgaagtgggatttgtgttgttgttgttgttgacctgtaggagttctttatatattcaggatattaattccttatcagttatttgcaaatattttctggcattctataggttgtctttcactttcttgatagtgtcctttgatgtacacaagctactctttgtacatgtctgaatgacttccacagcctcccagtcattctttctgtttgtcttccttttctactatcgattttttacaaagcagtactgtgatctttcaaaaatgtcaatgagatgatgccactcccctgctccaagtctttactcatatatcacttcctcagagaagccctgtttgccatccatattaaaaataccctccttggaaaggttaagtaattcatccaacatcacacaataaatggatagctaggacttgctcagcccagacctgtgactcctgaagcagagatttaagtcccatgctacactgacacctacatgtgattactcccaacgctgcgtctccaactcaggaggatctagtgaatttcagattgcatttcaaacttcttagtgacacccccacatggatgaggctattcaaactcctctcctcatcaagtactgccttgttttatagaaactatctctgaaggctgtctacttctctccatcttctttgccaatacctatgaactcatctctgcctctcactgagattagaaaagcaggctcctgactggtctccctactgcagtcttgtattttccaacacattctccaaacatctgccagagggatcctcctaaaatgctaatcctgaatgcttaaatctttcaaatgcttctcactgccctgggatggaaggctgaaaccttaactaggtcctactgcttatctcccatctatctaagcctcattcttcactcctctgccctgtcttgcatgctatgcttctgccatattttctagaacatggcatgctcgctcttttctctaagcctgctcataagcagtttcctctttgtatacacctgccctagtctctgcgctacacacacacttcatcttgctaactctacttcccctttaggtagttttgagtaatcacttcctctggaatgtctttgtggcctcttcactgcactttccccaacctcaaagaaatgctccataataccctgtgcttattacactgtattatattgatgggttcatggcctgtcttctctgccagatgtaaggtccacgtggacaaggaagagtccaccttgcttatggttaagtcatcaacacatagcaggattcccagcaaagagcaggtgtttgatgcatttgtcaagtgaaagaaatgatgaatgaggtggctttgcgcaagtcaaataattacctttctgaaatttaatttcttcgtttgcaaaatagggagaataataccaactttgttgcgatgtcatgtgagtttcagctaataaacaaaagctcctggccaagcgccgtggctcatgcctgtaatcccagcactttgggaggccaaagcgggtggatcacttgaggccaggagtgcgagaccagcctggccaacataccaaagccccgtctctattaaaaaccaaaaaattagctgagcatggtggcatatgcctgtaatcccagttattcaggaggctgaggtatgagaatcacttgaaccagagaggcagagtttgcagtgagccaagatcacaccacggcactccagcttgggcaagagagcgagactctgctccaaaaacaaaaaataaataaataaaagctcccgagcagctggccagtgctaatacacaataaagagkagccactggggccgggcgcrgtggcttacgcctgtaatctcagtactttgcaaagccgagacgggcggatcactgaggtcaggagatcgagaccatcctggctaacacggtgaaaccccgtctctactaaaaatacaaaaaattagccgggcgttgtggcgggcgcctgtagtcccagctactcgggaggctgaggcaggagaattgcttgaacctgagaggtggaggttgcagtgagctgagatggcaccactgcactccagcctgggcaacagagtgagactccacctgaaaaaaaaaaaaaaaaggccaggcatggtggctcatgcctgtaatcccagcactttgggaggccgaggcgggcagatcatgaggtcaggagatcgagaccatcctggctaacatgttgaaaccctgtctctactaaagaaatacaaaaaattagccaggcatggtggcaggcgcctgtagtcccagctactcgggaggctgaggcaggagaatggcgtgaacccaggaggcaaagcttgcagtgagctgatatgtgccactgcactccagcctgggtgacagagcgagactccatgtcaaaaaaaaaaaaaaaaaaaaagacaaacaacaacaacaacaacaaaaaactagccactgtgtttttaaacatttcacaatttgataaaaagattctatggtagaatcctttgtcaaggggttgaaggggcccttctgaaaattttctcttcacttgaaaaaataaacatcctccatgattctctacttcttaactgaccatccttctatgagtggactggaactgtctgctttgtttgagtaactggtacggattgctataaatcatggataatattcatctctaagcactggtcagaatttttctcttcaattagcaccttaagtgaatacctgctttctgttctacttcaaccccagcattaaacactwttttccccctgcagtgactcagcggtgttttttgaacaaggtaccacaagaattggaggctcttataaaaagctggtttaycgtgagtacacagatgcctccttcacaaatcgaaaggagagaggccctgaagaagagcatcttggcatcctgggtgagttcytgcagaatatatatggctggtttactcttcccatgggctacatcarcctcagaaagaatagtaacttcaggacctactgcatgatttctatgtgttaagtaggcgtgtggaagataaaacaataaaatgcagcagctaagtacttttccaaatgtaaattaccaatggtaaattttcatcattaaaagccctgctgacggccgggagtggtagctcacccctgtaatctcagcactttgggaggctgaggcgggcagatcacttgggtaaggagtttgagaccagcttggacaacatggtgaaaccccatctttactaaaaatacaaaaattagcagggcgtggtggcacgtacctgtaatcccagtttcttgtgcctcgatgctgaggcatgagaatcgcttgaacccgggaggcggaggttgcagtgagtcaagatcgtgccactgcactccagcctgggagacagagcgagactacatctcaaaaaacaaaacaaacaaacaaacaaaaacccatgctgacctgacttcaaatggttatttttttcttcaaagaggtaaggggaattgtgtgttgtgtgtttatgtgacttggtttaaatagataactaagttgtgagcctctgcacttagttaaagatgtgttcccttagaaataaaacccaggctagggccaggcgtggtggctcacgcctgtaatctcagcactttgggaggccgaggcgggcggatcacgaggtcaggagatcgagaccatcctggctaacacggtgaaaccagtctctactaaaaatacaaaaaaaattagccgggcgtggtggcgggtgcctgtcctagttactctggaggctgaggcaggagaatggcgtgaactcgggaggcggagcttacagtgagctgagatcttgccactgcactccagcctgggtgacagagcgagactccgtctcaaaatcaatcaatcaatcaatcaatcaatcaatcccaggctactaatgaaacaagcaggatctgtcctagagccctccgcaggctgcccccagccagagtccagagacctgttctcgccaaggcacgcaggcagaataacagtgggtgagcaaacagagtatggattcagattgtcctggttcttcacttttttttttcctagcggtgactcagaggtataatactttttgaacaaggtattacaagaattggaggcccttataaaaagctgtttttttgtgagtacacagtgcatacattagctgtgtgacctttgaaagttactcaacttggctgggcgcggtggctcatgcctgtattcccagcattttgggaggccgaggcaggcagatcacttaggtcaggagttcgagactagcctggtcaacatggcgaaaccccatctctactaaaaaaaaaaaaagtacaaaaatgagaatggcgtggtggcgagtgcctgtaatcccagctactgggaggctgcgacagaagaatcacttgaacctgggaggcagaggttgcagttagccaagatcatgccactgcactccagcctaggcaacagaatgagactccatctcaaaaaaagaaaaagaaaaaaagaaaatactcactgtctgtccctgctcccttctgtaaaatgggaacaatagttattaaagttggtatagggattaaatcagttaatagacatacactcagaagaacagataggaaactctctataaatgtcattttgtatattacataaaatatttatgtaaaatatatatttttattctataattggtaatcattaattttggtcatggaaaatccaaaacagtgttatccttcacatccaaaacaattcaacttatctgctttgggtggtcagagtttatagcacctaactcttgggacaaatgacacacctccagccaacagaagattaggctgaggagtctcaacattctgaatagtttttgtagatgtgtaaagcttactaactgacttgtacaaaaatgataatcaatttcattaatctgaagttgaattaaaaagcccttctctccttccaacctcgacatatcagattgattatggacttctcaaaaaccaagctttccattcaccacaaataagcgtgttgctcctagtagttcttgccagagaacacagtcaaagaagataactatcttatacattctgcatgttacataccaaggaaggataataattctctctttgttcccaggtcctgtcatttgggcagaggtgggagacaccatcagagtaaccttccataacaaaggagcatatcccctcagtattgagcygattggggtgagattcaataagaacaacgagggcacatactattccccaaattacaacccccagagcagaagtgagtatacagcactgtgtaacaaatcaacaatgtttaataacccactgtactggtcactgacagtatgctgcaaaaactgaaggcaggaactcccaaggaaaccgctcatatatcatttctaggcatcatgccaggaaacaaataaaccccttctcctacctccaattggtttacggaattttgtcctgccttaattggatgattattgacaatcctgatagtaatttagttgggttgtatcaattatacatttctggagtaccttgggtgatttttaatttttaaaaaagttcttataagaatgttcgatgttcactttagaatatttgaaaaatatagaaaggtagcaaaaaatactaattatccatagttctataagcaatcgctcttatatttttatataattcttccattttcatctgtatacatataatatatattttaaatacrgttgagatcatagcaaataaatgttattttaatttcataatcggagtttgttctcttagcattacaagggttttataaacataattttaatgatataaaatatttcattatgtggattttttgactatttttacacatcaagaaggaccagtgaagactagtgactttgctaccacttgcagtgtgactgtgaacaggttattcaaatgtaaatttgaaagatttaaataggatcacctgcaaagttctttcagttctacaattatggaatggaatgtaattttcagttccattttattcaatagaaaatgcatcgatttcactgtattgccggcattgttctagctgatagaaatgtagagacagtgcttgccttcaagaaagttaagctctgttcgagagaaatacacgcaatacaacatgaaaggtgctagggacattcccggaagatgtgtgagcacaaagaggggcaccactcccaggaggaggtttagaagagtctatctggatgcaatcacatcggtctgttatctgacaccagagcataagtgggattccattctaatttataacaaagaactcagaagtgggctattctagactaaacttagtctactttgtggctcaaatgaccacgttagaaagcacacttcacctctctaatgtgacctttctcacaggtgtgcctccttcagcctcccatgtggcacccacagaaacattcacctatgaatggactgtccccaaagaagtaggacccactaatgcagatcctgtgtgtctagctaagatgtattattctgctgtggawcccactaaagatatattcaytgggcttattgggccaatgaaaatatgcaagaaaggaagtttacatgcaaatgggagacaggtaagtccaactggggaaaaaaaaattgttcaatctctttgaaaatgatcatttgacagaaatagaaatatctaacctcatcattatctccaaaaatactttagtatatacctttaaaagataaggacttctttaaaaatgcccacaattatcacaccttaaaataataataacacacatcataactctttaaagttatcaaatagccaatcaatgttcacatttccccaactgactttttaggtctgttgtttggatcagtatccaaacaattacacatattacaatcaatttatatgtttcctaagattgtttacttgcaatttttctgttgcaagagtcattggtcctgtagaaatttcccatgtcttgattttactttttatcgtatggtatcatttaacacaggggtccccaacatcccccacacacacccccatgggccacacagcaggaggtgagcctgttaggtggtctgtcaggaactgggctgcacagcaggaagtgagcagcaggcaagcaagcrttatctcctgagctctgcctcctgtcagatcagtggcggcaacagattctcatwcgagcgcaaatcctattgtgaactgtgcatgtgaggggtctaggttgcacgttccttatcagaatttatgcctgatgatctgaggtagaatagtttcatccagaaaccacccccctttcccaagtttttgtagaaaaaatgtcttccgtgaaaccggtccctggtgccaaaaatgttggggatcgctaaaacatgtttctttctctctgcttttatttcctataactagtagttacatctaaaagtttgatctaattcagattttttttttttcaagactgcttcaaatgtggtactgggcacttctgtcagggagtacataatttatagttgtcccttaactggggatgttatcagctactgatgatggtttcctagattcataaactaatcagtgttgcataatagtaatattctaattccatcttcctttctttattagctggcatacttctctataaacaggaacttcttaatgaattatttggttaccctgaggtacacagtatatagaaagagtatgactttcatgcgcgtccatgtgaagagaccaccaaacaggctttgtgtgagcaacatggctgtttatttcacccgggtgcaggcgggctgagtccgaaaagagagtcagcgaagggagataagtgtggggccgttttataggatttgggtaggtaaaggaaaattacagtcaaagggggtttgttctctggcaggcaggagtgggggtcgcaaggtgctcagtgggggtgctttttgagccaggatgagccaggagaaggactttcacaaggtaatgtcatcagttaaggcaaagaccggccatttacatttcttttgtggtggaatgtcatcagttaaggtggggcagggcatattcacttcttttgtgattcttcagttacttcaggccatctgggcgtatrcgtgcaagtcacaggggatgcgatggcttggcttgggctcagaggcctgacaatgacaaatacttgattcattccctatatttataagttttcaaattaatcaaaggcttctcaatttttttttacttttaagtagcattgtgcactcgtggatttaagcatatgtggtgtgttacaattcactgccattattcctactgatgttcaaagtatcctttttgacactgaaggacttgttcaggttgactcctttatttttacatcatagtagtctttgaagattctttgctttctagtataacgagacaccaggctcattttgcacattttcggagccagaactgaaactaaccatttgttcccaaaagcctgttttttgttttttgttttttttggtgaggatttggaaccacaatgtgggcactagagttgcttgttgctattgggcaaacaattgtttctgggccttttcagtggaagaaaatgggaaaaaacttttcagataaattcatcatgatttcatacttatactttctattcaaatttgagtctacagattttttggtttgttattaactgcatcaatcttatatttgtatctgccttaaactgcactgaaaaatcttattttttccacgacaccaacatattcatttgattcatcccacaatatacatacaacagtctcagaatcacaattacaacactacaatcaacaatatgattactgaaaacagtttaagatttgtttgccactctttttgtcattagggtagatcccactagagatttttagacaaattacatatctaaaatcacttggaatagttcttctccacatagttttgccaccactggatatacgggttaattcattgtacttctctgtttcagaaattgcttttaaaactgtaatattattttatgtaaaatactcatacctcacatagttacctttttttttggctttatagtttattctttttttttttttttgagacggtgtctcgctctgtcaaccaggctggagtgcagtggcatgatctcagctcactgcaagccccacctcctgggttcacaccattcttctgcctcagcctcctgagtagctgggactacaggcgcccgccaccacgcccagctaattttgttttgtatttttagtagagacgggtttcaccgtgttagccaggatggtcttgatctcctaacctcgtgatccgcctgcctctgcctattcttccatttttaaataaacaaacgtgtgtgtattcatatctttgcttttttcacttcacaatagaatctgaacatctcttcatagtattgtttggaaatattgctcattcctcatttctttgcatagtatatattactctgatgtgtggacatgctacagtttatacaatcagtcccttatttgacaagtgtttgggttgtttmtagtctttgccttcacaaatacaaaacaatgtacagctttgttagccttgttcatgtctctttgtattttgccagcatacctttgtgataaattcctagaaattgtattgttgggacaaaagctaaatgcttatacagttttgtgaaatattgccaaatccccctctgtagttgtgccagtttgtatttccagaaggtatacatgagatyatctgtgtttccacagcgttattacaaactatattgtcaaatttggggattttcacaaatctgataggaaataaatgatacagtcgaggagcggatcatatttatcttttttctgtatggctatctagttacccacaaaaaagctaaactttgctgcattgattgaaatgctgcctttatcatctactaaaatatttatatataagtgagtctatttctagattttctatgctgttctgctggtctttattcttgcaccaataccatactgctttattaggagagccctttaatatgtttcatggctatagctatgtctcatttctcttcttttccatcattttaatggctatttttgcttccttattctttctactgaaccttagaaaaacttatctagatccagaaaaaaggcttgatagtgttttattgggattgtttcaaatgtataagttaaagtagggagtacagacataatcacgaagttgagtcatcctacataagaacgtatgtctttccatttgttcaagtctacttttgtgtttttcaagagtattttatagttcctcttatatggatcttggatttttttttaagattacgctgagatgttttatttttatttggcctttgtaaatggtaataccatcacttaacattttaagtatgtggctgggtgtggtggttcatacctgtaatcccagcactttaagaggctgaggtcagtggatcacttgaggtcaagagtttcagaccagactggccaacatggtgaaaccccgtctctactaaaattacaaaaattagccaggtgtgctggtgcatgtctgtaatcccagctactcaggaggctgaggcacaagaattgcttgaacccgggaggcggaggttggtgtgagcagagattgcatcactgcactctaacctgggggacaaagccagactctgtctcaaaaaaaaaaataaaaaataaaaaataaaaaattttaaatatgtaattgaaaaaaaaaaggttttctacttttagattcctattcttgatcttgtgcttactttggaaggaataaaacaagactaatgtttattaaactctctccaggtactgtcagacatgttaccttatttgacctttgcaacaacacgagaggctatgtatttttatgcccattttgtggacaaagaactgatgctcaatgagttgagatttaaaatgagatttaccttctgcatatttcattatcttcattttgcaaatgaagaaatcacaacacaggaaggcctacagaggcatcagaagtcctcatcctggctttctcagttactagccatgtggctacagattagttatttaatatttctcatgcccatctgaatcatcagtaaaatggagatgatacctgccctactgacgcatcttgatgggttgcattctttctttttgaaagaaacaaatggaatgaatataggttaaagccctgggtaagctaaaatgtattaagctgacaaggaatggttatcttgtctaaatgcatacaacacaatgtgaagtcaatcaatttctaaagcaagttcctgacctttataactattctttttaaaaaaatatcattttaatatgaaaatatttcatgaacactgtgaamattatgaaaatatatggaggtaaaagaagaaaatagtctcaacacaaaaaagggatcacaattgcatatattgtttgcaatttgctttatacacttaaamatattatgattatccttctatatcattaaaaaaacttcagccttattctgaatgactgcaaagtatttcatgatctgaatgcaccataatttattcagtcagttccctactgtcaaacatttagatggtttgcaattttttacaattatgaactgggtgtatttgacatactattttttgttttaactaaacagtaggatatgcccatttttacttcatgggaacaaatcttgggacttaaatttctaggtcacaggccaggcacaacttatgtgcttgtcaaactgctcttcataaagtagtatttttcaaactgtagatcatgacccatttagtcggttgtaactagcgactagaattttttgaagtatcaagtgggaaagaagagacaatgtcagagtataccacatacagtaaggacaagtaagggttaaagaaatttcttttctggagtgtatgcgkgtgtgtgtgtgtgtgtgtgtgtatacaggatcacaacatgaaatgtacttcttatgtggttgcartagaaaagtttgaaaatcactgcgtaaagtgtaggagagaggctgttctctgccgttttactaatacttagttttaaatttttacaaacggcataggtcaattactgcacctcattctcatttaaatttatagtttaattaataatgtttattgaccatttgtacttcttcagtcaatttcttggtgacggcagatattcatttycaattattaatccataaaatatctatatattaagccatataatatatatatgtgtgtgtgtgtatactacatacatattatctttgttatgtataatgcaggtctttttcttttttgtgtgtgttttttcatattccattattgcttacagttgagtgtttttacttttttgtttgtttgcctgtgacaatatagctgttttcagtgttacatagccaaattatcaattcttttttttttgccttttgtatcatacttagaaaattattttctattctataggtaagtaaatattcatctacagtttagtcagtatcttaaaaatgctacttgtaacacattttcagtttggtgagtagggctctaaggctctaagttttatcttttctaaacaactattagattatctgagcattatatattaacaaatctattctttactcactgatttgaagtgtcacctttaacatattgtaaatcttaaatatatctggatcatttttctaggtttcctagtttaccgtgtgacctatctgtgccagtacctgtaccacattgtttttattattgcagcttgtaaagttttaaatacatgtcagaacatgttcatccattactgaaaagaattattttccctttttattcttagataccctcacatatacattattctagatcaattttaatataattttgttaaactaaaaaactgccattggtagtttttattattattacattaaatgaatagctttagttggagagaattcatctcttagctatagttagtctttcactcaggagccctttaattcaagttgtctttttaattattcagtaaattcttatagtctttttcatattcgtcctgcatgtttctcattgaattcctgtttttcttaatattatgcataacacggtattttttaattgcatattgtcattatagaaacagctgttaattgcttaacatttattttggagctggacatcttaaatattcatttcttagttcaaataatttccaactgattcatataggttctatattatctataaataatgctaattctcatcgccagcaaatttattctattttcttgccttattatgatgggtagaatattaaaaataatattaaacaatagtggaatagccagtagccttgtttgtgtctgatcttaatgagaacatctctgtttattttaccactaagtatgaaytggctagtggttgtgctttattctacttttacactgagtgtttttaaaacaaatcacttgagctgctccaaaaacatcctgtgctaggcacagaattcactggtaaataagacaaataagtttcctgctytgataggtttttattctagtgtatatgggaggaaggaggggaatgggaggaaaggagatgaagataagcaaacaaaagaaaatgaaatagataacttcagaaagtgagcagttytgcaaaaaaaaaaaaaaaaaaatagcgtaatgagatagtgaacagaaattctagttcagataatgtggagataatatttaatgtgatacctaaatttcaaaaaggcagccttgcaaagatctgagaggaaagcaaagggaagagctaatgccagaatgtcatattttacaaaaatttctttttagattttcttgaaatcattatatagtctttctcctgtaatgtgatcaactacaaataaatatgaccagctacattaaagactttytaatgttaaactatccttgcactytgggggagaacaacacttaagtatggtgaatttttytttaatatattggtgggctgaatttgactgtgtttgatttagaatttytcatttaagcttataaatgaaattagtttagcttttgcttgctttttcagatattaatatccatggttatactatctttattaaataaactaggaatagtttaaatatttgggaaccatytgctccctagagagttgaaagaaactgccttaaaaattattttgacttttaaaaaggagtagttttgttgtttatggggttccccccctccttttttttttttttttttttttagacagagtcttcctctgtcgcccaggctggagtgcagtggtgtgatctcarctcactgcaacctccacctgctgggttcaagtgattcttgtgcctcagcctcctgagtagctgggactacaggcgcctgccaccacacctggctaatttttgtatttttagtagagatggggtttcaccatgttggccaggctggttgcaaccttctggcctcaagtgatctgcctgcctcggtctcccaaagtgctgggattacaagtgtgagccaccgcacccagcctgtttatgtttttaatcactattttatttcatccatgagtactagtccagtcaggcacttctttctaagtcagtagatcacattaattgcatataatgatttacatttttctcccctatatatgtggttatattcctttctcatttctaatgtggtatttttttggtyctctccaccttttttattagacttgccagagatttatatttctctggtcttttcacataatatatttttggatttaatcattttacctgtgttaaatttcttaatttatgcttttgtctttgttaatttttctctgtaactaattttaaaattttttcagatatttagatttatttttatttagtcttaagataaaaagcttttcagattcttagtttatatgtgtagttacattctatacatttttctttacagcatgctcacagacattacttaccaaatctcagtatttcatttttattttctcttcgatctaagttatttggatcaaaaatgacattctttttttactttttgtccttgactagtaatttttaattttattgcattatgatcagaaaacatgacctgaaaatatttcattgacgttttctctgtcgatcagtatacaggtgattgtaccagtccctgttggaatccttatacatctgaaaatgacttttgttgttctttacctggtgttacatttttgtatcataatattttcttctcaaaaagataaatgctacttcatcttcttctggcatttattatacttgataattttaatgtcaacctgattttttcgtttcataactttttttttttttttttgagatagagtctcgctctgttacccaggctggagtgcagtggctcgatcttggctcactgcaagctccacctcctgggttcacgccattctcctgcctcagcctcccaagtagctgggactacaggagcccgccatcacacccggctaattttttttgtatttttagtagagacggggtttcacatgttagccaggatggtctcgatctcctgacctcgtgatccacatgccttggcctcccaaagtgctgggattacaggcgtgagctaccacgcctggcctttcataacatttttaaatggaacatttaccaggacatttttagtacagatctccattactaattttgtaattttgtcttgttttcaggaagcttttgaatctgaatcctctagtcttttccctttgtggtggcaaacacttccactagtatttcttatgattgtgcctcttccttttataacttctttctaaaattattacaatgtgtatatttttcaccttcaaatgctctcctctgatttatgggagctttctttagatccccttcatcatagtttcagttctctgaaggatytaaccttcaggtctttgctttagtttgatttttttcaatttgataatcaccttatcatgtatctgaaggactgatcttaagggaaagacaggcaataatctctaaagtattctctcctttaagagtcacttattctcaggggctcatttgctttgattcctttgactgccttyttytgaactactgaatcatttcatagaccagatgcacttctgctcctttttttttgttttttccactgggagaagtgggaggaggtgataatgtttgaacagctggctggagattgtttgaatctctgttcgaattcattgggaggttatttyttcatctgggatgatttyttcctcaaatctgcttccatcctgctytgccttacaggaattyttccggttttcatgaatgtgaaatcttccctgatttccagcacagacccatattctttcctattttaactttttttttttttttttttttggaggcttcaattggtatgcacaatgtgggcaggaaggtagagttaraacttttagatgcagagagagactcagattaccatattgaaccacaaatccactaaacagatcccaaaraaagctctgggggggaactgaaatatttcaggaaccctagtttacaaagagcaacaraaacttctgttctcattctttcctttaggkgtgttkgkgcataaatagtattgkgcacatggaagtcttctgctttaytcattctgtctccatctcattttgttttgatttacagaaagatgtagacaaggaattctatttgtttcctacagtatttgatgagaatgagagtttactcctggaagataatattaraatgtttacaactgcacctgatcaggkggataaggaagatgaagactttcaggaatctaataaaatgcactgtaagtactgcatcatccaccaatctaccaagttattttagtactgcatatgtaatgctttyaactaaacaaaatgtgaagagctttgctcattgattattttttcaataaaygattacaatagtgtcctgaaggtaatctcactggttatttgatgtgtctgtcagttatccattatttcacttaattcaagatatgtcaattacatgaatggtccttaaagtgtggtccctatatcagcagcctcagcatcactgagggacttagaaatgcaaattcttagacccctaccctgacctacaaagtccgaaactttggagatggatcccggcaatctgttttcaacaaactctgcagatgattctgatgaacgctacagtttgaaaactactggatcagatgcttttctcattttggctcaaaaatgacaggctcatttgattattcaatatgcagaaagatatgatctcagccctcaatgattctaacccttgactgcacattagaatcaactgggggcttttaaaaaatgaccagtgccctggaatacccccagagatttttatttaagtctaataccagatttttttaaatacctagtgtaattctaaaaagtggttagagctcagagacagtgagttcattattcaaaaggcccacaccactaatggacatcagtaaaaattattgtagccaatagaagaaaaacatgtaaagttgtgttacaaactgatttttttttaagctaggtactagtcacgctacccacaatctttaaaatatttcttttgattctgcatttttgtatatttggaagcattgagaatattawtcatcaaaaataattaaatacacaagataaagaaaaaacctcctacatatgacctttcctgttattcaagatgaattagagacttttttttttaaatctagaacagcaacacactcccagtatatggtgcacaggaaaagctgttataattcgcagatttgggtgctcacaaatataatcacttaaagaactggaaataacagaatcattgttttagccaggaagagcagtgggattcccaggttgctagggacactagcatagaacaagaactatgcattcagctctgctcctttcagccagcggctgctctgaaatgccaggaaccacaaggagttgcaaggatactcctgacacataaagcgtgggcaagcctgaataggtcttttaaaaattaaaaaaacaaagttggtcctggaaagtctgtgaggttgtcatgtagtagaatctaaaccacttccaaaatgttatttcccaacttttacagccatgaatggattcatgtatgggaatcagccgggtctcactatgtgcaaaggagattcggtcgtgtggtacttattcagcgccggmaatgaggccgatgtacatggaatatacttttcaggaaacacatatctgtggagaggagaacggagagacacagcaaacctcttccctcaaacaagtcttacgctccacatgtggcctgacacagagggtatatttacttaaagccaagtctctattggatggatttgtgtagttttggtttaaaatcctgtagcagaatgtgttgggtgataaacttatcccttccccaagcctctgaagtgcccttcctatctttgaaagagcaagtctaggccactatcagctgaagtatgtaccagataggtctgtttcctagttactgaggacaatgtggagtaaaagaacatggtgtggttttctccacttccataggctcctcaagatgatccctttttagattatggtccttttaaagatagctggaaaatcagactagaaggggaatgactcccataaatattctgcacctaaacttttcatcatgtctctgtagcctagatgtagtgttggyttgttggttgcaagtgaatattctatgctagcattgtagccatgcaaattcagagacatctacagacctggctctgaacgagtaaaacaaactacaactgaagagaaagaattttaatcaaaatgtgaaaatatgctagcttgtttcaggcttcatttggtttatcatatgccactgaaacttaagaccaccccagtgtcacgctttccttccttcaacaaatgtaaatacaacaatgaacaaaagagataagatgtctcatgctgctgaaattctaatgcagggagacagacaacaagcaagtatattaatacatatatgtcaagtgattataagtacacaaagaaaaataaggcagaggaaggggatggtgactgagaggggaaagggtcaagattctctcaggaggtgctacttaaggagagaygagaataaaatgagggtgtgaaccatgaggatattttggggagaaggcagaggaaacagcaartgcaaagktcccaaggcaggcacacacttgatctgctctaagaacagcaaaasgakggatggagcagggtgagcagaaggtgtggaaagctagatcacctgaggccatgataaggacttcagcattaattctgaggaaggtggagagccccagagggcactagcaaagaagtgacatgttttcttatttaccactccagggacttttaatgttgaatgccttacaactgatcattacacaggcggcatgaagcaaaaatawacygtgaaccaatgcaggcggcagtctgaggattccaccttctacctgggagagaggacatactatatcgcagcagtggaggtggaatgggattattccccacaaagggagtgggaaaaggagctgcatcatttacaagagcagaagtaattctccagactctgattcccaatttcagcagtaattttaggtttccttttcagagaagtaagaattacaccraattttagaaaaaaaaaaaagttgcattaaacaataacaacaacaacaacaacaacaacaaaacacttcctaggaacttgtccttattcatttccgcttctctcaatttccttaagggaaaatttccatttatcttctttgatcctttggagtcttgctttcttttctactggagtgtcttctcacattcatgtgccctcatgttgtcatttatattcaaacttaacaaaagttartgcccaaattcagagcagaaatattactccccttagcaactgtttgttgcttatttttccttcagagttttcattgttagtctaacaatcggtcatttcacatccttaaaaccgttacgtatggaatattttaaatgcttgaagatgatagatatagtctctatcctctaagaacttacaggaaaatatggcacaaaattaccagtaacatgtccatcatggaaaagtacaaaataaattctgtatgaatagatataagtagaggatgattagagcttcagaaacattaatttagagcagcatctctcatcacttctagttagccctttcttcatacttttccaagcactttcctctccatcatcccacttacatcatgcgctgaccacatggagatgatctgagagattggggtgggcaggtgttcagatccagggtgcatagcacaactggtgacctgtggctaggcagtggttacctgtttgacagcagtagtgagtatagtttgcagtgtaaaggagtaaacttttattttgtaattggggtaaaatggttaaaaggctacagctgccattaraagtaagtgaaaactggccgggcgcggtggctcacgtctgtaatcccagcactttgggaggccgaggcgggcggatcacgaggtcaggggatggagaccatcctggctaacatggtgaaaccccgtctctactaaaaaatacaaaaaattagctgggcatggtggcgggcgcttgtagtcccagctactcggaggctgaagcaggagaatggcgtgaacccgggaggcagagcttgcagtgagcggagatcacgccactgcactccagcctgggcgacagagcaagactcctcaaaaaaaaaaaaaaaaaaaaaaaaaaaagaagtaagtgaaaagggaatgcctgggaaaagatgtccatttcagttcctataaatcaraaatattggactcataaaattttaragctataaagtaatcttagagatgatctgttcaaatatctcatttgagggatgaaaaaactgaggttccaataggcagtgactagctggaggaaattttcactagtggcagggtagaggccaggactcaratggctgcactcaratggctaggtatgctttytaccacacagacttttaaagtcttattatkcattcctacttggatagaagagtgatgatttaaaactactataattactctaataaaaactatatttttattcaaaatttaaagtttaaaacttaagttacattttcattaagacaaatactaaccttagttgtttttttttttaagtgtttcaaatgcatttttagataagggagagttttacataggctcaaagtacaagaaagttgtgtatcggcagtatactgatagcacattccgtgttccagtggagagaaaagctgaagaagaacatctgggaattctaggtatgttaatatctccagtttatcaggtgtgggttaatgatgtgatgctacctgcagtaaccgtcaattcatgtctatgggtttcattttcttggttcatatatcaaagttgttcaaataaaaatttaaaaattagttatctaatgaaataagactgatgtttattaaataatatgacatagtaaaatattacttatttctcttggaaactatgtattgtcccgtatactgatgaaattatatatattttatcaaattkatgcctgtagttttagtgaagttcccagaaactattttctaatgaaattctgttttttgacagagtctcactctgtcgcccaggatggtgygtagtggtgtgatttcagctcactgcaacctgccgctcctgkgctcaagtgagtctcccaccttagcctcccaagtagctgggactacagggatgggccaccacgcctggctaatttttgtatttttagtagagatgaggtttcaccatgttggccaggctggtctcaaactcctggcctcaagtgatccgcccacctcagccttccaaagtgctgggattacaggcgtgaggcactacacctggccctaataaaattcttaaccaatttatccccattatcctacccattcctctcaaattayagctatttacttttaaaattaaaatataaatgattaattacaagaagaaatatacaaaaggaaattaattacaacaggaaataaaagaaaaaatgataccacgcacaaagcaggggcaaagctgccttcaattttttaggactcactttaagacagaatgtctagaactcgagcaacactggtcttgagacatttctttaaaactatcaattgcagggacccccactcccatccccaccccactgtgttcccatactgtcagcattcccctgaggcttggttatcctcaacccctagactaagacaccaaggcaaaatggcaytgttgctggagcacaaaaatcctaccagacaagagacaagctaagattggataaagggtagaaatgagaggggtataaatgactcctggccagatatccaacccaccatgattagaccggtactctgcaaaggactttcaggccaaacctcccctagaactcttaagagataaacaaatggtctccatttttatttccagtgtattgattccaaattccctgggacgcartataaatccaagagtattataccacaaacccatgggggagagaaacaagttatctttgctgatctttgcttttattactaagttagaccttctgattggacactcttcctcttcacttttgccaggtccacaacttcatgcagatgttggagacaaagtcaaaattatctttaaaaacatggccacaaggccctactcaatacatgcccatggggtacaaacagagagttctacagttactccaacattaccaggtactcacgggggcgggggtgggggtggtgcattttaacaggctgtacagcctttccacagattactctcatcatagagagtctggaccaagaaartgaaaagggaggtagttgtgaagaggggatgcaaggaggtgtctgtgtgtatgcaagtacatgcacatgcttgtactaaaaaaaaaagtccacaggagagcttaagagaaaaacctgaaggtagtagacatctatgaatcctcaagcgtgaatcagagagatgctgtctcctcgctcagctagaacacagctcaaatggcatctaccacaccatatgtggctggatgttcccatgcctgtctctagcacatgtggttctaagggccagaggctgccacttggaactctaaattccccctatctagtacagtatctggcatatattaggagatcatcaaatgtttctttaataaacatagagtaaaatcttgaacagattatatacataggtgagcattttctttaataagaaccatatttttcttctattagttgtaaagttggcttccaggaaaatactatttctcaataacttagcagggtgtagcaagggtgctattttaggtagagaggtcaggagrgcttccttgaggaggtggcattgctgaaaacacctaaagtttgagaagtaatgaaattcaggtaattgtgcacgaattgattctaggccccgaagacaggagcaatgcctggtgtgtgtgagcagcagcaaggcagccagaggctaaagaaaagcacacaagggacagaatgctagagatgagatccagggagagcaggggccagatggagtagggaggacctcagactcgagatttaagactgatgttctgatggacaccttttaaggggctgttggtgatgtgtggttaagtgaccctaagggggcaaggacagaatctggggtcagttaaggaccactgcaataatctgggtaaaatcatcatcatcatcatcatcatcgagatttggaatatggtggaagcggctgaagtggtgagatgttatcatattctggttccattttaaaggtggtactaaaaggacctgctggaaaatgggcactagggagtgttagggaagagaggagtcaagcatgaccccaaggttttgggcactgaccactggtggaagagcaggttgtaaaggggtgtggaaaagagaagaaaatgttattttgcagcttatgagaataagtaaaagcagagatggccagacagtaatatgtgcaggtggtgaatcaatactttatattctagtgaaattttctgcttagaaaaagggtgaggacataggaacagctcagactgaggcttgaagaaaaagtaagacgtctaccacatcacttgagaccatctctgttgtcttgcttgattctctagtgaatgtctgttggactctggcaggttagtgtgatagcatgaatatgtaatggtgtggtctaaataaatgggatggaaaatgagtgtggctgggattggtgagtgggcatggccaaaagttgaggcctgtgagcagttgcacaggaagccctgaggtgaatggaaacgcagatcagactggagaaaagcctagagcacatgggaaaagggtaagagccttggcaaagcaggagggtgaagcaactggtcgtcttcaaaatgccaaggccgagggtgtggttatgtcctgtatgtgggagtagtgacaaaacagcacatggtgtgatagaatgagatggactggagggggaggtaaacataactgtgtcaagtcggtgactcatgagatcaagaggtctaacggctcctcgccaggaatcatgagctcactaaggatgatcatgagagaggacaaggaaaggaagccaatgctgaagctgagggaattacacaaaatagtccagatacacacatgcagagattacgggaaaggtgccagccactggggaaaaatcacttggtatctgaagagaaaaaagtatattaggaaaacacacttcaagctaagaagagattggttgcaaagttttttcaaattgtaatattgaagtacacacctcctagctttgtggtatggcaagtgggttatagctaatttaaaattaacccaaaaaatgacaaaattttgtcttccagttcatcttaaaactaaattcctgaaaacaatcttgagtaccacaatttttaaaaactaattacactgacatttccagttcctgggtcctagttatcaaggctgtgtgtgtgtgtgtgtgtgtgtgtgtgtgtgtgtgtgtacaatataaaccaaatacaaccagatccattaacacttgatgaatttaggtgaaactctcacttacgtatggaaaatcccagaaagatctggagctggaacagaggattctgcttgtattccatgggcttattattcaactgtggatcaagttaaggtaaaatacaaatcatttgttttgtgacacttcccaaaatagacacacaattgaaggaagacaaggttagtgttttcctgtggtccaattctacgttaaaatcctaggaaaataaactgtttgcaatctactttagcaactatgctgctacctatgacacacaagacaaaaatctaacatttcctaatatgatacagctcaaaggcctttcaagatatttgggaagtttagatttttgtcttgtgggtcacaggtagccactgaaaaattgaccaagaatggcagtatatttgcatttcagatccttcattctggtggaatgaaggaaggcttggagggggaagagactggaggttgggaggccgttgtaatacgtgaggcaaatttcaaggacctctactgtaaggagggagaaaagaaatggagtcggttatagataggtgggtgaagtgcctgagtgagccgggggaagtagctccttgataattcagtgttctggctcaaacaaatgagtaaatctggtatttgtggtcctatttattattacacatttcattcatctatggatttttagggactgccatagcgcttggctcacactcaagagttcatgagtttatggaacaaaccaacactgttcatttgggattcttttaaaatcactgctcattagctgagctaatttttgcctctgcagacatttctgttatgtcagcatcacccacatgacctacctactactcaccattgttccaatttaactacttcaagtgaaaagttactaaattggcagtaccacatygggcaaagtctgttacttcaattggtctctccaaaattcctgaggccctgggtgcaaagtctcagttctctgaaatcctgacctaattcacaagggttactgaagattttycttgtttccaggacctctacagtggattaattggccccctgattgtttgtcgaagaccttacttgaaagtattcaatcccagaaggaarctggaatttgcccttctgtttctagtttttgatgagaatgaatcttggtacttagatgacaacatcaaaacatactctgatcaccccgagaaagtaaacaaagatgatgaggaattcatagaaagcaataaaatgcatggtatgtcacatkattctaaaacaatttttctacttttttatcattttctctttcaaataaaattattttggagaccattcatttgttttgtcttaaaataaaccacttctgcctcactttgtatgtcaggtagaatcctgttcaaaacaaaaaggggactatgttcaaaatcatttgctaatttattttccaattcyaaaatctcatttcctttgaaataatccaaaactaagattaaggcttttggtgcaaagtgcctagaaaagcaatgtgatattattgactttaaagtatccatttctctcatttgtagtaaaataagtcctattacatcaaaaagattctttacattaacctaataatcatatttkctttgaaatagctattggtttaaaatatcctgaaaagtaacataaaaccatatgctttccctagctattaatggaagaatgtttggaaacctacaaggcctcacaatgcacgtgggagatgaagtcaactggtatctgatgggaatgggcaatgaaatagacttacacactgtacaytttcacggccatagcttccaatacaaggtaagagctatccatggcaattactcttgctctgtttgaaaatgttttaatacaagtgaagaaaatattttctcagagagacttatgaaaaaaagstgcaaagagtacagccggtgcttcatatccgtggattccccacccaggattcaatcatggattgaaaatattcaggaaaaaataattccactaagttccaaaaagcaaaacttggatctgctgcactgagtactatgttgaatccatgcaaatgaaatgatatgtaggcactgtattaggtattataataatctagagatgatttaaagtatatggaaggatgtgcataagttaaatggaaatatgccattttatataagggacttgagcatccatggattttggtatgggggcattcctgaaaccaatcctccatagatactgagggatgcctatataaggcacagcaatttcaattgacacactagcctttgttacacattgagctcttcctaggatttgcatttttaactgaattttcatggagttctgctcagattcctgattaaggcaactgagcggaattgctaacaaagagggtaggaatgttcacataatgatggatgagagtagagaccacaacaagactttattataacccttgccctgcctgttctaagttctgtatcttaaatggcccatggtgagcaagatcagttaggtgacaagcaactggtctgtacatctcaatcttacttctattctttctcagtactgatttcagcagaagccagtggccctcctggaaatgctttttccttatgctttgggctaatttagaaaaggcagaagttatcaaaaagcatactgcagaaagcctgttttgttacctgcattttgttttacatagatatattgtattcttagtgggctttcaattctatccttgcagaaatagactattgtcacccaactactgtttccagccgagactccctgaagtgcctctggtttttgtcgttttcatcagcctccttttctgcttcctttattatttaccttgacttaaagcttcagacaagctaggacagattcaggcaaaagtgaggctagggctgaaatggggccacagctgagttccttttgtgtagcttaagtgctatgacaaacaggcaaaccagaatcaaggtacaggaggtttgtaggtagtcctgattgatgaattcattctcatcacatctttctttcacacccacttgatgtggataccaaagacttattaggaatacaaaamccacattttaccatttgtattaaacacagaaacgagctcgattttttaaaaacagatttatccattttttcaatatccctgagctgaacattaacaaatgacatgagtgaactctcatatacaatattatacattatttgtcatttttctaattaagcacaggggagtttatagttctgatgtctttgacattttccctggaacataccaaaccctagaaatgtttccaagaacacctggaatttggttactccactgccatgtgaccgaccacattcatgctggaatggaaaccacttacaccgttctacaaaatgaaggtgaatatccaggtagtaattctagaagccatatataaaagatataactaaaggaactactttgcctaaatacttcccccaatatgatgcatcaatatgaagcatttgtgaatctgctgccctgatttcttccttctctacctccaaacaggatttttttcctgctaaatggtgagggatactgctcatttcctgacagccagtacttgtaacagcaccagtcatttctaagttaatacaaatgtgtaattatacttaaagctgatataagggagtagtcatgttatttaccaagaaacaaaccattatttacataagacacatttagaatctaatttctttcttaacaaaaaacaattttttttctaggtggcacctccatgtaagagaagcccaagacaaccccaaataatataatttcaaataggcagtgtcttttctgtgcttccaaggggaaggaggaaccttaccgataattgtttgtgaaagatccagggaagaaacaaaatttaaatgcactgctccccaacccctgcaataaccctccccatgtgtaggtacacacacacacacacacacacacacttaaaatggagaaaaatgaacagtttttttggtaagattcctgcactgtggctgcaggctttggtctttcctgggtctttcgagttgaggattgttgtaattagaaatggtaaattcaaagggaggaaattatgtaaagaaaaccaatctatgtctttcctccctaaaatggggaaaaagggaacatacaaatgaagaaaatataaatgtaaatatatttgaagatttaaaaagccctgaaaggttaacctttagtgcaaatggaaagttttaatttctgctcctgggtcttacacaaacaacttacatcatgaaaaactatttccattaatgccctttttattagagcagtcactgataacactagaatatcaaagactctaacagacaagccactaaatttaacgccaataacttgaacaaagtgaagagagccaaatatgagaaagaaaactttagtctttaaataacacttgcaaccatgtggttacatgtggttgcatgtaaaccacacaaaaggatggtcttgctcaaaaaaataatggtgagtaagtaacatggaggcatttggggaattcatgtgtgcaaatgcctggcatgcagagtatggcactacagggtaaccctacacacacagccacagagaagattcctcctgtgtaacaaccgtgaaagaagagggagattactgcttggttaagaaaggcgagatagtttttaaagctatagtaaaaattacagaacaaatagcaaatatgaagtaaaaatcaacactagataaaaaattaaagagaaatttgacttttgcaaagagaaaaggtattgcatgagactgaaagcagcagactgaataaaaaaagatagtttgaactatctttggcccataaaatcagtggccatgtttatcagtctgaatcatctttaaataagtccaataaagctttgagcaagtttacattaattatgagtcttagaaaagcctgcttagctttaaatttcttacaggcagggactatatattctgtatttctagctaagtacccaaatccaatacaatagtttgcttactgaatgtataacaacatattaattcaatgaagagaaacttttgaaacttttttgacataatttcagattcccatatacctttcacccagattccccaaatattaatgatgtgcgtagccacattggctttctcattcttttccctatctccctctcatgctcaccctctatatgtacacacacagacgtgtatagatacacatacaactatctttcctaaaaacaagaatattcttgtacatgaccacaatacaatgatcgaaattagaaaagcaacaatgatttaaaaactagagatcttcaaatttcgctaataatcctaatcatgttctttacagaaaaagaaaatcccggatcatgtactgcattgttgccatgtcttttaagtctcctttactctgaataattccttaatamagggcactttgtagaatgtccttcaatttgagtttgtctaatgtttccttatgattagatttaggttatgcacttttggcaagactatcatggcatgatgttgtgtttttcttagtacaccatatcaggaggcacaagrtattgatcagttctattactggttatgttaacttcaagctttggttaagatggtgtctgccaggtgtctccattgtaaagttattcattttccctttacaattaataaagatcttgtagggaagaaagtaatctttctttaaataaagcagcaatagaatgagagatttttaaacatataaaaagcagaaaaatataaatgaatcaggagtaaagtaacattaaaaattggaatacatttaaagaaccatctactaatttctaaccatatattatttttaataatggtcttaaaatttctttttctatagacaccaaatctggctgaatgaaataaattggtgataagtggaaaaaagagaaaaaccaatgattcataacaatgtatgtgaaagtgtaaaatagaatgttactttggaatgactataaacattaaaagaagactggaagcatacaactttgtayatttgtgggggaaaactattaattttttgcaaatggaaagatcaacagactatataatgatacatgactgacacttgtacactaggtaataaaactgattcatacagtctaatgatatcaccgctgttagggttttataaaactgcatttaaaaaaagatctatgaccagatattctcctgggtgctcctcaaaggaacactattaaggttcattgaaatgttttcaatcattgccttcccattgatccttctaacatgctgttgacatcacacctaatattcagagggaatgggcaaggtatgagggaaggaaataaaaaataaaataaataaaatagaatgacacaaatttgagttttgtgaacccctgcacagatggtcttaaggacgttatctggaactggagaaaagcagagttgagagacaattctatagattaaatcctggtaaggacaaacattgccattagaagaaaagcttcaaaatagacctgtggcagatgtcacatgagtagaatttctgcccagccttaactgcattcagaggataatatcaatgaactaaacttgaactaaaaattttttaaacaaaaagttataaatgaagacacatggttgtgaatacaatgatgtatttctttattttcacatacactctagctaaaagagcaagagtacacatcaacaaaaatggaaacaaggctttggctgaaaaaaacatgcatttgacaaatcatgttaatagctagacaagaagaaagttagctttgtaaacttctacttcatttgattcagagaaacagagcatgagttttcttaaaagtamcaagaaaaggaacaaaaaaaatgaggtttgaaatcttttaccatggcaaaacattaacatctttctcaaaaacatagagaaatctggaaaaatcaagaagataaaattctggaccagttagtgacattctttcaagcatacttgtaaaatgtttccttaaagtgttcttgggatgaaaatgattgtcatgtctccaacaacagtgaactgatgttgttccttggaataaaagtcaatccccaccttaaaaaatgtatggcttctttgaggaattcttatgtcttaaagactttttacattctagacaattaaattgattgaggtcataaattaagaagtgaatagttaccactacacggtaaggtaagcagcctgaaagcatttgtatcatatatgtgtgtgtgtgtgtgtgtgtgtgtgtgtgtgtgtgwatatataaaataaaaaactcctctacttgtactttggcattcaatttttagaaattcagtctcaaatgccattatggtatttttcaaatgatacctttaagtcaatggtttctttcgactgcaatagagaagatatggcaagaaaaatgttgcagtaccatcttctgggagaacattcatgaaatccttcagttctagttccacagcaacaattgacaatgtttctgtgtagaaaagaatatctgaattagaattgaaagtctgtctttcattcaatctcttcttacttaaccaaccaattagaagccagttcaggccaggcgtggtggctcacgcctgtaatcccagcactttgggaggccgaggtgggcagatcacgaggtcaggagttcaagaccagtctggccaacatggtgaaaccctgtctctactaaaaatacaaaaaaattagccgggcatggtggcgcacacctgtaatcctagctactcaggaggctgaggcgggagaattgcttgaacccttgaggcagaagttgcagtgagttgagattgcaccactgcactccagcctaggtgacagagcaagactccatctcaggacaaaaaaaaaaaaaaaaaaaagaagccagttcaggtaacaaaatgttataacttcaaagaaaaaaatcagtctcttaaatccataggcttcaataaggttgtaacttatttttccttactagaatcctttgaaggttattttatatcagccacatgaaatttggatttattatttcattgctgaattactatattattttgcaatcaatttctactatcctctaaagaaaagtacaatcatttgaatattctttttaatgctatgtctatactaagctaatttataaagattgataggataagaaacaccaatgttttcccgtattagttcctaacgtaacatttcatgttgttaataagcacaaatctgttttcacgaccatttacttccttttcccccaaactgcaatggtgttctaatgaacaatatattttttttttttgagacggagtctcgctctgtcaccatgctggagtgcagtggtgcgatctcagctcactgcaacctctgcctcctgggtccaagagattctcctgcctcagcctcccaaatagctgggactacaggtgcgcaccaccacgtccagctaatttttgtatttttagtagagacagggtttcaccatgttggccaggatggtctcgatctcttgacctcatgatccgcctgccttggcctcccaaagcactgggattaccggcgtgagccaccgcacctggccccagtgaacattttaaatattaaggaatgtaacatacattaaaaaaaatgcaactttatgattctacagcttcttaacagatacatgctgccctctcccggaatagaagggtgacagttatgaacaatgttcccaataaacatccacttggtcttacatcttctatccacatgtcagtgccattccctgtgtgatcgttgcatgcccatcgcttactctatttgcagagtaagtgaaatataagatccattccaaagtcatctgtccaatatacagcaacctaaatttttctttacacaaaagaatgaactgcctttgttgctaaagagttaatgaataaagcagcaatggtttatagaaaagattcctagttctggaatccagacagacttgggaagagatccagactcttccaccaactcaccgagtggctttaagaaagtcacttaatcttccaagtcctaggttcctcatttataatgtagtggtactgtctgctagcttccacagttcccgtgaaaattaagctaaaatacaatgatgcacatctgacataaaatcagaccttaataaacagcaactactaactagcttgcaaaatgtatgtgaaaaatatgaattattgatgttttcctatcaaagcagtttacttacctaaatgtggagcctgtaagtagcatctcagaaacaaaaaaactgagttggagagctagtgtggagttgttatagagtcaacaaaaatctcaccacttcccaattctcctcttctcccaaataaggaggggctaatacaggttatcactccaagaaggtcaatatcttaaattcacagagtactttaaaaattaataaagcactttcatgtataacttctctttaattccttctagaatcctttgaggtttttatttatttaatccaagccccatcccaaatagggtaaactaatgggtattaggcctgatttagggttgggaaaattgaggctaagagaaggttaaaattacttgctctactccactcaccagctacctaaatctacaagttacatataaatgatatatctaaatgtaaacctgtacccttaaaatcttccagcatgtctagaaaatatttgtcaaaggttgaaaatttctggatggtgggattttaaatgatttttaaatttaatttttgtaatttaccacagtaccagaattttaaaaaataagcctggttcattacaaaaacagtactgaatatttccctaaaacaaccaacccatccactaacccattttaatggttctgcattagtgtggcagttgtcaaccaggaaaattttgtcccacaggggacatctggcaacatctggagacatttttgtttgttataactgaggcagtagtattggcatctaatgagtagagaccagggatactgtttaatatcctaaaatgcacaggggaaacccccacgcacacggacaattaccaaggttgaaaaatgctgtattagagagataagaaatccaaactcctaagcatgtaagtccctgagcttcatctccaacctctccctcttgcaattttgcctaacatttaacttttgattcagtcctgaacttctcatttagtctcacgacattagaaaactgggttgctctcggacacttagtaagtggcaaacctggaactcagttccaattctccagatcccagtacagggctcttttcagtgtacaactgttaagaaaacacccttctgtgaaacgaacctaaagttcttcagctgtctccctttctaatcaatgaacagttacagaatgcttcctataggagaggcatattgctggtgaggaatgtgtagcttgaaaaaatgaataaaacactatgccagctcttgaggtattacagtctaataaaggtaaatcacacatggcacttagtctcattagccatacacacacacacacacacacgtatgcacacaaatatattttgaagacagagaaaaatgcaacatttggaggaatgattatgggtgagttggggtggagtgtgtggatgtggatcagaaaaggatgaagaaagagtcttctgattaagataatgatgatgctgaggtgtaaagatgtgggatgtctgtactggaaagtgctccactaacacaaacagtcagtgataaattatgtaaagtgtatgcaagtggggcaaagtaatcagacatctgacacttccatcttctgaaaacctaaagcaatcagggagacgggtaggacagagaataaagttccccctttcccttcccaatcacaagcatacagctttaattaaagggggatcttcagaaaaataatctccagtggccactgactcggccttacattttaaaaatcaactgtcttggctggaaaacacaatttcaacactgtcaatttctaatattttatgtgctctgcaattgatatacccataccctttgtcattgggaaaacaactaattatattaacacacagcagtatagaaacagattacatatctaccaagatttatgattatgaattatgaaaattcaaataactactatgctgtaaaatacggtacaatttagatactcaacttttaaatccttgaggttgttattcatcaatacttgcttataattatgtttaatagtaatgatcttaacttcctacatgaagtaaattaagtactctgatcattgataaaagatgtaattgccttaatgactactcacattttaaaacactgatgctgtcattttctatgactgtgataatttgttaagtgtttgaaaggattaagttaaaagaacatcagttctgtgactaggagataaatcaatatcaaatgtcaaggggagggtacgtgaatgctgaaaataagctccccagatggttctgaaaggccctcggtttcacttgagaatcatatgaaaatacttaagaaggcttcaccaaatttaaaactgaaacttaagtttataatcaagcaaaaaaaaaatcattttaccttttaatgatgacaggtagagttgatacttctctccaccacattttattctctgacaaagttcaggcaacagttttttccaccacagagtctatcttaggaaaaaatgaataaattttagtttgatgcattttattctcagatttcaaaggagaataagaagattgtgcaggaaagcacagagcaaaaatacatcattttgtctaaggcagctaactttgttataacataagttatatcagcagccagtcttctgccttaactataacgtaaaagtcaggttcgtaacttgaaaacccagtaatacatatattgtacatatgtacatggctattttcaagaagtaacagacatatcccgttatcatctcctatgtggcaagaaggaaggaatgaagaaaaaaaagaactaaggtccaaaattcttctaatttctaaactaaaaaccgtatggcagagaaaatattttcccatcatacactgttcccaaatcttcaggtaatcaactacttcatctccaaacaaaagatgtttaatgatgataatataccatctccatatattttaacagcatttaatagtactcaaaacacgtaacatattaaacatatatgctcaatggacccacacagccttatgatgttggattagcataaattgtccccattttgcaggaaaggaaatgaggttatcaaatctgattatcactgatcaagcctaaaaacataatctgaaaaagcatacccggttctcttctttcagttcatgattagcatatggaatgactgcctccgggcatctctctaacagtatgtctatgcactgttcatactctttcaagcgtgtacgacacagaacatggacactgaggccggcaatagtgtcttctgaaagtggctccaagaacggaataatggaagctatgtcaaatgaaggaccacatataagagactatgaacagaaaagtgaaatgttatgaaatgaggcacctcaaaaactaaaacacaacatgcagaattcaatttcttaagactaaacctcacttgccaaaaataaaatagaaagaatgccatattagagcacatgcacgtggtccttatttaataaatctaagtataatataatcttgaaactacctctagtttaaagatctctttaatagaaagcaatcatttttaaataacatgattttatttgctttgtgtggactgcaaattaaaaccaatgggcattctttaggactctatcctaagagaataatcaacattgtggttaaagatttacgtccaatgatgttcaccgcaagagtattcgcaatattgaaaatttagaagtaatctacatgtttaacaacaaaggatgagtaaatacatatggcacactcagataatggaacattacacagccatcaaaactatgttttcaaaggctagttaataaaaaaagtttatgataaaatgagtaaaaaaatttcaatacaaaattatattctgaacatgatcagttttataaaatctacataggtaaatgcacatacagaaatactgtcggaagagcatggcaatttgaaacagcacacaggatgggacaacaaagcctactctttgttttctttacaccccttcctgtagtttccaaattttctataagcatgtgctacatacatatgcaaaaataaaatttaacacttaataagactaaagtgattgtttagaactaatcattgttatcaataccac

SEQ ID NO: 93890 - DNA, 32222 bp, Homo sapiens
tttgtaattaaagaaatgcaaattaaaaccacgaagagatccaatttttaacctattacactggcaaaaattaaaaatttccattatacccaaatgtggggaaagaaacattctcatcactattggtgagatgttctttaagattaatacacagcacaacctagctaagttaaaaatgcaaatatcgtttgacatagctattcttctgtgaggaattgatcctaaataaagatatgcttccaaaagcatgtcaacaatagacatgcatcaatgtttgtattagcaaaaaccaaaacaatctcccaaccccatacagcctaaatatttaccagaaagctaatagttaaataagtgatggtacgcatatgtcataaatactagacaatcattaaagaaaatggattacactaaatttgctgatatgaaaatagatccaagatatgagtcaaacaaggtatagaatcatttatgcaaaattattcccttttatatttttaaaagaataaatataaagaaatatatatgtatgtgtgtgtgtgtgtatatatatatatatatatatacatctataatatctatattatagataaatagagacagccatgtagctcaatagagagatgcataaacattgttccggaaatatacactggaagcttatcaatgattactttggggaaggactagctattgatcagcaaatagagcacctaatatttataatttcctgtatagtattaatatgtaactatgtgtgtaacttgtttttaaatgctaattttaaaatttaggcagagaaaatcttactcccacctgattctttcaagtaatgcttaataattgaagaaattccttgaggtgccacaaagttacagtctccttctttcatcaccattccttcaataggcgagcttagaggcctcaaaacgccataggctaacagttcatcataaaaactgaaataaatcaatatgtatatttaatgtaattatataccatgaatagctctaaaagactatattttctttcaataattctcagaggttataattcaaaatcaaaattagatatcttcctatgaatattttgtattaaataaaatgtataatttgtgttaaataaaacttataatacaggtgaagaagagaaatattttgagaatccataggtcgtttgctgactttagtcaaaggcctatttctctgtaagcatattttaaaagtaaagttaatgaaaacaaacaaatgtatttagtatatcaattttaaatttggttcagaagattgactcccatcacagctagttgccttcttccataacaccaacatagcaattgatatttatcgagcccttactatgttccatttatcagctaatctaatcttcacaacaaccctatgacatcacacaactgctaagattgattccactccttgcaactaactcaccgttggtgttttttggcataatgaggagtgcaggtgatgtactgagcacccaagtcagctgtgcactgaggattatgaggactgcaggctgtagtcattcttcccccttgaattaatccacaggaaaatgtcttactgcatgacaatgagccttagcaattaattcaatgcaccttaggttaccccaaacagattacttcaaaaatatcttaagaaacttttttaagttgaagtatttgatcagattgtgagattttagaaggagtcatgaacaatgtaacagtgtccagcaccattatagtgcatatatttagtaataggagtcagtgaatggataaaactaaaaatgatgaaagaaatgtcagaataaatgagtcaactaatgctctttcattcatacagtcaatcttcatgagaatgacaggattctgcaaactagatcttcagaaaatcttggtctatgatcactttgggagtctcataatctgcagaaagctgcaaagccaacagacagaccaagacaaaaaatctatttattagggacagcagtaggcccaagctttgcaaactcgggtcggggcccctcccacgccgctgtctcaggtctccctctgtagagcgcggggtactcctgccgggcccccaccctcgcccccaccctcgccccttcttgggccttttcccgggcggcggaagtccccgatcacgtgacgaggcgcgccactcggcgcatgggccgcgctacacggccgctcagggagctgagggtatagcgttttcgccttagactttcttgggtgcaggcccacaccacctcagcagcctgcccggcagtcctcttttcccaggttttggcgtttagacaacccacctgagtcctcagccttgtcccacacagcaaggtacaagggaccggacgtctgcctcctcagcagcgcagcgcacaagcttcctgtcatcccggcgcccacgatcagcacctgcgccatggcgagagggagcagcgatccgcgctgagtctctgcggcggggccgttcggcccgggctttctggaaaggcggccgaaccggcgctagcgctctttggttccgtgctccctgggccgacctgggccctgagctttcctccggccggcctgcagggggcggaaaggaggcggccggagctgagaggcccctccgtccttgaggagcaaacctggggctgcggagaaccggggctgtctgtcttctcgctttgggggccgggcgccctgcccctcgcccagaaaagcctggaaatggtgtgggctattgttgggagaacccgcctcgcaacagagctgacgttgaccacagcagagaagcagcttaacctatctactgcgataactctcatgcctgttgggatttttgctgttttactattctagatttgaaagtgggaagaagaatttaccagcgataccacgggcaacctttcctctaatgcttgaacggccactattagcataatagaaacatcttttggaatctgggagacatttttcttagacctgggactttgtgtaaccttcctgaacctcaatttctccatctgggaaatggaaacaataacgtatacctttcaaacttgtaaagattaaagacagttgattcatcagaaaattccaaattactcttcaataagttctatgtcagaacgcattccgtatgttctaaggaatataaagatgaacaacaagagaaggattggtgccattgccgttgtttttttccccctcctgacattgtactggaagttctcaatgaaacaacaaaggcaatggtaatactgaactattaaaaaacaaataattaagttacgctgacttgcagataaattattacctggaaaactaagaaaccgaataagtatcagaaccaataagaaaattgacaatggtagccaattataatggaaacatttaaaaatcagaatatttacttcatgtccacatcatgaaaaaaattaccatgtatcaaatgggtgacgaattaatactagatatatctaataaaagaactagaagaaaatgtagacgggcatatatgactaagaagacatttttaagcataaaaatgaaagatggaattgaacagaaaatacataatcatttacaacttgtgtgttacaaaatacacaaaacaaaatacaaatagtaaatttctgaaaggtgtatgaaagattaaagttaatattatttaaaaacattattcaaagtcttaaagacacaaatgacaaaagccaaaaggaaaatgtgtatatattggatagagttcttgaataaaaagaaatacgtaagtccaataagcatgtgtttaattttttatattcaaatacaaattaaaatgaggtactatttttcatttgttgagttttttgttttttctttcttgagacagggtcttgtgtcactcaggcaagagtgcagtggcacgatcagggctcactgcagccttgacctcttaggctcaagctattctcctgcctcagccacctgagtagctgggactacaggtgcccaccgccacgtgtggctcattttgtgggtgtgtatactttatgtagagataaggttttgccatgttccccgggttaggaattacttttgtaaatgtaaaaatgtctttttttcagggatacagcaaaatacacaatggtatattactgatggaagtgtactagacaaatttgtcataatacagtctgatactatgtcaaaagccttaaaaatatgccatttaaagcagacatttatcttggggaaatagtgtacaattatacattgaagtttatgatttttctgaaattaaaagttcagatttctctgaaattaaaagcttaatgtgattcacagccatagccctaaaatctcaaaatcgtcaatctggaaagtacatttgcagtaatctatttcaactgtcctctgccaccattttatacacgttaatacagacactaagttcaagtgagtttgcccaaggttacctatcatctcaacggtgaagcaagggcaggccttcatggtcttctgagtctgctctcctgctcttttccatcctttccagcttcctcatttctattaataatttgatcatcatggacaatgagacttgaaacttcataattatcttctatagcttcttttttctcatccttgatacctatcagccctcaggtctttttgaccgtttctccattgtctcttgaatcatccagtcacatcagattgtacaacagaaaagttgctcaaattccatttccaccagcaatggtagaaaacagtgaacagaatatggtaaggtcggaactttctcttcactgcactctgcccactgtgaacgtttaacatttcaaagagtaattgccaaaaaacgaattcactacttgagttcaagccattaggtttttttttttaagccagtcaaatttagcagtggagggttgtgtatcaactttagtgacactaatgttaataaattctgataacccactatcatcacaccagttcaggccatcagttcttactgggattattaccgtagctttctaactagtcttcctacttcccagttctgcacccagcttctagatgtcattactatcctcaaaaactttctgtagctctcagtttcatacagaattaagttccattcattcatttggcataaaaatgttcaataatatattctcatcctacagttatcacttacatttgtgtcttcatttgttctgtgctttcgctaaactgaatatctttcttttccttgaacacatcctcagattttccacttatctatggcagaagaaaacctttacttacgctgttctctgtgtatacagcatcgtttttgcttgcatctcctgcagttgtgaatccgcatttatctttgtcttttttctttctccctatgatcatacgctctttcaaaaacagttatccagaattttggattgctatggtcatcgaatggaaatagccatagtggtttgcaatttctcattacgccccaacctccatgggttacatctgatttcacagttaatagcataatgggtccttggttgactacttggcagtagtgcagctttctggaaaggtaagaatgactagatgacctagaatgactagatcacctaggattgcaagataggtgagacagcccccatgtctaatatttattttttcctaatcaccttgaccttttcccttgacttttttcctattcttgatcttttcaaggctgactccttgaatgacttcattcaaatcagcttaaaagccacctaaaagaggtcttctctaaccacttgacctaaaatagccacccagtgactccctagtccattaaatgatggaaaaatgaatgctttattttcttcatctcaatcccttttagaagtaatctcacttttttacctgtttacttatttattatttattgtttatcctactagaatttaagcaccaagagggtagaaattttgtcatgttcaacgcagtttccctggcaactagaatcaaagttagaattctcagagactatgagggttcactatctgtttgctggaagatatacaagacttttgaggataatacttaaatgaagatagaccggatggtaattcagttggataatgatcagtgacgttgaacttcttttcatgtgttcattggccgtgtaaatgtcttcttttgagacctaacaatacttttaagactgttgcttctatatttgaactcctttaagtcattatagactgcatagtcactacttgttgctgttattacaataactgccagacagaaaaataaatctacttcagacttttaaggaagtttcatatcttaatacttttaattgctttttaatggacactagcgggaaactatcactaacaacctctgtagtggttttctcattttcgtcaagatgtgaatgtatttggattaacgtatgggaaaggggcttgaaaaaaataggaagctgaatttaatattgccttgagctaaatgttctctttttattttttctttttagtataatatgctttttcttagctttcctatgactctacttagcaacttttgctaaaagaaacacaatatatgactgactactttgaagacacatatattggacacttaaaatcaacaaaagcagagaggtatgatataatacttttcattgttgtgtgttgtacctagagtcaaactaatcattttaatggcagaagctaaagaaacataattctcaagtcatcttttaggaaattatattgtagttgtggattaatgttattaatattacagatatttgatatcttcatattttgtttaagtacttttgctaaatgggtgatagcttttaaaaatcattatttaaaattctggcaacctccagttttagtgctgtggtacaaaactacactttttactcactttcatctttggctgccttatgaaagtttgcctcttagcagagcaaacaccagtgatttgctccatggaatagtatctcaccaggcaaccagcatggatggaaaattatggcaagtaactcaaattgaagtaataatgattacctgctccattaggtacaaggtttacaggccaaggtaatattttaatctagtagtagtgattacttctatgatatcttgcatgaacttaataaatagcaaacgattttatccaaattattatttcaacatgtattagaaaaattattgatgagatattttacattatctttttttgtaaaccttcaaaatccagagtttattttacatgtataaaagatcttaattctggagctaaatttgtattagacacacttgaggtgtttttagagttcataaaatttacacctacaagagtagtttcacatacctaaattgtttgaaacatatttaaaagtttcagtaactgaattgactataaataaacaattttctcttatatttgcatctactatgacaaaattatttatcttttttagaaaaattgattagactttgaagtaaaaacatatcaacttaaaaactctatctctccaagttaagtatatttaaatagctcatgtcaacttaaaattattaatatcaaattcaagtttgagttgcaaagcaactctaaatttattaatatcaactatttttcttgtagttttgtagccaatttatataaatgctgttgtttagaattaaaatctgcatattgattcatgttagaaaaatgtgtaaatcattattattgaattgcattatggaaagttttcatttcaacataaagtctagtagcagtttattaaggtaataaatgagcttttccattcagcatgatatggatgaaaaaacacgtcatcctgccattttcttgttttcagttatgggatatttgacaagtattgcttttgtttcaagacagtcttgaatttggattaacaatacagaaaatcttataaaaatttaaagttgtgtttaacagaaaaatattttacactgctttagctttcatattaaaattaatttaactaaaataaaatattcagtttctcactggccacatttcaagtgctcaatggccacattctagactttagtgaactttttcactagttgctttgtatggttgatgagtcactgcaaataataaggttaatttcattcagtttaaacatttcccattggtggttattaggagtaccacaactatatatcaaaggcttatccctctgtgttttctttgkataaaaatattaaaatttgggtaaatatttgaggctataaattgggcagtcaaaacctacatgcctggaacagtccagattatgcctattttcccaagaaaattattaatagaattttattttaaaaggtatcttgtttcagatgatagtctatacattccttctagatataatgcaaagcatcttaaaacctcagctaggaagcaagcagtgtgtagtaagctacaatatcagttaatacattgtacagacagagaaaatatttcttcccaagctatttccatgtacttatctgagacagcccatgaggagagagaactgagtagacttgctgcctgctgagcacttttccaagaatacaaccaaagaggaatatctaaatgtgattccaaatgttataaagtttttccatgtgcagttaaattagcagctcttgctcttctctttggtagaagatattgataatgctgttttaaactttgctgttgccttcaatgaaaaccacagatattataccaaatataaatacctggaccaaaggaaagaagtgcagcttctgtaaattaaagttttcagttagaaagtgtttttttaaaaatgaatgcactttaaaactttcagatttacataatttttttcaagcggtcagtgcacaggaaactggactaataaatatgtaagaaagacatatcaagtatgtgcatgtaaattatctccctaaattgcttgtaatttgttctcttgcrtaaggaggattgttacatattaatgtcagctctatgacagatattacactaatacatcatattacattgatcagatttaagttttataacaatcctgagaagtaggtattagttgcattttgtaggcagggaaactgatgatcacagaggttaagtaatctgctttaagtcacctagctaatgagtggtggagctaggggttttataatccttgaatcatgtccttctgagtatagtggttggcttattatacaaggctcataagattagtaagtcatgcttttggggggagaatctggatggcagcctctgtgggtacctggtttattgttttaagaaaaaacttaagagttctgccttcctagaatttaggagactcaaaaatcacctatctgtaaaaaaagtaaaatgagttgctgaatgaaagttatccaagcttccaaatctccccgttctttcccctccccgctaaaaaaacaattaaatatatgttaaataaatgttaggctggtaataatactattacagcattaattcacacatcaattaatttgtaatacatgataaagctctcagaattggactgtgcaatactacaatggagacttctaagagggaatttatctacaaaatagggtagccagaaaagcatggactttgaaattaagcagtyctgaatctgaattctgactgccagttatacattttatggttttagccaagttatttaattcttcaaagcctctgttttcttacctgaaaacartaatatttcctacctcatagaattattggctgcagttttataaatggtattatttgctgcaattttaactgtataaacatctcccttttatatataggtcccaaacgtggtatcttttcacaatgatgtattttatccgaattcttggaattactcatggtgtctttcaaaattaaagatctgtgaaacctgaagcagatatgaatattgtaagttgttagaaaataaatctggmytgctgaaataacagagaatgctacttttcaaatttggaattttaacttaatagatttacagtcaaacgtatacatctatatgttaatatttctcatctgctattctatagcttagtttctccttcagccttattctatctttgtaatgaaaaatgtgtaactatattcatactttcacatatttgaaatatatattcatatatatgaaggtatgaatatatatctccttctcttctacatatttataaatatacaaatttcagatataagattagatatacacatagacatgcaaacatttatggatgcatgtatatttttaaattgtatacgagtgggtaggtaaaagtatgagagactagtagttaaaaaagaaaatattcttgagatatctctttgagggtaggggtttgtttgtttgtttatttattttattctttcaatccctagtatataaaactgctgctcagtaggtattttacaaatatttattatctgtatgaatcagtaaattagtgaaaataaaaatagataggcttgaggttgagagagaataccaaggttcattgtcacataatgcgttagaaatggcaaaccattcaacttaattggataacaattttatgctaaaagatttgctttttctttatctagagccagattatttcctactggggctaccctgatgaagaatatgatattgtaaccgaagatggttatatccttggcctttatagaattccttattggaggacagacaataataaaaatctaggtaatattcaattgaagatggattggtgacaatctggggcctgaagttcttaattgctccaattgacggagaacataggacaagaaaagcatcttaagattaagtgaatagttaacttcccatgtatcttctcgcatgctacaagaagagtcacacaagaagatacaccggccttctggtcacagagaggttgtgatggaacacaagctgttcttcccaggtttcctttgtggatcactttgctcttacatgttgattctctagaattttctttttctgatgagaaattagaaatgctctgaaacacaataacattattatgctctaggttttgaagaaaggctggtacaaatttccttttttgtctttctgattctctcctctagaaatagcagagagatgaggttagtagcagcctcagggctctttattccaacagtaagtatcatcagagtgtggtgcaaaatgcactggaatttgttaggagatctgggttgtaatcctagatctgccacttactagtagaatatgtaatggattactttttcttattcatataattacccaaataaaagccaagtattttctccttagcttttcttcctgaaagaatgtttctttcagaaggaaacaggatgtgaaacaaatagaatgtttcttatattatagggcatcctctcaagttattttgaacattaaagtacacttcagagaggatattaatttgaaacaacctcaattaacataattttgcatatttataaaggttatacccagtagcagaaaatcttaacatagattttatataataatagtaattatcccccaagctatgacctcattttacaagtactgtattaaagatttaaagataattttaaaacacagcaagtgccttagagtgctctaaaggcagagcctgagagaggggttcaggtacatgtgactgattgatgaaatactgtcaggaggcagtaacgtggaaattaggataaagtagggtaaagagttaaggaataatataatatgactcagcttggggctagctaaaagatgatctcagaggagttcaaggttcccataaaaattacactacagaggtggtcccaccctgagattagagagccagctttttgcattcctaaatcagttaatcattgcctgaaggctacccctagaaggaggtgtgatctcttaggtgaggcagttccaatttggccatgggcaattctacagagaaaggagcaatagtaaacccttaaaaagcaacactagggccataaytagtattcataaatgtcctcctccactatccattctagatttctttacctctcagctagcctgmctgatgagcaatagtaaacccttaaaaagcaacctaaggccataactagtactcataaatgtcctcctccaccatctattctagctttctctacctctcagctagcctgcctgatagggtaagccagaccttcatccctaggggctaacatattcatatcaggtgatggttgcacttgttcatgtacagttaaaacagggcatagaagtaggaaaagatgactcagtggatctcctgaagagcaaatgtatttctccctttcctcgttttgtagcagcagacytacttccttatgatgatcagggtcaatgaacttcctggtcttcagtaatgaagagcccaaagtgaccaggcggtggtcatagccttgtttgttaggatgcttacagtgccttggtggaagcattttctctctggagaccagggcctctagatatgtagaggctaaaattgtgagaacagatccctaaatgggttactaggagtcatggcaagctcttgttcctcagactcctgtattctacttattggggaatcactaatatattctcaccatttttaaaagatgtacaataaatcctgaaggatagtgcccatacttacaggatgtcatctcccagctggctttttcccagctggcttttactgagcattcaagggcttgtttcatttttctatcaggttggcagcctcttgttgggagttatatggtaggaccagtggataccatggccatgtgccaatggatgtgtcaactttgctatgtaattgatccctgatttaaaatgtgttacttaaaatgtgtatgagtgcttgaattactataaaattttttattattttctctcagtaaaatgtacatatttaagtgtgatgtgacctaattgctcacttggttatttgaaagacatccattagtgaactgtattaaacagctctgtcatacaacgggattaaatcttaataacttaccccacttatgaaaacaattttttaaaatctttaaactgtcatgtactaaaagtttgaatttcagataaaagattttcatatagataactacaaaatttataaagaactttctacatttttttctcagctcagagggttgttgtatacttgcaacatggtttgcttacatctgccagcagctggatttccaatcttcccaacaatagtctgggcttcattctggcagatgctggttatgatgtgtggatgggaaatagyagaggaaatacctggtccaggaaacacttgtacctagaaacgagttccaaagaattctgggctttcaggtacaaataaaatgaagtaacatttcattttataagtgtatacaaatttttcattttgaatgcaataaaataaaatttaggtcttactattttcacaatttaggactttccatagactattacaatttatgtgaatttttgcttgaaaattaaagagtacttgtgtgattttgagtttgattcttacgtttcagcaataatctttatttcttacttagtaccttactgaccaaccccatccttcctttaactactcttctactctataactcatatattttgtctrccctactctatttttcatatacaaacaccctctttataagactgccttgtgattttatttccttgagtttgagttcccacagaagtctctattcagaagatatattataccgtataacttccttattaataactagagtagaaaattgcctttattcagttatctcttcattattttcaaatactaacataacattagtagaaagtgctatttttattttcctctttcttttgtasttttgaygagatggcaaaatatgaccttccagcctctattgatttcactgtgaagcaaaccagacaagaggaaatattttatgtaggccattcacagggtactactattggtatgccaagaaagattattgctaatatcccttaatttcttttttaaggttgtgcrtatacttcttaaagttgtagataagcttctagacctgtaagtaaaacaaaaactgtgagacaaacatagtacagcagaatgccctggaatcttacatgctgctttgatcccccatggagtcttctctagtcacaaagaattgattgtaaagacaaggttggttgtggttttgtttgtttcaaattgtataaaagttggatatctatgttatttaagatcaaagtgagattgccactattatttgttctacaaatagaactttcacattatttttccttttaaaaatgtagcataggatwttatgagtggaaaagatgaaaaagctatgtatgtttttgcatttcggactgatcaaacttaagaaatgaacaaaaatcaggaaattctttctatatttaaagatgactagaaaagaactttaatcagaactctaatgcctatctaatacataacaactttactttcggaaataaatgacctatgacctaacataattctcttgcatggtactgtaaacctctttacccactttgcagggagaaaaagccatcttataatgaagctaatattaagtaagtcatttctaagctgaagactataattttcttatagaaataatccacttcctattagaaaaagcatgttgagtaacaatctaatcccattttgtatagatcttttctctgacatgtattagccatatatgtgacttttagtccaaattctcatcaactattcaattatttaaaaccaggaatgcctgaaaatgtagaaataagaaaaaaaagtgagtaatgagtgtcagagcttgtggacttactatatgatatataattctttggctgtttggcttctcagaacctgacctaaataaataaataataaataaataatcaatcagaatattgatgtgtaagtagatagcttgataagatggcaaagggaaaaatgactatttttcacattaatgcctctaaattgccaataaaataagatgcttagtatcctctgtataagaagataaggagttttaaaatatattgaagataaatattaaaatgatgggacatttattaagcctgtcacctaaattataagattcatctgtctgaaaatttcacatatttcattttcaccactgcaagttataaaaaatgttcaatcttgctcctaatttttaaactatggcattacatgtctgatttattgctaaattatcattctttatggtctatacattttagaaacccaaattatcagcattatattatgatcaatataatgttgtatactaggtgatttaaaaatgtttgataaatgaattaagaaataagttaattgttcagaaactatttttgaacttactcttattctccttggtgtcatctcttacatgctagtaattgcttaagaatagcttactaatttatatcttattttattttaggtttcataacattttctactatatcaaagatagctgaaagaatcaaaatattttttgctttagcaccagttttttccacaaagtacttaaaaagtcctttaattagaatgacatacaaatggaagtcaatagtcatggtatgttctacctttattttatgtcattgataacccaaagtgataattttatgctttcaaataagagatcttgactatacgtagacaaccacaagtatgrattgaaatttttggtttcatttacactacattcttgtttttgtttctgcaaaggaatacaattttacttattataactttagaaccctactgtgagaagaaattcagtggccaaaccatctccacaccctgcttccaagttttttcctttatttaaaattttcaaactactgtgagataatttatttggttttatasatagtgaattaccacaacatttctttagcacttattgtggtcatccaaatgtggataaaataaatttattttacaggctttttcwggcaacaaagacttcttgcctaaaacctcatttaaaaaattcrttggttcaaagctgtgtccactacagatttttgataagatttgcctcaatatcttgtttatgatgtttggatatgacccaaaaaacttaaatatggtaagaacaagttgtatttgaaatatatatwttttccaatatttggaaagtataataataatagtgcttgtgttataccttgtgtcattttgtgtttcatccacatacactagtagtcagattcttagcctatctgattttatgactacaccaacattgtacaactaacttgcatgaacatgctgggattattttacttccatatttgtcttgctgtctgtaaatattcgagagcagctgatgtgatgggtatctttattgacctttgctattgggtattagtttcctgagacttctaagatttaggtcctcttctattcatttgtttcctgtaactccataactgctcctcctggttcctaatactccttcctatccttgttgatccttccataattagaattagtgcctkccaattatctttaagtttctagcttttatcaatactcttggagtgggaaactaytgtggtactcaaggtactattaccaaaacctttggattgattgtgtataggttctcttaagaatataggcattcattctaagtgtttttcatcacattaaattaaacatccagatttggcagaagcaaatgtgccatttggactagaggttggttcttgtacctggaccttttaagagcttctcaaagagagccaatatagacattcaaagaaagataggtattctcttaattcccaaacacatttttatgccacaaggacatgtttgttgactttgttgattttgttcaaccttactttatttttagaatgctataagaaactcagttctcgtcttttccacccataaagatatgagaaggcagaaaggattactttcatattccctctttttcatatttttctgttcatctagtgctaagcacctactatgaggggcctggaagaatcataaatacaatgtttatttttacttatccactcattctatgttttaggtagtatatttggccaattctatatttttttgtaattataatgtgatgtctctgagaactcttttttgtgtataaattattagaaaagcttacactctggttttctagcctccaaaactgtggcatttcttctgcaacagaagttgacagtgttgtagattgtaatatgactgtgtcttaatttagctgaaattgtaggaagttggaagtagaaaattttcacgcacagtgtgtttggaaatagttaattgtgaaactgtggttcagcttgaatcagtctcttgagcctagcaagatctgtggaggaagtagggtctggcttaaaattatttgcttagagccagtatgaaaaaccaaaagagaatctggtagtttgtgaaaaggcagtgagtggaatctgactgatgtcactcaggtgtggaaaaccaaccagagaattgaaagcaagtcatgagaactgaaagcaagtcatgatgcaagaaaaaacagatgataaaaatgctcacaatgtgacttggraaatgtatcatcaaacaaccaaagttttgaccttgtccaggtgttacaattttttggtgatgatttacaaaaagaaattctaactcttatgaggggaaatgaggctgagatatctgagtgcagctgtcaagggtgtgtgattattatttaggtccctttcagggaatggattccttcttatctttctgataaaggtgaagtagagactctggtaaacatttcatattgctcacagataggcctgacaggtgtttatgaaagctactgtgcacttcttcatccagaaggatgaacagaacagtgcgatttgggttgtataagcctctgacctacattaaggtaaacagtagtgacccatgatggaaggaatatctggagtgtaccagaaaactaagcattatattggagcttatttcaaatacagagaagaattataattagaggacataataaatacctgagttttaatttatacctgagtttaaatttatataatttaattatatttaataatataatattttatattgtatttaataatataatatattatattattacaataatataaaatattatattatattataataatatattatattaatttaatatatagaggacatgataaatacctgagaagaatgtttctgttaaaaatttctgtacaggctatttaaaattgttcagtcagaactttatttttgacagtttcaagtagcctgaatggcaatggaaacaaaagaaattttctctctttttattgaggtacaattgacaaataaatacattgtgaaataattgccacaatcaagtttaacacatctatcacctcacatagtcatatttttggtgataatgcttaagatctattctcttaacaaatttcaagtatacagtacagtattattagctagtcaccatcctgtacattaaatcctcaaaatgtatttactatataactgaaagtttataccctttgaccaccatgtccccatttttcccacctgccagaccctggcaaccaccattttactctgtttctatgagctcactcttttatttatttatttatttaagattctacgtaggagtgataccatacagtacttgtctttctctatttggcttatttaacttactagtaccctccaggttcatgtatgctgtcacaaatggcagaattttttcttttctatggttgattaatattccacagtgtgtatgtatgtatatatatacacatacatttatatatacatacatatatatacacacacacacacacacacatatatatatatacacatcttcaatctgatgagtcaatttttatggttttttttgttcttattgttcctcaaagatattttaaagcttgtcttttatgtcttcagttatagtattaacaatattttcatttgacaatctttgccttttaattgaattacagtatttagtaaatttatttttatataattattaagattagatttatggctatcatcctgctatatgctttttgtttgtcctatctggtattctttttatttcacatttcttgactacttttgtgtttctgaaatacattttaatactttactttatcttctcttattttgttactgctctaagaaatattttttattattctcttagaaattataaaatgtatcatttattattacttatgttaagtttgtgtttatatccacatcctaaataatgcaaaaactttataccagtttaactggggttcactgtttgggatacactgaatttctttcatcaaacttaaacattctcagccattagcatttcaattctttttcttctttcaaaatattggaccacttgacagtggccaacatctttctttgctctattttatttttctttgtgcttaagtttgaatattttatataggcttgaatttgagttcaataatcctgtctcttgctgtgtatagtctgcttttaaatccatctaataaattttaaagtttatacattgtatttttattttgagtgtccatttgactataaaataaattctaattatctgttaaaatattctaccttcatgaccattttaaactttaaaaaatattttatttagcatattaatcatactttattttaaagcttttgctaactctaatgtttgcagcatctctgcatctgcttttgctgattgttttatgtgctaattgttggctgtgttttcctgtttcactctatgactaggaatgattgcaggggactgtgaatagtatgctgcacattctcttggttaaattactgtcttagtgcattttgtgttgctataacagaatacccragactgggttatgtataatgaacagaaatgtattggttcacacttctggaggctgggaagtccaagatcaaggcactgacatctggcaatggccttcttgctatgccaccacatggtgaagggcatagggcaaagaagcaacaatgaagcaaaagggagccaaactcacccttttattttatcttattttttattttttattttttttgagacagagttttgctgtgtcagccaagctggagtgcagtggtgcaatcttggctcactgcaacttctgcctcccgggttcaggcaattctcctctctcagcctcccaagtagctcagactaccgacacacgccaccatgactggctaatttttgtatttttagtagagatggggttcaccatattggtcaggctggtctcgaactcctgacctcaggtgatccacccacctcggcttcccaaactgctgggatttaatggcattaatcccatccatgagggcagagcctttacagctcaatcacctcgcaaagatcccacctaacaccaccacaatggcaaccaacaggaattttggagggaacaaacattcaaaccatggcagttaccctttcaagagttttggctcatttagctaattgtcagtgcccattttttgactttagggttggccttatttcattcacttctctttaattcaggagactacttctcctggtaatctatggcctttagtccaactctatagcacccacacagaccgatttctgtttcttctgcccagcaagactaccattctctgtttggctctaattccctgcaccatattggaaaatgtccgcaggatgaaagttgggattaatgaaaggtttgcttcttgtatttttcttctcttaaggttcctgtcctctggtggttgctttacaatttctgtaaacctgaataattttttatagtctgcatctgataacatcaaaaatatttgtgaggcttcttaaaataatttttttcatttttgcttgttcttacatgatacctctctcttcatatacttgcttttctttgagtagggttaactgattttgagaaatttttactaagaattggaatagtaagacaggccttttcttcttgtggaaataaaacttgcttgctttttcaaggcacctgaggtcactttgagatcagtactctacatgtctggttcactgaggttccaggaactatctaggcaatgcaaacatagattacagattaacattatggctttaccttgggcactatagaatttgaggcccttatggagagtgtttctttttaaaatctttcaaytttgacaggccttagactttgattttttgtttttttcaacaagctaaggtctcagaatgaaacttcacattctcctggactgacaaataaccttaaacaaactgactttgtttctttgcttgtctttgggggttctttatttctctcctcaatttatttttgtaatttacttctatcttgttagttctttaatgctttcaaaaggtgtatgtgtatgtgtctgtataggtgtgtgtcagtcacatttgattgtttccagtagrgtgagtggcagacgaaataacttagaaattcaataatagcttctatattaatttaaaaattgtacaattgaataagtatatttaattaaaataatttgatgatttgtttattaatatgattaattttaaattaaattttcttgaaataatttagttcaataaatattaaaagattatgctctctatgattcaacttatataaaaatgcttttttttttttttttacccctcagagtcgtttggatgtgtatttttcacacaasccagcaggaacatctgttcaaaatatgcttcattggagtcaggtataactgctaaagtgcatttccatacaatttaattcatgctactcatggtttacctcattattctagggatcataccatggccatagagtaataaatttataaggataaaatgaaattattatatatttctataattccttacagtttataaaatattgaggctgggcgcaatggctcaggcctataatcccagcactttgggaggccgaggcgggtggatcacctgaggtcaggagtttgagactaacctggccaacatgatgaaaccctatctctactaaaaatacaaaaattagccaggtgtggtggcacatgcctgtaattccagttacttgggaggctgaggtgggagaatcacttgaacccgggaggtggaggttgcaatgagccaatactgtactgctgcactccagcctgggtgacagagtaagactctgtctcaataaataaataaaaataaaatgttagtatcataatttaattaattctctaaacctaagtactgttacagcaatataaatatcagttttacaaataagaaaatgttacaacagtagactagggattatttaggccatgtcccacagtcgacttgcccartgcttcaaagctattccacttttaaaatctgaccggaacacagttagttatcctaatgcctactctgaaacgctttcactagactgcactttctcctccgttaaattgtcaactcctgagaaccatgagaagttttgttcacgtttgtatttccaaggtcaacagttcttagcatatagtagatactcaactaatatttgttcaattaatgatattgataaaaaaaatccagtgtgaatgcaatcttaatgttgaaaaccaggataacatagtagaaagaacacttttctcagatcaaaagaccagaaattaaatcctttctctggcccttagtggcagggtgacattgagcatctcatttaatcttcctgaatcagtttcctttatttttaaagtaaaattaataattctctgatttaactaagaaaaatattgtaagaattgaaaaggctaatgattatgaatgtacattaaagttaataaacactaggtaactttaaagtattgttaagatattgggtaaggctttttcatttacgaaagtttaaatctataatgtaattgatttgatataaattattgaaaacatttattataacttatatttaggtaagttatactttcttctctggtgatgcgtagactagaaaaatctaaacaacctttgcaattatttaaccattgtaacaatatttattgtatacctactatgtccctataatattctgtgttcatgggctacatcagtgaacaaaacaagaactcctgtcatcctcaagcttacatattatttgtaggtatatagattataaacaataaccatgtcaactttaaaaactattataatgtgttagaagggaatagaactatggagaaattggggtaaaagagtagggaaaargtattaggcatgctgggaagtgggttgtacttttgaatagaaaggttaggccaggcttcagtgagatggtgacatttggaacatggaaacttagggaaaggaggcaaaaataatgagtaagacagggatctgcatgtcattgtaaggactttggcattcactctgtgtgaagtgagtaggcactgcatgattttgagcaggaaagtgatatgatatagtttacacttttaaaaggaacacattggctgctatgttgagtagactatagtagaacaagagtgaaagcagtgagagagttagaaaattactgcaatcatccaaatgggaaatgatgattgtttggactgatgtgttgacagtggaggtggtgaaaatgaatggagtctgaataaacatatgtatatcatgaacatgcaggcaacaagatttaatgaaggactctataagaggtgagtgagaaagagagtcttggatgattctaaagttcctgacttatgtaatgaaaaggtaatattgccattaaaggagatagggaggtttgatgatgaaggttttggaggaaaggtaaaataagttttagatatttaattgatgacattgagtaagcagttgtatataggagcctagaatttaggaaagacttataaaagaagataaacactttgaatataaatgacatgtaaagccaagagagtgagaatacaaaaagccagaggcaaaaatgcaaatgaagtgagtatagacagaagagcaagatcctttcgagcaaggattgggtattgagatctgaaaagattaacaggtcaggtggcagaaactaagttggctaaacaaagctgaaaaggaacaaagtaaaaatgaagataaagaaattgtggtattctagaagctaagtgaaggaaagatctcaaggatgagggaatgaacaactatgtcaagtgctgccaacggataacatgaaaaagttcctcagaattgatcaaagtgttagaaatgtcaaggtcataagtaaccttggccagaaagtggtggtgaggctgtgagtgtaaaggggtaaagaaaaaagtgacttctgggacaaactcttgagccctattgtttgaagcatggtgttttaggcgggtgttatcttagtctcagtgcaagacactcagcgttgacctctgttgatgaagctgaagatttgagggagcctgatgttacttctcccaaaagaggcccccctctgggtagaaaaaggccctgggtatatgtacattcatataaagacaatggaattatttctttagattcccctgcccccatctccaaccccttccatttatttccctatccaaaggaaaagaagaacgaagaagcccacctgcataaataccagcagrcccagtacaatgggggtatatatgcattgcatgcttaacttgctcagctgccactgtaatgaacwaatgatatggtcttattttttgtttctctttcagcttttaaattctactcatttgaaagcttatgactggggcagtcctgatctgaacttggttcattataatcaggtacataattctctataaaaactctctaccttactgactttttcagataactttgctatagatcaaggatcaactgtaaatccccacagtacaataacacactgattaaggaccagcagatgaagataatgtttatttggatacgtattgtcacatccaaccaaagtggcttttccatgttttctatgtattttaacaacaaataacccggataagtccagaaaaattgacaggcagtagaagaagttattatctctcaagaggaaaaatactgcgttttttatatccatagctttacacttggttaaataagaagtaaaaggcataatatatttattcaccctaaaaccagttattctatttggaaagataagaaaacatatataataattaggaaaaattagaagtaaatgagaatgtggtaaaaattgtataaggacaaaattattgaagtactagaacccaagtctgtctgactccaaagtttatgcttttcctccatacttttctgtctcatctaaacgccaggctgatgtgatctgttcatataaaagtctgatcttcatataaaatttgaagatcaaattcaaagagatcagagttgacgtggactgccaatacttataatttattgacaaacatattgacagtaatactgctacagaaaatttgatttaaaatctttcatgttttataaacagtactgaaattacctctgtgaaatgttcgaatattttgaattagaacaaactgtctagtttagatttatgtatgacttattttcaagtaaaacttgtaatgcctattcatactttcatacctttgtctcaacagatccagtaagttgaatccattagatttgacttattttaaaacagtatttaaactcatcattttaacaattagtaattaaaaccttctactgtatcatctcctatgaaaactattttttcactcatttattttcagacaacgtctccattatacaacatgacaaacatgaatgtggcaactgcaatttggaatggtaaaagtgacttgttggctgaccctgaagacgttaacattttacattctgaaatcacaaaccacatttattataaaactatttcttactacaatcatatagactctttgtttggattagatgtctatgatcaagtttaccatgaaatcattgatattatccaagacaatctataaagaaccatggcgctgtgtgtttaaagwtctacatcattcctaatgaaatccaattcttatttttttttacctgtgtatgttctttcatttttaaaactaaatatgtagttttttcctctatattctcattgaccttaggccctccagtcattaaatcagtgtcattcatcatctcaggggaaatggcagattataaatcaatctaagaagcctgttgagtttcaaaatagaatttacataacatatcaaaaacaataatctttaacatttcaattgcaggagataactttttaagaaagtttttttcaaaagtacatggaattacatatattataaaaatagagttttgagaaatacttgatatgaaagttaatgttcctctatgctaaatgaagagtaaaaacacttttcaagttttataaaggagtttggggagaaaagaaaaagaaggagagcctggatgccaatgtaatattgcttgccttgtgattatttcaggcaaagtcccagatgtagggagatcatagaaaccgtagaggggctgtgcctcacttcccagagtgtatagcttgagaagagggaagttgcctttccagcctattgtgtgttaagagcagcaatggttgagttatattcctaggtaactagatctgaggctggactcataaaacattatgcactgtcgcttggtgcatataagatccaagaatttcttatacatgagatgtgtagatatattcaagagagtactagaagatggaaagaggactaagatttggaatgaaaggatactgtcaataaatgcaacacatataataggaagcacggaatgtggcaagacaatgggcatcaccaggagatgtacactaaactctctctcaaaattgcatgcagacttcctgtttccagtttatcacataagaagattgaaagtcaccactcagtccaaacaacaaataaaagttcagtagactgaaaaatcaataattcctcttgtcaatctttttgacacttaacatatttttgtaagttttattttcaagagcttgatcaggttctcacagtaaatattggagaaaaattctcttgtgctctagcagacagagaaaaatagaaaccgttttgaaacaggtgacaacactctgctcttaacaaggcctgtcctcagaagaaactagttaaccatagcctaacctgcagggttttatcaaagcctaatgaacctgaaggaaagatcatactcaactcctgcctactctagctatctcctcaaagtggaactgagaagcacttctgaagttcacagtccagaggcacaggctcactaaaagactgagacctaacaacgggactatagaacgcttcgcctctctcacatctcaccactatgttaccacctactctggtggaggatgttgttaacgagggaggctatgaatgtgcagggccaggaaatatatgggaaatctttgtaccttcctcacagttttgctgtgaacctcaaattagtctaaaaaataattccttaaaaaaattgcatgcaaggatatatgccacaggggaagataaacttttcttcattccatttcctgaatactgcataacttccggggacatttgtagtccccagggagaccaagatgctaagaagaaagtctagaattgagtgtgaatttaccacataaagactaacaaaaacgatccataatttgctgcattggagaattaagttttctgcattaagcaaaacaggagttgaaaggcaagttcagctagttttgaggttgataaatttgtagttaacacatacttatggacatctgaaattattatacaaatgaggcaggaaaatagggtccaaaggcagggatcctaaggacttcctagaactaaatcaaatggaaaaaaaactccaactctatagagcaagaaaataactttgtaactccacttcagctatgtcaggaaacatcctctttatttgcatagggtgtacaacaagtaaatatctttgtaacttcacttcatcctctccaattacacagggcttacaccaagcaaccagtgggaaacctctagaggatatttaaatcccagaaaattatgtaaccagggttttgagccgcttgttcaggcctgctcccccctgtggagtatacttttgttttcaataaatctctgcttttgctgcttcattctttccgttctttgtgcattttgtccaattctttgttcaaaatgccaagaacctggaccccctccaccagtaacacaaatataaattaaacatacagatagagaaataaaatatgtgtataggttattatgaatgctgctagggaaggtaaataataacttgcaaaattatagttgaggctatgaagaagtccttgttttctttggtaaaccttggcactaaaatagtactgagaatagatacatctttagagatatctttttaaagagctccggaatgttaatatgacttaaacattacttcagtggtttcaaatgatccttcaaagaaggcaaatataatgggataataattcagaagtattactcatgttgatatttaaagaataaattggaagtctctgataatggtggactaaataacttagatctggaaaaagcataaaaagtatctgattgcagacaatggaaagctaaaaacacaatgaagaatttcagtcaagaaaaggaaaccctaccgggtgcagtggcgcacgcctgtaatcccagcactttgagaggctgaggcgggtggatcacgaggtcaagagatcgggaccatcctggccaacatggtgaaaccctgtctgtactaaaaatacaaaaattagctgggcgtggtggtgtgcacctgtagtcccagctactcgggaggctgaggcaggagaatcgcttgaacccgggaggcagaggttgcagtaagccgagatcatgccactgcactccagcctgggcgacagagcgagactctgtctcaaaaaaaaaaaaaaaaaaaggaaacctgaagaagtgagagggcgctgtatgtatctacatcccagcaacatctacttattggggaagtatggctaaaagccccccaattaatggagaatagaaattggaattcagtccaccaacaggaagtttcctctgataagcctcaatcctcagcctttgggttgtaaccccagagtactgtaccccaagaataaggttaaaatgaaaattgatcacttatttaggagctgtagtccagctttgaatcataatgattactaatgtactaaagtgatctagaaatactaataccctagctgtcaaaagcaaaagtaaatcctctctggcagaaagttaaattatccaaggtgctagaaataatgatataattttggcatgccacagaataggtcaatataaattatatttttatgtactagcgtcatcaattgcaaaatgaaattgaaaatattatgccattttcaatattatgaaaatatttaaatacttaaaaatacagataaatacgttcacattggcagatgcaatattattaagatatccactcttcccaaatttattcaaatattcatagcaattctaatcaaaatcccctgggctctttttttcttaccctagaaattgttatattaattctaaaatttttataaaattacaattgccaaaacaattttaaaaaattttatagaatttacactacctaattgcaagacttaccacaaacctgcattaactaagacagtgcggtattagcataaaaagatgtctacatccatggagcagtacagagtttggaactagaccacacctatgtagtcagttgatctttaacaaagatgcttaagtaattccacagagtgaaggattgttttcagaaatggacagcataattttaaaaaagacgaactttaacctctacattacatcagatataaaatttaatttgaaattagtcatagaattaagtctaaaatcttaaactataaaacttctagaagaaaacagaggagaaagtctttctaacttcaggctaggcaaacatatcttagaagagacgcagaaaaaccgaagatcctcacagaacccacttcactcccctgctacctccaccagagcagtgctggtatccacagctgcaagacctgaagatggatcacatcacagttctctttgcagacactccccagtaccagcctagagcccagtacctccactggatggctagacccagaagagcaaaaacgatcattacagtttggctctcaggaagccccattcccaggggaagaaggagaacaccacaccaagggagcaccccatgggacaaagtaatctgaacagctacccttgaatcccagatattccctgtgacatagtctacctaaatgagagggaaccagaaaaacaattctggtaatatgacaaaaaaagttactttaacaccccaaaagatcataccagctcaccagcaatggatccaaaccaagacaaaatctctgaattgctagaaaaagaattcagaaagttgattattaagctaattaaggaggaaccagagaaaggtgaagtccaacttcaagaaatcaaaaacatgatgtagaataagaaaggaaaattcttagtgaaatagagagcataagcaaaaaacaatcaccacttctggaaatcaaggacacacttagagaaatgcaaaatgtactggaaagcctcaggaatagaatcgaacaggcagaagaaagaacttcagagcttgaaaacaaggcttttgaattaaccccatccatacaagacaaagaaaaaagaattttaaaaaatgaacaaagcctccaagaagtttgggactatgttaaacatccaaacctaagaataattggtgtccctgaggaagaagagaaatctaaaagtttggaaaacatatttgggggaataatcaaggaaaacttattcagccttgctagagatctagacatccaaatacaagaaggtcaaagaacaactgggaaattaattgcaaaaagatcattgcctaggcacatagtcatcaggttatctaaagtcaagacaaaggaaagaatcttaagagctgtgaggtaaaagcatcacataacctattaaggaaaacctatcagattaacagcaggtgtctcggcagaaaccctacaagctagaaaggattggagacctatttttagcctccttacacaaaacaattatcacctaagaattttgtatccagcaaaactaagcttcataaatgaaggaaagatacagtcttttccagacaaatgctgagagaatctgtcactaccaaaccagcactacaagaactgctaaaaggagctctaaatcttgaaacaaatcctttgaatacaccaaaatagaacctccttaaagcataaatctcacaggacctgtataataataacacaatgaataaaaaacaaggtattcatttacattcataacattgaatgtaaatggcctgaatgctccacttaaaagatacagaatggcagaatgggtaagaactcaccaaccaaatttctcctgtcttcaggggactcacctaacataacacataagatctcacagaaactcaaggtaaagcagtggaaaaagatattccatgcaaatggacaccaaaagctagcaggagtaggatttttatgtcagacaaaacaaactttaaagcaacagcagttaaaaaagacaaagagagacattatataatgataaaaggcccattccaacaggaaaatatcacaattctaaatatatacgcaccttacactggagatcccaaatttatgaaacaattacgactagacctaagaaatgagagagatggcaacacaataataatggggaactttaatactcaactgacagcactagataggtcatcaagacagaaaatcaacaaagaaacaatggacctaaactataccctatgacaaacgtatttaacagatatttacagaatattctacccaacaactgaagaatatacactgtattcatcagcacatggaacattcttcaagatagaccat

SEQ ID NO: 93891 - DNA, 149912 bp, Homo sapiens
ctctctatataaactcaaaacgcatgtactacagatggactttcaatgacacttcgtagaatgatcatgagtttaagtagaaattgtctttttactctttcatgttaatagaattttgtttcagccttgcctttggatctgaaatcctaggaaatacagtggaaagaattctgtggtgagaatcattaaacactgagtctggttcagcgctgcttcctgttacttgtgtgaccctggacaggcaaacccagcctccctggctctgatccctcctctgttaaatgagggatttggattgacacgagtacttctcaaactttagtgaatcttctggggatgttgttaaaatgcagtatgtattcaccagacctggggtggggcctgagactctgcatttccaacaagttcctaggtgatactgatgctgctggctcaggatcgcactccaattaggccaccctccaaggtgccatcatgctgtaagctataacaactaccaaataaagaaaagcattatgtcaacaatggataacaataaatacttattttagaaaataaatatagctttttctttttttgaaacagggtcttactttgtcacctaggctggagtgctgtggcatgaacacagctcactgcagccccgacctccagggctcaggtatcctcctgcctcggtcccccaagtagctgggactacaggtgtgcaccaccatggttggctaatttttgtgttttctgtaaagacagggttttgccatgttgcccaggctggtacaaatatagctttagttttctgtttgtaaaagtaatgcatgcttacgaaaattgttcttaaaaaaatcacataggccgggcgcggtggctcacgcctgtaatcccagcactttgggaggccgaggagggcggatcacgaggtcaggagatcgagactatcctggctaacacggtgaaaccccgtctctactaaaaatacaaaaaattagccgggcgtggtggcgggcgcctgtagtcccagctactggggaggctgcggcgggagaatggcgtgaacccaggaggtggagcttgcagtgagccgagatcgcgccactgcactccagcctgggcgacagcgagactccgtctcaaaaaaaaaaaaaaaaaaaaaaaaaatcacataccatgcaatgacagtaaaaatcatcccaagtttcataccacttgaactaatgtgctctattgtcacttggctatgaagaatacaagtgctaggtttcagtattggcatcgtattaccttgtcttttaaaatcaggttgtgaaactggtatctttttcaatttgttgccaatcagttatgcgttaattgatttgaattcagttccttctgttgtggtagatttgcttctgtatcgtatgatttcaagttgctcattgcctgaattcaggacagggtagtgggtggctttctggggccatctcaggcgggctgaattgacctgaagatggcaataagagaaaaaagccaagtaaatatcaagaacaatttttagcataaaattcagtgttaagattcattgagagctaatcaatagaaacgaaggttctgtaaatacatccatcttatgggaataacttaggtcataaccattgttggcaaaggaggaaatttttcttagttcctctgcactttccccaatgatattaatgttacacctctttgatcgtacttgaaatgattgtaataataacgagagccgtaagagtttgttggtcataaaaacatacaacattttaagaactttattgggtttttattgacatatataactattaaatataagattatagaccccaaatatcaaattaactttagcatttacaattttcctttgtctcctctaagcagccacaatttccaatgtagcacataatgaggtcatcatagttgcaaatctatatcttcatattgtataacttgagaacatttttaaactcagtgtataggtttgtgtggatgttgtatcaatgttcacaacacgaggcaagtggaaataaagcaaaaatactgttaatgtgtaataacattgtgctaacagaatgggcaatttgtaacaatgccatcagtgactccactatctagcacaacagttaatacatagtgtgtaagttcacatttcagataagtgatagttatcattttaagtaccaaaacttaggtttaaagaagtttctgagatatgcagaattctacctctcactgggctttgaaaatatgttactcctcaggactcaccgtgtcgtaagcatcactgattattgtttatgtctgttctaaattgcagaaacagtttcagaaacctaggttatttggtttttagtcctaatcttgttactgtaaaagtcacacgtgttcatccattgtagaaagttctccaaagtgcaatcacatataaagaagcaaataaaaatcatcctcaatctcactctccagaagtaatgattattaacagtttcatgatcttcatcacactgcattaagtttcccagagctgccatcacaaattagcacaaactgtgtgacttaaaacaacagaaatttattctcttacagttcacgaggccaggaatctaaaattaaggcatcagcagggttgggtccttctggaggctctcagagagtctgttccatgcgtctctcctggtttctggtgtttgccagcaatctttgattcatagacacatcattcccatctctacctccgccatcacatggccttattctatgtgtgtgtctttctgcatcctctcctctttttataaggacaccaggtattgggtctatagcccatcctaatccagaatgacttcgtctcagctgattaacatctgcaaagactctgtttctaaacaaattcatattgtgaggttctgggtgaacatgaatttgtgggggacactgggggacacttattcaacccactacacacactgtaatatatatttatagaatcacgaaaacgggaccataatttatataaagcttagttccctttacacttaagataccatgaatttccctaggtctttcaaacacagaattttaattttttgtagagtgtttcatcatatgaagattacatcatttccatagctaacctgctacttcaaacactcagatggtttccagactttactattataaatggctctgatgaatatacatgttcccaaatctttgaatttatctctgcttatgtccttggtataaattattctgagtcgaattattggattaaggggtatgaacattttaaaggctcatgaaaaatcttctttaattgaattccagagattgtatcaatttgccatcaccagcagaagagagaacccatggcattgcattctctgcactgcacgttctagctttttgagtgttggacaagtgactaggcaaagaaataacatccttactttgtgacttgtatttttatgtaaggttgcctctttgtttacggaccacttatatatcttttttaggttaccaatttatgatttgtgtctccttttcaatttttttctcctctctccaactgccagtatttatttcttaccatctcacggatgagtatactgtccacctccaccccttttagagtccactgttagctaagaaactatgtagatgtatcctccctctccttttcccattctcgaaccacctctgaatcttgtacaaatgtcaatcattgcctccattgtgtcttaactgtttacatttcgctttcccttctaagactttgagcactttggggccatttccatgtcttatctgtgtttttgtatcttcagcaactaacatggatgctcaataaacatacattgaactgagttgttacgttgtgacctggaaatattcacaattccttgtatagatagaaatagctaaataagggcacataaggatagactctaaatggcactcaataatgtgcatagggctgggcgtggtgactccctgcctgtaatcacagcactttgggaggtggaggtggatcacctgaggtcaggagttagagaccagcctgggcaacatggtgaaacttcgtctcaaccaaaaacacaaaaaatcagctgggtgtggtagtgtatgtctgtaatcccagctatttgggaggctgcagcacgagaattgcttgaacacaggaggtggaggttgcagtgagctgagatcgtatcattgcactccagcctgggcaacagagcaagactctgtctcaaaaaaaaaagcataggatttaatccatgaattttgaatttctatgttaaatttttagaaatagtaactttttctcccatatttctcagctatatctgagataactgggactgagcaacattgtctagacaggcaaagtgttagcaataataagtataataataattgtaatgtaataatggaatgaggatgttaaagtactgagatcaggataaaagttacaattgtccaaattttaaatttcctatcatttccactgaaatcactgactgtacttataacattatcaggaatttatgcaatttgtaggttttgaaataaattaccattcagaattcaaccgtgaaaaacagtgtaactctacttgaaaaacactttgaaaaactcaagtttccaccaaatctagaagcacatgggtcgtaaaacatagttcgaaaagttacgagagatgatgactacaaggaactttttataaaaatcttttataagcattactctgtggtcaaatttattttcacatggatattaaaacaagttattgctacaaatgggtttctgttctgatcctttttttgtttgcctcacatatcctttctcttccaccacattctgcttcactctccccgtctctcatcacagacaagaaaaatgccacctcccataggacccactccaaaccctgtttcctgaatgatcaatgccttcccccatcgcaatcaaaaaagcactttctattctgtcttcatgacacactggttttgacacttgcatagctgttagtaattctgcaatgtgcttgggctatttgtgagcacatgtatttttcctttatagattataaacatctaaagaacaaggttaacccaggagtcaagtaaatagttaaatattattttgacaatggctgtaatagtggacatttgaaaggaatacacctcagtattttgaaattgaaataattttctagatcctggcatttctggactttcaacagcccaccctttttaaaaattgtgaagacacttttactataaaggtctgcccagaccctctctgatacacctgtgtaaatgccacgtgcatgtgagcatgcgacagtacgtgtgtgcacgcctgtgcagtggtaatcaaccatggtgctaaggtttgaaaacagaaaatacatcaatcgacctccaagcttctttcatcccacttcataacatctcaatctcttgagtgctgaggcttattttgtttaagatgatttggactcttctgagtgcaacgcaatctccttccagcacagcggaccgaggagaggtgaggggagagttttgagggtgggcatattgatcctacgcttgctgaattaaaaatgagccaactgaggacaatttccaggttgcaacacagacggagccggagtctgggttgaggttagaggagccgttagggcgcagggatgcaacaggatttgggagaaaggggagagaaagcaaggccacttccagggggctttcattttttttttatcctggcagcttcccgagccagatttcaaaagcgatttcaaacgtgaagccaactgaagcactgccttacactaattggaaggggaagggagtgactcatattacaccagctcgctcttccctctcggcaactgctaacttgtagctttaaaaggaagtgacatgggtggggagagacgtcagctgaggaccactttttttttttttttcttcctgaagggtccaccccatgggtggagtctcgctttttctttccagtgttggctgacttacagctcttataaactagtggcaatttctgaacccagccggctccatctcagcttctggtttctaagtccatgtgccaaaggctgccaggaaggaggtatgtggtcctggtgccgttcgcaggcaccttccccgctgggtgtggctgatgtttgcattcctcttcccagcatatttttctctcctgggctggatttccttaggacctctggaaggggtaggctccgggggcgggggggggagtgcaaggcgggcgggggaaaggtgcagggggcgcctggagggaggcgaagagaggctctgctggtacaaaaggaccctcgctttgtgctgggccgggtgagcgtccctttctgggctgtgatttcaagctgctgttcctggcttcatttacccacccacccagccccctcccggggctaaagcattttctctgctatagacgaagctgggcgsggggtggtggtggggggaatgttcctattacatattgctctcttttgtgtcatgcaacatgttcttccgtcgctgacgtttctatggcaaccacaaaaatactacacaatatgcagccccgatatacattgatttatttgtattttgtgtctagtttgcagctttctgctctgcttcttgctttggtttgctaaaatccagcatggcttgtggctacccctcctcactttcattttggtttttccctatcacaggaggggtgggggaggggagttgtcaaggaaacaggcattggtaattacctctctatttacctaattttcggcctatgaatttctccatatcgaggaattaaaaaargaatgctttgatgtttatgtaagtcttcagtgtctggtctttttttagaaaacctaaacacttcttaagatamgatattgatcctgtggtcaagctaagggggaattaattccttacaggaggtgagatcattgaaataaagttttagagagcattggagaattcgcactgataaatgtgatattgcctgcccaggtttgcctaaaagcttaaatatttaaaagatgggtctttgctctcatctgcacttatttagctccaaatcttaagttcaacaagtatgagtaacaaattaactgccgggcaggattctccgtttttcgttttcgtgcattgttcttagatggattagccmcgctattcactctcttcaaggtgagggttgctagactttttcaaaactgtggaaggattaactcatctgtgattagtcaacgactctcagttggaaaaaaagtatcttgagagaagggagaatgtgtgtgtttgtgtgtgtgtgtgtgtgtgtgtgtgtgtgtttagggaaatgggaggcgggcagggagaacagggcacatcttgagttctacgttaaaaggattccatcttctgaatattctctatggggagaaaaactgwtattcagaaaaaatatgaaatgagaaaattattatctacttagtaataagcaaagttaattataattagaatcaaataacacatctcttagaaagacatagcctcttaacaggtaccggctaaactgatgcttttattcagtacgtctaaggaagcgtttgataagggataccattcttctgatgggcatcccaaataattagcttttataaaatagataagtagtaatcccattcatgactcttaaaattatctataatttaagataaacatgtgtgaaggtcacttagccctcataccttccggctgctaaagccaaaatcattacttataaaccttgagcaaccctgccatgtggaagcaggaagaatgggtggtttcagtgaggttctgtttgctgtgatccttatctaaatatgctatcatctatgtcttatcaaatctgctataaatccagaggtcctaagtaattcaggtagaaaagttacctgaaaatggggcaaaatagcatggcacaaaacaaaccagagccacatggagttaaagacgagaactatttaaagggcataacacacagaaaagtattactaaaaagaatatgacactcattttgaaaagcacatgttagtacacagagaaacggttggattgtgagcatctgatgtttgcaaagaattctgaaaagcagccaggctgaaattactgtttttcctgyctgaaaatggtcctcaagggcagatttgccacatgaccttccaaagcagattgacagcatgtaaatcaaagtctgcgatgtcggttctcttgagtttccagattcaaaatttcacagcaaaaagcctaatggaatagaactgaaaggaaaaagagcaagacttcctcagaagcacagccaaaacaaaaacaacaaaaaacccaaacccaataaacaaacaaaacactgtctgatattcagatgctgagtagaggttaaagcagttagcagctttggcctagggaaggtaagtggagctgtgagtataaagtaaacgtagggtcccatggaagaggctgacagaggtgacacccagagggtgagtcagccgtcattttattgggattttactgtctgcaaggctctgctgtgaagttggtgaakaaggcagcagttgtagtctgtgctctyaagcttaaaatccaccaaacgggtggcgaaaagaagagcagagcacccagctggaaggaagggggaggcaacagccagtcaaggagacgcaattagtatgagaagaatactagagagtcttcatcctgctgctgaagctttataggagaggaggcagacggttcaagggaagaaggagagggtgtcytagatagcaaaggtggatggtaagaaatggatcatggttcagggttcttaactccaagaagggagaagtcagtctttagtatagaagtagagcaggtatactctgtgctggttgaaagcataagtagatgtaaattggggacagaagtttttcttaatcagaaaaagaaggactgttagaagactgaacagaaggcagaatccttcctaatccaatacttttttagcttyagcttaacaacgaaaggccagacttacactagactttaaacaggtatgaaactggggaagacgcaaccaggaacttacccggaatgtcatcttcataattcctgccattgccattgttttaaattattggatgctcaaatgagggtttggtaaatgtcacacgttttgtgcagtctcctttattctggaaaggaggtctgatggttatgggacaaagccgcattcacatttattttttttttgagatgaagtcttgctctgtcrcccaggctggagtgcaatggcgtgatctcggctcaccacaacctccccctcctggattcaagcgattctcctgcctcagcctcccgagtagctgggatcacaagcatgtggcaccacgcccagctaatttattttttatttttttgtatttttagtagagatagaatttcactgtattggccaggctggtctcgaactcctgacctcaggtgatgcacctgccttggcctcccagaatgctgggattacaggcgtgagccaccgtgcctggcccacattcacatttctgaatggtgtttgacctctaaatctttggtgaaacgcctttcatcactcctattttgaaatataatcataataatcatgtaacatttcctagagcttgggcaactcaaattcattattctttgtgtgagaatcagtttggaaaggaagcgctggaactctgaaacctggcttcatgcatgggcttgggaaggtctgcagtggctgccaggctgtaggaaagaggaagcttaaagcatgaactctttcttcaacagctgtttattacgtgtttaataggtgtcaggtcccacagatgcaactgtgagcaaaacaagatacagtttaaatagttatagttttcaaatgggtttacaagggaaaccccatgactggcagatacccattttcttctaatgactgaataagaggaaatatcttaaaaggagtataatttgtttcaacattgtcatggaacaatccatctacctgtcttcttttccttggcacactcttgctccacaaagatttcccattggtttcattgtttgtcgttatcttgtttctccgatctaatttgctctacttcttcctttgatcctaagtcctacctttcagtcaccattccttcatccattcacacatacatgatacatccatctgtcctctatccacccccaatcccttcatttattcaacaaatagtgttgagtatcatgtctcaggcactgtatattatagatatagcaataaacgggaaactggtttttccttaaagaagcttaagaactatcaggaagacaatgtggagacagcctctaaaccatgggggtatgactttttttggggggtgggcagggtctcgctctgtcacccaggctggagggcagtggcgccatcatggctcactgcaacctctaactcctaagctcaagcatcctcctgcctcagcccccctcccccagcagctgggactgcaggcgtgagccaccgcgcctgccctggcggtatcacttctaatagaagcatttattggccaatgaaacaggatacttctttcattgaacaattttataaattgttcacacacagcataaactgtgctgggcagggagggatcaagtggttagctgttgactgttgtccattttatatattttttgtaccttccatgctggttgagcataaggatggtaaacatttgttaattaactaaatgggaagagtggaatttctaacgcaggagacacagaggaagagaaggcttgtgtattctctttctgaaagaacaatctgagagagagaatctctcaaggttcccattcatagtgaattactcatagatttccaggtgacaacagctccccccacatcgactcaaagtatagcattttaaaaaagaaaaactacctgcgtccaattacatacccattagttcactgaatatcctcatgtcctttggagctgatttcccataatacactgcaagtctctgtcttgttctgataaaaacaagtgggtttcaaccccctacagctttcttaatagtaacagcagtgcatccagaaactagtggtggctctagagacccaacacgaacagtgttgagacctcrttgcagcactttctctgtgttttctgatgtcatgaaactcttcttagtagaattattttcccccacttaagttccaccgtcagcctggaaattatayggacaacatgacaaagttcctctggaaaaccacactcctctgcttggctgaccttgggaraaaacatttagcaagttcttctttttcttggttattttaaactcagatgatatcagcatgaagctgttcctaataactctggttggcacgggcatctctgctctgtttaggttaaacatcataactacttcatggtcatttctgtgtgggatcctccaagacgagaggtgcattttgaattttatgttagtttgaagccagacactaaaattcctgtaaggagaggggaacaacacacaccagggcctgttggagagtggggtgaggggagggaacttagaggatgggtcagtaggtgcagcaaaccatcatggcacacgcatacctatgtaacaaacctgcacattctgcacatgtatcccgttttgtttttttatagaagagaaaagaaattcttgtaggagatgatgcctcagtctagtttatgccaggtaacctgcagaggtcattagagacactgaggtgactggctgacttacaggatatgcaagaatgatgacagcctgccttcactgagggcctcctatgtgccagtacatggacttcacatttattaactcattttagcctcataacaaagctagtgtgtgaaaactctcatcgtgctccattttacagagagagaaagtaaagatgagggagattaagcagctcagctaggtcataagaaggagcagagctgagacgttaacccagatcatctgggctctgctttcccctgtaccttcacaccttgccatggcatattccacagtctgtctcccatgcccagtgcagagcctggcacataacagatrtgtggtaaatttattttttagttttgtttaaaatgttaaaagtgagactggtctttcttttaagaggccagtctcactttgttgctcaagctggccttgaattcctgggctcaagcaatcctcccgcttcagcttcccaagtagctgggactacaggtgtgtactaacatgcccagctaatatttttcttttctttttttttttgagacagagttttgttcttgttgcccaggctggagtgcaatggcgcagtcttggctcactgcaacctctgcctcctgggttcaagcgattctcctgcctcagcctcctgagtagctgggactataggggtgcgccaccacacctggctaatttttttgcgtgtgtatttttagtagagacagggtttccccatgttggccaggctggtctcgaactcctgacttcaagcaatctgcccagtgtggcctcccaaagtgctaggattacagatgtgagccactgcgcccgttccccagctaatatttttcaaataatgaacaaatctctaccgtgtagacctctgcatgcctttcatcccagttgttaagaacagcaaaattactgcaagaaagggtagtattttagaatttggagaaaaactaacagcagtactttataagacaagctactatagttttcagggagtgttgtttttattatggtttagccagagatggtgggagaagggaaagggccttgtgattaaaaccatctgagtgacaatgcagtacatacattaaattaaagatgaactcttctcaaaaccaatgtktaacccaggattgaacttgactgagcagctgctctcaaggacacctgtggtggctgctctcagagttcccaaggcggtgrgtggatggagtcagaggctttctgttcttcagtggactttccacaaatccaccacggggtttaaaggcagattattatctgcaaagaccctgccagtgcttatcttagatcaactctgaaatgagaatgggagacttgaattgatcctggagtgaaatttggtctcttgcccatctccatgggctcctcgtgagctgtcagtcttctgtgggtagaggttaaccgaggcggatgaaattttaaagaactatctgtctatgcaagcacatcttcttcccaggatactgcagccrtcagcagacaatcaatgcaatcatctcagactgtgtcctgcgtcccaggagtaagtcatcaggctcatttcttttcttgtctcttttctgctgggggaagggcaggttgcaaggcggatggtgagcagattcttcggccttttgtgtgggtagcctgcataggaaccatttctatgcctgtgagtccatttctagcatctgcctccagcctctgctttcctgacgctctcccatcaccccattcacccttcataaaacagtcactctttctagatgcataattacatgccatgacaatgattacagtcctctcttcataactgcactgggtgctcattcatggcatggaggtatgatcgyatcgtttgtagcatagagcagagtacccagcactgaatatgtgttgtggcctagagaagagatgggcacaagaagtcaggtcatcagggttgcctcatcgctggcctcctggccagggcctcaagggtgacattccttgagggcgaggtgtttctcaatctcgatgttgagattttgggcccattaatcctttattgtggaagaggccaacctgtgcagaatcggatgctcagccacattcctggcctctaactgttacatgccaggagtagtcaccccactcctacttgtgacagccaaaaatcccctagagggacaaacttgcccacagctgagaaccactgcttgagggggaattcccggctctgtcaggtacactcaggaatccggttggtccgatcaaagcaaacccatttctgaggactaatagggtcctaaccaaagtggcaattcattaatttaaatgaagaaatactttacatgggaattgaaaaataatagtaaaccaacttaaaagtagacacgtggccgtaaagtattcaaatatttagtgctttctgccctgataagtctgcgtgggggtcatgctggcaccaaggcagcccggtgcagtgaggaaatgggccaggctcggtggcctgataggaccccttccacacccagatctgtgcagacaggccctcctcgttcccctccccacccaccagctaagggagcctccttttccaaacctctctggagtgaacagattaacatatctcaagaacaaattgagagaggcactcacaaacctgctcccacctggggatttcattactgtttccttgaccttcacagtgagtgctgcgcccctgcagtccagcagtgggtactaatccagcacccagtccagcagtgggtactaatcagcacccagtccagcggtgggtactaatccagcacccagtccagcggtgggtactagtcagcacccagtccagcggtgggtactaatccagcacccagtccagcggtgggtactagtcagcacccagtccagcggtgggtactaatcagcacccagtccagcggtgggtactaatccagcacccagtccagcggtgggtactaatcagcacccagtccagcggtgggtactaatccagcacccagtccagcggtgggtactaatcagcacccagtccagcggtgggtactaatccagcacccagtccagcggtgggtactaatcagcacccagtccagcggtgggtactaatccagcacccagtccagcagtgggtactaatccaccacccagtccagcagtgggtactagtccaccaaccaggtctcactagtattaatttgcctcctagcatccatccccacagttgctggtatttcaagcctttctttccctttccgtccctggtgcttctcacttacaggaggggccacctttacttccttcccaggaccagcaccctgccctgcctgaagttaggcttcagctccccagccctgggggactctaggggtcccataactagtcctgggtgaccctaggggttccataactgctgtgtccctcccttttatcttcccatctcgcttctcccttctcgytttcaggctctcaaaggtcaacagaagtggggtcagttattccaactccccacccaactccagaatcccctttcagcgtttcttagggagcccgtgcattcagcccgcaggaatacaaagagggagccgaccctgcaagtgcctttgaggagcctgctgcccagagggcaagacggaagcctcagcgaggggttcccacgcagtggataagacttgcagggcagggatgcgygggcacrccagggggaccacctcaccacccctgcccagtctgggcttcctaaaatacttcctagagaagaacagcccccacgttaggtctggaagtggggagtattggtcccagtgtgcacgcttctcacggagtgccagagaccagaggagtgggccagtgggtgaggtgggacagggcrggaggctggagttttcctagaccacagaggaatgaggtgggctggcgtggcaggaagcagagagaggctgagcatcctgcagctctgggaggggaggcccagaagaggcacaggtctgaaagccaggagggtttggtaacttgttgtatggagggtgtctttgacgccctgagatagtaaatatagggagaaagaaggtcactttccaatcatattcttcccaaatggtcacttatcatattacaccttataaggtgatcatttatgtactttgtaatcaacatgtgttacgcagcacttactagaagctgtctgctttgtataacacctcatttcagcttgcccccagccctgtgggttgccaattattttctctaatctaatttgaaactgaggcacagagaggttaactaaccctcccaaagccacagagctagcaatgcctgagcacactgtgattttactaaatattgtaacagaattacatggacttgcatttcatattcttgcctttcctgaaattttcctgaattttcttttagggtgaaaagacttcccattgtttcaaaatgtgcagaaacttcccatcacagccccccaaatcatgtggaaatctggaagttacttaagaccagatgatgtaatgaagatgttgtgggggtcactgaaatcctcatttggactccatctctagaggaataatagggttaaagtttgagaggaggtcgggggagaggaccagagagatattttaaatgtgcctaattcttttaattatttatattcattccaatttttgccacattaggacttatctcctgctttccattccttctgtcttccccaatggctgaactgttgtctttttcttgtttgtttttgtttttcgagagagtctcgctctgttgtccaggccagagtgcagtggcatgatcttggctcactgcaacttctgcctcccggattcaagcaattctcctgcctgagcctccccagtaactgggattacaggtgcccgccaccacacccagctaattttttgtatttttagtagagacagggtttcaccatgttggccaggctgggactacaggcatgaactactgcgcccagcctgttgtttgtctttttaaagagagcctggtcttcagcagcttctatatagctttcgccgccgagaatatgtctgcctttgctctttttccttctctgtctcttctgatggtctgatgggtggatggagggtggcttgggtctgtctcttctgcctctggtcactcgccttggtgggccttccctcgctttctctggaatagcccagggcttgctttgatcctcctggcctctcttcctcggtcattccctgcagacaaggactggccacctcagctctcacggctcgctggcatctttcatcagcactgtttatgacgttatcctcatgttctcctagaggtttttttcactggagttatcttttgaactcaaaacaaaagaggcgtgtgaaatgtaccagttcaagtcccaagaagctacccaaagggtgcccctcactatgagggtctcactcccccgtgggactgaagaataatcggacccaaaccttctgagcaaaggaagaagtggggtagagcttgcagtgggtcaraaggggagaactcagcccctaagagccccagtaagcctgtgtttttacaataagatgtggaaggaggaactctaggctggggactttgcccagggacaagcaaaccaagttttatttgctatgagagaataatgaggagggggaaaaaaaaaaggaatgagctagtatagagccagctgtggaagagtttggggtttggggagctcacacacagcagtgggaagtagcccctgtgtggcagggacagacgcggcagctggccaccatggctgcagctccatcacgcttttcaggtcctggcagcagagtctaacccatgttctcaacattgcctgcacatgaggatcacctaggaagcattttaaaaaggacttcctgggccccaccttggaccaaccaattcaggctcatttttttttaagttctataaatgattatgggctgagaggactggaacctcaggatagaaggagggtggctagccagaagagggtgactttgaaaaaaaagaaacccagagccagggcccaggctgtggtgatggcacagtgatgataatgatgaccacagcgacatttaagatgatgtaccaggcaaaggtctacggataatcctcaccaccagccctcgactaggaactcttcttatctccatttcacagatggggagcctgggggtcagcagtcttcccagggctgcacagctcatacaggcaaactgggtctctggcccaggagcccctacccaggtgtgaaggtcaatgcctgttcactctccagcctctttggatatgcagcattcacagctctgtgctaggaaaatgcagtcagaagccgaaggtccactcataaagaaagagaaaaggaataaagagggcaaaaccaggtggaggaaacccccttacaaacatgtatwcctagaaaagaggtagagctcaattactgacttgtcccatgtcaaatgtagcttacaaacactacatgattagctggatttgtggaaggtaaaatatccctccgttggctttgttaatgatgatgccttacccrgtctcagggtagcagctacgtccctctgacaggtcccatcatgagtcagccgtgagccgggcgtttccctggagcagtgtggtgaatgtgactgaccattcagttcattcattctatggatatttattaaccacctctcatgccaggtctgtgctgggagctgtggatatgatggtgaaagacactcagctcctgaggaagcctgcttcgtgggatggcagatatacacacgaagggaaatagcacttgtcaacgtcatgtggcccaggactgtgccgggtcttttctgttgtttgtctcatggactcgtgcagtcagtaagtggccacattctgtgacagtgagcttcatggctaatagagaaggggccatgagaaacagggaaagatgcacctgactgttcagcgggaggcagggaggagaaggagctggcttaagcaggggttggaaggataaacacatgtttggcaagtcaacagtgggagaaaagggggagggaagggcatcaggcaggtggaacggaatacacgagctcggagcaccagagtgagccctgctcaggaaattctagaaggcgaagacgtggttcagtgtgcactcctctaaggagatttcctgacctcctcatggccctgcctggtgaaatcaggtgtcctaaccctgacgtttatttattttttcttttttttgagacaggctctcactttgtcacccaggccggaatgcagtggctcaaacacagctcacttcaaccttgacctccctggctcaagtgagccacctgcctcagccctccccaagtagctgggactatgggtgcacaccaccacacccagctaatgtttgtattttgtgtagagagggagttttgccatgttgcccaggctgaatcctgtttttttttttttttttttttttttttgagacgtagtctccttttgtggcccaggctggagtgcggtggcacaatcttggctcactgcaacctccgcctcccaggttcaagtgattctcctgcctgcctcagcctcctgagtagctaggactacaggtgtgtgccaccacgcctggttaatttttagtagagatggggtttcaccatgttggccaggctgaactcaaacatctgacctcaagtgatccgcctgcctcagcctcccaaagtgctgagattacaggtgtgagccactgtgccaggcctggctttttattttcaaaccacgctgcacattccaagagagtagcagttagtcttggactctacaacttgaatttcttatcttgctttcctgcagtttgacaagctccttgggactggtcagtgttcattccccaggctggttctttcataaacrctgtctgcaggaatgaaaggcatcgcctatggaaagggctaagaggaagaggacactcccatgtgcggtgggagtaatggcccctccgtcwtcctagcagttcactgaagcctgaagcagtgagaggctgctggatcccactgtgcttttgttaaagccctgtccccacatgctgttcttggcttgttatagtggcacgcagttcacttccagagactccccagccccaaacacgtatagcgccaggygaatggaagtttcctccagtgcaactcctggatgggtctgagaagggaagcaagaaccaggatgtgactcaatggtgaacttacgactcggccctgggggtgcagcgtgcacatagataccatggagctaggtgctgacattgtaaaaagtggacccctgtcyggaagactttcattttctttcggcagttcttaactctcttccttggtcacatttgaggagttgccctgttggtaagctcaaggtgccactcagccagagagtcctcctgggcatgtgaactgtgcggtgacctgggaccccacagttggggtaaggctctgctctcccttgttgaaattcttgatagtttttgaagaaggaaccccacattctcattttgaccaggcctggcaaatgctgtagcctttcctgcattgagtatagagttagtgagttttcacacgtgctggtagtgtggcacatgtgtgaaaactcactaactctagactcaaccaactccagaccgccctgcaaaagaccgggtggctctacaaaagtccgtgatcaccagcaactcaaagcatacgcgctgcggacagccaaggtcatattaggactatctcagtatagaaaggatgattggtgctgttaaagcttcaggggtgcagaggtctgttacatggcattgtgaccataactaagaataatgtgtatttaaacattactaaaagaatagattttaaactttctcatcataagaaaaataagtatgggaagtgatcgatacgttagcgagcttcatttaatcatttcacggtgtaaacgtatatcataacattatgttgtacaccataaatatgtacaatttttatttgtcaattgaaaagaatttaaggccgggtaccgtggctcacacctgtaatcccagcactttgggaggctgaggcgggaggatcacttgaggtcaggagtttgataccagccttgcctgtatgatgaaaccctgtctctactaaaaatacaaaaaattagctgggcctggtggcgggcgcctgtaatcccagctacttgggaggctgaggcatgagaatctcttgaacctgggagtgggggttgcagtgagcctagattgtgccactgcacttccagcctgggcgatagagtgagactcattctccaaaaaaaaaaaaaaattaaatgcttgtggtaaaatagtccccaagtctttcacatctagccatgtgattaaactttcaaccaagtcttgctacaacctagcttgagtaatgactctctgtggatggtgtttctgtgttttttgcggggagtggggtggggaggagaaataagaaccatctcccaacatatataggtggtgaagtccaaagctgaagttgccccagataagagaactctcctgttttctaggactgtgagaggttattgctctcttgtgtcaattttagttgtgttttttctttctgtattttgcttgtcttatgattcaagacatgaacataaatatacatttgaaaatttccaccaagaggtggaaaagtttatagattcagagaagataactttgtacaaaacaaaagtctaaaaatggttgttggatactctcaggtatttggagaatctgccaacccgtttgcaggaaatttgttttcaaatgggaaaggatagaacagcctgaagatgggagtgcagtcattttgagttacttccgttattgcagccaagggaagtcactttttagggaagacaatggacgtagagttttcatctctgaactgccactctcagtctttgaggtctcatggaggaaaaaaagtrtcataagactggagataagtaaaattccttgtttttaaaagttgagaagtgtaaatactagaactttcattctggcacgcaggagttttttccttccaagtgttttaacgtaggaagtaataaatgatcccatggagccaggatgtgtgcgccaaaactaaatcatgttgagttaacctcacttatttcattggtaccgttactgggtgagtcagttgagaaagtgccagagcaagggtgatcctgtaaagtaaacatttgacagactgcgtcaccacatccttgtgtatatgatggtgacctggggattgggaccagatgggttcatagctaatggaacaacagaataagcttgtattcacttccatatgaaatagaaggtgggactaacgctgtctttcctttttttttcttctctttctccttcttgtccacattcctttttaatttccatgaagaaaattaatttaaattgacttctcatatttcaagaaccctttgatcatttttttgatgttggatttcagcagttttaaaaacttctgtcttcatttaattttttaatggcattactaagatataatttacataccataaattcacccattttaagtgtatagttcaatgagttttggtaaatttggcgttgtgtaaccatcaccaaaatccagcttagaacgcctctctcatcccaaaagtctcctcatgcccacaggatccatcctcacatgtgtctgtagctcagacaatcagtgatccagtttctgtgtctgtaatttggcctttgataggtattgcctatgagtgggataattcactatgtattgttctgtgtctggctctgttcatttagcataatatgcttgagatccacccgtggcatgcatggagccgggactggttccttcttgttagtggtcttccgtcctgtggctgtaccatctcttgcttctttattcaccgggtgatggatatttggaacattttagcattcatctaattttaagtttactacttttatcctgatccaaagttcatgttagaaacaagtgctgttttcattgccactttccccccatctccaacatctcatttagggcacaggaaaattcttagtaaggacttagaggaaaagtgaagacctctgcctccacgcccactggctaaggtggctggtctgcagggagctcgcaacaggcgtctccaacgtgatgccaaaggctgacttttgggaaagtggaaactctcccagacctaaaactggagaaaaggcacatccattcttgatgcctgtcttgtgggcttattcgtctcctaggcagaatgcatgaaaatttcagtgttgccaaactgatgaacccatttctttcccttcaattatttatctccccactgatttcattaattaatgaagcttttggcaatccaccagatttctttcgggaacgctctttgtcagtgtcgactgtgtacaggctgcagggaccgggggagccatcagacgccrtctctgcctcccgagcctgcttcagggaggacgtgtcagctccgctrtgtggctatcagaggaagctggtttcatagcacgagtgtcatgtctgtcacgtatttcagccctggaacttctccccacatttcatgtgaacacagcaaatgtgttcatccatgacacacggcagagagcagcgctggtggtgaggaacatcagcagagtgtttaatctcagcttttcaaagcagcctcacaggaaggagaacaaaatatttgatccaccgaagactttyccccaatcttaggcacaaagcctaattcttctagatggtggcggtcgctgccgtcaccatgcgtgcctggggttgatttcctcttgcctgggaaacttagggtgttagccaggttttcgtatccttccagctttgcccattgcctatactcaggatccagggtaagggccagtcctacttaaggaccagtctccgagatcatttcagttgaggggratctgttttacttcctgcaagtgctgtggtgggcagtaacatcctgccaaccggcctcgcctggacaccttgctctgcctgggtgarggtggagtggctttttyctgcaggctgaaactccctgactcctttctgcagctcatttccttcatctaaacagcatgtccctctatgtgttgacatggctgtgtggactgaaggctgactccgcttatgttttgtcttctgtggggccagtgtttttttctttgtttttacatacagctttattgagatataatttatataccataaaattcacccattgcaagtgtgcagtgcaatggctttttgtatattcatggttgtgcgaccatcaccactatctactttgagagcatttttagcacctcagagagaaaccgtacatatcagcagtcactcccccatcctgccccctccagccctagacaaccacaagttcactttctgtctccatgcattggcctagtccgaacctttcatataaaccgaatcgtaccatatgtggtgttttgtgacgggtttctttcatataacatgtttttgaggttcattcatgttgtagcatgtatcagtaattaatttattctttcttgtggctggagaatattccattttatggatatactgtattgtatttatccacgcatcagttgatgaacactggggctgtttcggcctttggctatcgagagcaacgctgccgtgaacgtgggtgtacaagattttgtgtggatgtgtgttttcatttctcctgagtagattcctaggagtagagtttctgggtcatatggtaattctaacatcagaagaactacagctggatgtgtttcattcacttcccaaaatcttttctgaagcgaaagaagcaatggtattttgcagaggggtctcggactttcaaatccaagttcctttgctctttggacctacgtcaagccattatcatagagctaatgaaggagaactggatgtgtgaggtattacagggaaagatgaagtagctgggagcagggccctgtggtggtgatgatctggagtttatcacagggaaccagggcctgtctagacttagtgtatctttgcttcagaagggctgtgtaaccgtatctggctctgcaatggcctcggaacgataagaacagcttgccgggtgtgttctgcagtttgaggctttttcttcgcgaagtcagggctggcttttgtgagcccaggcrctggatttctggagctctccagccttgccaggatttgctttcttagaaaccaggaagtcctttgaagacaatgatgtgaaacccaaacacactggcttttagtattgaatccatgtttgttctctaaattgagtcggtatttacagatctttgagaattaaatgaatgttaaagcttagaaccaaggattaacagaagaagttgtaagtagcctcagtaaatctaaggatttgctaacccatgctgctttccatgagaaggactgagtggaatggaagctggagggtttgtaagaaggcattttctcctcgatttcccaatacttagttatttcttactgtaagcagaggagtgaaaggacataaagaacatggccgtgagaaaagatcaccagggccacgcggtagaggctctataaatattcgctgaacgagttgcctctaaacgtatatatgtatrtgaatcacttaatatgttttagtatttctaattgttcatcttactttatgccctcaatagtgttatcagttaggctgatgtgaatgacaggaagaagctgaggatcagagaaggtagggacctgagcaggttagtgaccaaagaaaataagtcatgacttccctgagcctctattttcttagctgtacaatgggtccactagtaagtcacagagctttttcaatatcaagtgacatatgttaacatactcatgtgatcttaaaaaatgcagtagaaaagtttttctttttttaaaaaaagttaaatatattgaccaagtggttaatacttttgatagaataattagaaaatacagagaagcataaagaagaaaatgagtatttcctattatctcactaaccccaaacatccacctgaagtgtgaattgtccaaccattttaaaaagcaatttgttaatatatagtaaaatcagaggtgtgcatgtcagaatgaggcagcagttccaagtccagtgttcattactgcattgtctgtagcactgaaaacaaattgggagtaatgtgaatgtccgccagtatgggaatagattaattttggggtagtcatccaaagcaatactctttgcaattaaaataactaaaactagatatgtaacatttcaaaatcgcagtgttgaatgtagaaaggagctcacgaaaggattcagacattataaattgcacattgtttgtgaatacatatgttaaataatacagtaaaagaataaaaacatagaaggaaacatgaatttcaatcttggggggtgcaatatatttatttatattacaaataaaatatttataatttttaaaatttaagtagagagatacatattatttttgccttttaaaagttggatcatattggctgggtgcggtggctcatgcctgtaatcccagcactttgggaggctgaggtggggggagcaagaggtcaggagatcgagaccatactggctaacaccgtgaaaccccgtctctactaaaaatacaaaaaattagccgggcatggtggcgggtgcctgtagtcccagctactcgggaggctgaggcaggagaatggcgtgaacctgggaggtggagcttgcagtgagcagagattgygccactgcactccagcctgggcaamagygcaagactccgtctcaaaaaaaaaaaaattaaaaaaagttggatcatatcatatacatttttttttctttttttttgagttggagtctagctctgttacccaggctggagtgcagtggcttaatcttggctcactgcaacctccacctccggggttcaagagattctcctgcctcagcctcctgagtagctgggattacaggtgcccaccaccatgccagctaatttttgtacttttagtagagacggggtttcaccgtattggccaggatggtctcgatctcctgacctcatgatctgcctgccttggcctctcaaagtgctgggattacagacgtgagccacagctcccagactcatatacatttttgtagactctgtattgtaagcatctttgtgtcactaaacacacttcctcattgtttttcctgaccctcctaagtcgttctgttctgacttaattgtattttctttatttttgagacagagtctcactgtgtcacccaggctggaatgcagtggcgtgatcttggctcactgcagcctcaacctcccaggctcaggtgatcctcccacctcagccttctgagtgactgggaccacagatgtgcaccaccatgaccagcttatttttgtattttttgtagagacagggtttcaccatgttgccgagaccaatctccaactcctgggctcaagagatctcccgccttggccttacagagtgctgggactataggcgtgagcttctgtgcctgtccaattgtattttcaaagaattctagaagaagcaaarttgctgaatcttccttttcagattttataattattttctatttattcatttataattgttcacaattttttctaattcatttataatatatttgaccctgaaggagctcataacctaaaagcaaaagcagaattcaagacacacagaattcatctagtttatgaaggaattccccaaagtttgggaattcgcaacgtgaaacttttatttacttttacccaaaataaccatgaatcaagcaaatgtctgggttggagagaggactctcctattaccactgcaagaaacgagtcactgactgccacccacaaccccatgtcagaggccgtagttttgtcaaaggaaggtggtctcggggcctctagaggcctcgttacaccctctactgctgcacacattcctgttctggcacttgagttataaccattaacccacttatggaacttagtgttccattattggaacgctaagcatgtgggaattatttatatcctcctgctcaaggtcatcaccaaggtctgatttttcactcatgcaaaaattcaaaaaattatactctccagcataaatgggttaagaagataattacaattccctaccatcataggccttccattccctaatctgtaacaggtaatgtatccctttagaagaatctaaatggctgctccccctctctgcttttgttcctcctgcagaaactgmcctataggtagatttgtaaactatcaatgcccttatgtgtatcaagagcacgtctcccatgtttgaatgggaaacgtaaggcccgggaagtgggcttggcatccacctggctcccctcattcccacctgggaatacgttggcacaratgaacttgcaggagctctcaggcgcagcttccatcctccctgcgggtctttaaccagcggcyggacaggctggtctgtaatgcagggtaacgttgtgcagcctctgggagaggaagaggagatcaggtggagaggccaagagagcaaggccaaggaaagagctgggggcacacaagcttggtggagccctcctttgttctgaccagctgagtgacaggcaggtcacttaacactctagctgtcmgctttctcatctatcaaaggaatagttagagaattgacccctacagttcaattcatstctgtttattggtattcgatgtaggagagactgcatgggaatcaatgaggtagagaaggatctttcaacaaatgccttggatacaactggttagctatttggaaatccatttaaatcttcacagaggactgtaaccaaaaataagtgtaagatggattgagtagctaaaaacaaaattaactatagaaaaactagataaaatgagtgaacatttatcagttttctgcaggataagaaataagcgtagaaggaagccctaagtttaaacattatgaaagaaattacagttcttacttcatcgtaatttaaacctccaataagctaagaataaaaataaacaaactgaaaaagttggtcactctaaatggaataggcgagatgttattctatttaagaaagcaatatgcaagggataaaggcacaatcaataaaaaagtcatggaggggaaacagcatttaataaatactttaaaacatgcagcttcatggccattcagaaatgcagtttaatgtaagactgtataaagatttaattttgcttttcattgtttttaaatgagaattcttattgctgacaaacatgtagtgaaatgggtatttatatatattgctagtaagaatataaacagctacaaatattttggcaatatttggcaatacaagcaatttgtcaatattcactaggtaccttaaaatgtttgtttctggaatgcagaaatgttgtttctgggaatatattgcaaagaaataacccaaaattcaggaaaaaaaaaggtttgtgcccagaattgytaaacattgcactatttattcttgaaaaaacacaaagaagcctaaatataataatgaggcaattaggtaataattatgatatgtctagtataattatgagaaggatatttatattctaatatggcaactgaatatgatttcacattaaaggctagaaaagagcatataaaatagatttaaaataaaatctcaactactgtatatttatttttaacttttattttaagttcagggatacatgtgcaggtttgttatataggtaaacttgtgtcatggggcttcttgtacagattattttgtcaccaggtattaaagctactacctcttagttatttttcctgatcctctccctactcccaccctccrccatctgataggcctcagtgtgtattgttcccctcaatgtgtccatgtgttctcatcatttagttcccacttgtaagtgaaaacacgtggtgtttggttttctgtttctgcattagtttgctaaggataatggcccccagctccatccatgttgctgcaaaggccatgatctcattttttatagttgcataatattccacagtatatatgtaccacatttcctttatccagtctactattgatgggcattgaggttgatttcatgtctttgctattgtgaatagctgcaatagtgaatagctgtgaatagctgcagtagtactgcaatgaacataagcgtgcatgtgtctttatgatagaacgatttatattcctttgggtgtataaccagtaatgggattgctgggtcgaatgatatttctgtttttaggtctttgaggaattgcgacactgttttccacaatggttgaactaacttacactcccaccaatggtgtatgtgttcctttttctctgcaacctcaccagcatgtgttattttttgacttttaaataatagccattctgactggtgtgagatgctatctcactgtgtttttgatttgcatttctctaatgatcatgatgttgagctttttttcatgtgtttgctggcctcatgtatgtcttctgaaaagtgtctgttcatgtcctttgcccactttttaatggggttgtgtgttttttctcgtaaatttatttaagttccttatggatgctggattttaggcctttgtcagatgcatagtttgcaaatatatcatcccattctgtaggttgtctgttcacttagttgatagtttcctttgctgtgtagaagctctttagtttaattacatcccatttgtcaatttttgcttttgttgcaattgctttggtgtgttcgtcatgaaatctttgcccattcctatgtccagaatggtattgcttaggtcatcttccagggtttttatagttttggattttacacttaagtctttagtccatcttgggttaatttttgtatatggcataaggaaggtgtccagtttcaatcttctgcatatagctagccagttatcccagcactgtttattgaatagggagtcctttccccattgcttgtttttgtcagctttgttgaagataagatagttgtaggtgtgtggccttatttctgggctctctattctgttccattggtctatgtgtctgtttttgttcagtaccatgcccatttggttactgtagccctgtagtatagtttgaaatcagatagtgtgatgcctccagctttgttctttttgcttaggctattcaggctcttttttggttccatatgaattttaaaatagttttttctattaatagtactgtgaagaatgtcattggtagtttaataggaatagcattgaatctgtaaattactttgggcagtatgcacactttaacgatattgattcttcctatccacgagtatggaatatttcttcattcgttgtgtcatctctgatttctttgagcagtgttttgtagttctccttgtagcgatctttcacttccctggttagctgtattcctagtttttttttttttttttttttgagacagagtctcgctgtcacccaggctggagtgcagtggcacgatcttggctcactgcaagctccacctcccaggttcactctattctcctgcctcagcctcacgaggagctgggactacaggggcccaccaccatgcccggctaattttttgtatttttagtggagacggagtttcactgtgttagccagtatggtctcgatctcctgacctcatgatccgcccgtctcggcctcccaaagtgctgggattacaggcgtgagccaccgcgcccagccagtattttattcttttttgtggcagttgtgaataggagtttgttgctgattttgttcttggcttgtctattgttggtgtataggaatgctactgaattttgttcattgattttgtgtcctgagactttgctgaagttgtttatcagcttgaggagcttttgggctgagactggggttttctagctgtaggatcctgtcatctacaaacagggatagtttgacttccactcttcctatttggatgccctttatttctttctcttgcctaattgctgtggccaggacttttttttttttttttttttttttttgagacagagtcttactctgttgcccaggctggagtgcaatggaacaatctcagctctctgcaacctccgcctcctggattcaagcgattgtcctgcctcagccttctgagtagctgggattacagacatgtgccaccacacctgactaatttttgtattttagtagagatggggtttcaccatgttgttcaggctggtctcgaactcctgacctcaagtgattcacctacctcagcctcccaaaatctgtgattacaggtgtaagccaycatggcctggccaggacttctaatactatgttgaataggygtggtgagagagggcatccttgttttgtgccagttttcagggggaatgcttccggcttttgcccattcagtatgatgtgttggctgtgggtttgtcatagatggctcttattattttaaggaacgttccttcaatacttactttattgagagtttttaacatgaaggagttcaactactatatatttaaaaataaaaaaagcctctgaaatggttttatctagcaaaggggaggggaaagctttatgcattygccaaagaatagaagaaaacaaatcaaaatgttgtcaatagctgttctaggtggtaaaatgtctgcattttagaattgtatgcattttgtataatgaattactgttataatggagtgactttacctttcaagaaattcctggctttgcctaagtgatttacacggctagtataatttcctttagtttcactggatttgtgttttaacagaagattctttgttttaaaaaaagtcacctctgtgttcctcaaccgacatctgagttcctcctctacaggggattccgcaggtaatttgcttttatttgagtaatttcatgtcagtttaacatatagcctcatgcagtttcagtgctggtaggaagaggactcaacttggctgcttacagcatgtaaaggtatggagagcaatcttgtgggttcatctgcgtggattttgcagggagaataacttggtgtgtcatctgccctgtgtttaatgttaatgggaaagaagcccaggactttatcagtttatgctcttacttttgctttgtctttgacagttcagtgttaccactatgaaaattaaattatgttaggtcatctagagactcagatggaatcagtatttattgagcatctgttctgtaagaagtggaaggggtggaagtcatcccggcccagggtatattactcagtaagtgctttagtttattgggcatggtacttaccacttaaaacctagcaaggggctctgtaagaatcccctgtgctaggctgggtgcggtggatcacctgagattgggagttcgagaccagcctgaccaacatggagaaaccctatctagactaaaaatacaaaattagctgggcgtggtggcgcatgcctgtaatcccagctactcgggaggctgaggcaggagaatcgcttgaacttgagaggcggaggttgcagtgagctgagatcactccattgcactccagcctgggcaacaagagtgaaactctgtctcaaaaaaaaaaaagaatcccctgtgcctatgctcagaagtctaatgcaatgttagtatatagtagaacttaaatatgaatcaatgaatttttagctgaatgaatgaacgggtagctccttggatgggaacctaatgaatgaatatacttctcagtggacgaatgaatgtatgcgtgaattaaacaactctgtcctggattctgcttaaaagttggaaagaacctcatcacttctccaagcatcttttgctctgagcttgatgactgaagtaagaagagagagaaggccctgacacatgtttgatcactgctgctgctaatgaaacttttckaggaatagccagtctgtaatgccctcaaaggcatccttcatatccaagtacttcagtattcttgtggccatttttcagagctatctagaaacaaggatactgcatgtcaacttagtttgggcactcgaagccagcaattctgtcttcaataaatgattcatgtcagaaaagcatttaagtgcatttgttttctaataagtctctcttcaggtccattatgcatgaatcaaactggggaagttgcctgggttcatttggcatcctttatgaaaatcaaagaaatgagagatttaaaatccagccatattgattctcccgccttcctcgcactccttaccagaaactaggattggcaatgacaggatctccaagaactcaaggattgagggcacttcacggacagtgagkaggagagggaggggcctaccaaagagaaaagagcccagtttctggtatctgagatgcagaagaaaatgaacggccacttgcttgtgtccccctaaactgctcccctgagcagcccctcgctgaaccaccccacaaaaagtaagctcctgtggccactatagaggcagcagagtgcttcctctgagctctactcctggcgatccctctagggtgcttaatgccacgttagtttccatgaatcagaagcactgtggttaaaggcacgtgcacaagtggccccatttcccattttccagaaccataaaactgggactgatatccaatgcctaagcatctgccctgcagaaggcttccacatccatcacctcctgaagtctcccatcacccctgtggggccggcgtgtatgtcagtacgtcctgttgacaaaggaggaagctgagcayggcagaggtgacgtgaccaaagggatgaggatcaacgatcaagaatcacactcaggtcccctgactctaaatactggctacctcccctgctgcatttatttattccaccatgaatagagtcgcaatttctcgattcccaaggaggtttctaccctggttggcataggccactgcaaaataagttgccagttggtgcacggcttgctagtaggcatgtgtgcgaaattaagttagcatttgcaggagagttctcatgcccacgtgttttgctacgtggcctttggctctggttgctatcacttcgcatctccttggttttctgagatagcctgtctctgacactgggactccccaggcctggggttttggcccatctgtctgtggttggtgaccttcactgattaggagctttgctcagggggccaaagacagtgtttcatcctaggctaagtggtggaaggcatcactcttactggatcagttgacccaggcagagtaggtgggctaggccagaccaaagggagagatgtgtgcacccttgtcggctttactggatcggagatgtcagagaatgcagttcgctatctctgtttggtggttcagtattattatcctcatggtttcctggcctgtctgctcacacagcatcaaaatgtgagtttgtttagccataatggagccagcttaaaggttgtagagtgctgaaatactgaaaagattacgcttgtaaccctttccccaatggttattaaayatgaaaatactaaatgatgaaataagcttaaggaaactgccaacattttaaatttcgccataaaccttaactttaaaggctttttattatttgtttttgtcgtattttgaaatattaaagatcagattttattaaaaagtcttctttggtgccatgatttgctggtgatgtaggaacgtgctgtctgcgttggtgtcagccccatcctcacccctgcccggaagacttcctgcttctttgcgggaggcagacggcactgtgacctacctgttctttgcgtcttctgtatttgttagaattgtgtcgtcagctcctcgctgtatgtctgtttgagatcaggaaaacacaggtacattcagagagcaccaaagtgatgagggtcttggtcttctcaataccagtttttatttcccttccacaaggtggaaacaaggcctacatcgagtattcaactcatttcttcaatgagatttatgtagggaattgacagttaacttgttattaggaagagagcctcaaaaccaatgactttgaactgccttcctctgggctgggaataaggacataatcatttcattaaaacttgtgagtgggctttgaggatcttaggagtcacttcagctcagggtcaccctggagatgagtggttgtcaggctaaaaatgtccacctgaggaaaatcttattgaaataaacaaacagataatgagagccacagtggagaagtgagtaagaaaagctggtgatggttgggggccagggagaaggggtcaagggaaggaggagaccggtcagcccgggagagaggcaggggcttcgactgagggttcttcytgcagctgttgtgctgtttctctgccttcctgtgtgtaattgttacagcacggtgggaggcagggaatttcacctccattagcagatacagacccggaggctcagagagcataagctactgacccaagattgcacagctaggaaacagcgcctctcctgcaggctctgggcacacagccttgtggtgggccaagtgcgcaggatggccgaggctctgacgtgagctgccagtcctgaccacgttgccttggtgacggtgggggtagagtgggaggtggtttaggtgctgaataaagctctctctttttgtttttagtgccggctggggatgccagccacctcacgcctgcttctgccggcccagggccgggtcttgggccatttccctactttggtaaccccaaggggagagctgccccttcactgtccccagctcccatgtcgttccagccctcacaggcttagtattgagctgacagccacagccacgtagcagcaatgacgatgatgaaatcgacaatttcaacatgcattctgccttctttccatgtttgaaaaagtttcatttttttttaaattaaaaaaaaatttttttgagacagagtctggctctgtcgcccaagctggagtgcagtggcgcaatctccactcactgcaacctccacctcctgggttcaatcaattctcctgcttcagtctcccgagtagctgggaggcacgtgccaccacgcccggctaatttttgtgttcttagtagagacggggtttcactatgttggccaggctggcctcgatctcctgacctcaggtgagccacccaccccctcccaaagtgctgggatgacaggtgtgagccgctgcgcccggcctaggtttccttattaaccagaatataatgttgtggacgtttcccctgtttggaagattaatttttttcatttctgtttggatttatcatattggatttttcatcaggagttgataaaattttttggagacttcacagactgagcataattttaaaatatgcctctgctgagcattgtttaaaatagctcatacaccctcggttgttggaaatgcatctagccagctggcaccctcagaatgtgtacctactctgaggtctgcaccctccagccccatgaggctgcgggcgagctggatggggtttggaggatgtggccttctacttggagaaaaggtgccactgaggctccccaggactgactgtgaaagggaagtcgcttaaatactcatgagcaccccaacagtcagaaacaagaccatggactgaaatcccaggcgtcccggaaggctgaagttcatgaagtctatcatgttgggcttcttgtcttataggcagcattaagagcgtgagactggttaaaagcgtgagactggcccaggccgggcccccacagttactcaccattagccctttacacttcacctcctctaactaaacctcggttttcgcatctataatgtgagaatggcaatacctttcatagtgggtttttgtgagaactaatgggataatatatgctaaacattttttatactgatgctgctgcactggttatgattcagaagccctatgatgtttaactgtaaacatttttggccaggtgctgtggctcacgcctgtaatcccagcactttggaaggctgaggcaggcggatcacttgagatcaggagttcgagaccagcctggccaacatggtgaagccccatctctaccaaaattacaaaaattattcgagcgtgatagtgcatgcctgtagtcccagctactctggaggctgaggcaggagaattgcttgaacccaggaggcggaggttgcagtgagccgagattgtgccactgcactccagcctgggmaacagagggagactccatctcaaaaacaaacaaaaacaaaaacattttcatctcatagcaattaaagctacggaaagccttagagaacacttaatttccttctgccttacttctcatgacagaataagttaccaaggttttccatctgtgtttgcttctgagtctagctttctgtggactaggtataaaagctcttgccaatttgtttttctctcacaagctactcagaaccaactattaaatatgaacttagaagcatcacttttccatagacctgactttttatcatgcaagagtggggctttgaagagggactaaaggttagttattagaggacatagtgaaaaagttaagtatgatttatggtttcttcagagtttggtttgttttaacagacatcatgtactggacaaaggactgttctatgaaattttaaaatacatgaattttgtataggcttctgccataccattagatgatgataattttttttttttttttttttttgagacagagttttgctcttgttgcctaggctggagtgcaatggcgcgatcttgggtcactgcaacctccacctcctgggttcaagcatttctcctgcctcagcctcccaagtagctgggattacaggtgcctgccaccacgcccagctaaattttgtatttttagtagagatgggggtttcaccatgttggccaggctgtctcgaactcctgacctcatgatccacccacctcggcttcccaaagtgctgggattacaggtgtgagccgctgcacctggccgatgatgattattttttaattgaggactatgttacttagagctcgtcccaaagacagttaaatccagtctagaatactttctctcctgtttggttgtaggaattaggccaactgaactctaagggagccaaaactgaacccagccttgtctgccaggagtgagaacagagcacgttcctcagacctgtacaagttagttgccgccctggtggagactttggccacattcatccgacctgaaggagtgctggcaatctgaatgtagtgtgtgctggacaccagctccctcctttctcctgggactgtatccactcccctctcctctgtgggcaccgcagtacctggggattctgtgtcctggagaccgaaatattggttcagaaacaatctgccagctgtccccactttagctgtgctgctctctttgccagtccctgaagtttttattttcttttatttgtctgsttaacctgggccacttgggaatcttctctgtagatgggagttggggaagagtggcagagctggatcgcttaatcactgttcaggaagagtgcagtggcatagaggaaaaagcttgccttgggagggcagccgtgtgtttgacttggaagggatcttggagtgcaccttgtcagtttcttcctaaggataaagatgctgaagctgtagtcttgaacccagcccaggcttccaggtggacagacttgtttaaktgtgtgtgtgtgtgtgtgtgtgtgtgtgtgtgtgtatacacaaagatatctgctgttagtgttttggtaaggctttcttttcttccggttttttttttagagttgtgattattttctccacatgattttgtatcctgtcacttaatatcataatgaaaatgtatccattttactgcaaacctattttagtgacacttcacctattccatttggtgggtcttccataattcagttttttgtttccttatgtcagaaatacaaattgtttctaatttttggcattggaaacagtagtggttgaatatctttatacatagggaattttctgaaagttaattttgtccttaagatagccagaaattggtttactattaagtggtatgaagctgtttaaggccctaatatgtgtgtgaaattgcttactaaaaagatggatttgtactcacactgaggctaggggtcccattctacctcatctctgtagaatggagtattatcattaaaaacaaaaagcctagtttggaatgtaaaaagtagtataaaataatttgcattcatttctttgatctctttttgtatgttctggattttgaggtcaaaagagcttcaataagatgtttagattttaatgacaatgctaaagtgggcaggagcattatttcagcaattcttcttggactgatttctttggaagaaaggaagttttgccttttctacaaccctgacctggttgagtgctgcaatgtgaatctatattaaaaacaaacaaataaataccttttaaatccagctagtggcggagttaatcccatttcaggtttagcctgtcttcctgagtatgactgaagttcatgcttatttaatagtttcagaattttgaataagacagaatatgaagtcttaactaaggatatcttgttgcctaatttaatgcattaaactgacagctctctgtatagagaaggatgcggtttggattctttcatggggaaattctgagttttctttcatttgcttatgttttcaccaacataggctgggcagcatatggtaccatctgccttacaccgtacataactcacttcagcagtcccatcgaccaaacgctgtgctggagtgtgtatgcctggctgtctgtgtctgtagaacttcatggtagaaatggtacctgagaaattcagtgctagagtgagagcgtttgtctcgcttgcactttaacatattcttatgtgtattaattagtctattctcacacagctaataaagacatactcgagactgggtaatttataaaggaaagaggtttaattgactcacagttctgcagggctggagaggcctcaggaaacttacaatcatggcagaaggggaagcaaacgcaaccttcttcacatgctgacaggaaggagaagcaccaagcaaaagggtgaaaagccccttatgaaaccatcagatcttatgagaactcacgatcacaagaacagcatcagggtaaccactcccatgattcagttacctcccactggttccctcccacgacatgtggagattatgggaactacaattcaaggtaagatttgggtggagacacagccaaaccctatcacctcatctccatcccacgctttgggaagattacatagttaaggaaggtaaagtacacgtgagtgcttgtgactgcattatttcccatttctgagtcactagcagaaaagtataggttagaatgaaaacatatgggggaggatgctttaacacattacaggtaaattaaagacaatgtcttgatctagataggtagagaaggaaaactgagttgacgaccatctcattggctttcccaggagagacgaagtcatctgtcttagctgctccttctttgccttcttgcaaatgatagaaaaatcccccattacttggggttttccccgttccaggcatcctggcaagtgtttccaatgctttactatacttgctccttgcagccacctcatgctgaagttattgctctgattttacacacgaggaaagtgagggccaagtaagttaatcaacttccatagctgtaaagtggccaggcctggatttgtagccagactgcctgactctcagtgccctctccacagcggaagctccaacaactatgctgcattctgcctcccgccccccaacccccccattacccccccacccccagccccccaacacacagcagtgcttggcttccaggtggtctcgcgttgcctgcacatttcagaatttctcttgtctggtgctttggttgatcacctttctgctgactttaatagagcatgccaaccctgtggtccctcctcaagttagcaagcagtgtaaactttctccctcagagacttgcaggcatctcacttttgtggcatatgcccatcatctgcccacacctaaccttcacgggggctgggaaatggagtctgtccagttctgtgctcagaatggggtggatttcattctcgtcgtaaaaaaggatgataaaacacagagaagaaaaggagatcagccataatccttctgccaacatttagccactawtaatagatagttatagatatagtaatagatttaggtatgaatgacatatatgcacacattattattttayagttaagaattatacttctttgtgaacttttcccactcagtgtattctaatattctctaaaggtctatactggctgacttaacccctttggtacactgttggcttatagtcaacatcccctatgtatttaaccccctttgtctctcccatccttatacgaatgactcagtttttacatccaagtggtgctgaaggagacttcttctggtattcagtaagaaaccttgctaatgttaatgatggttacctactttctcaaatagccatgaattcctttcacacagactcatagccaacactttttcagtatgtgcccttgaggactgccagagactttgccaaatgattggctaaattcaatatctactaatctaccagtggcctgggaaataaaggtaatttggattagattatgtctccttgaacctgttgtgattcctagtgacaactgctttttgtctatgttttaaacgctggtgcagtcattttcaggtgatgcatattgagctcatgggtcagatgcggccttctggaaaattccaataatgtatccggatatggtttcctggcatttttcctattctgtatgatttaaaaatgtctttgtgtttccgcgatcccttttgcatgttgccttagttcactaggttgtggtttgtctgggactcattatctggagagaagcctccccctgccttttatttatttattttgtttgagatggagtctcactctgtcgcccaggctggagtgcagtggcacaatctcggctcactgcaacctctgcctcccaggtttaagtgattcgcctgcctcagcctcccgagtagctgggattacagacacccaccaccacatccagctatttttttttttttgtatttttagtggwgatggggtttcaccaggctggtttcgaactcctgacctcaagtgatccacctacctgggcctcccaaagtgctaggattacaggtgtgagccactgctcccggcctcccctttccttttactgctttaagccctcatcgggtcacttgtctgcccccagaggtaaccgtgccagcctctgtggccagatttctttgtgtgaacctgttgaaagagaattcccagtagaatttggcctcctgcactcccatccctagggtgtctcaaggtcatggggtgaatttcaggaaaaagtaaaggttaaacgctgcttctgagctcactgatgggaaaacacctgctgtttcatttcatgagtaccaaaacccagaaaaaggcaatacatcatctttactttgtcaagcacacgagttcatcatttttggccttgatagtaagaaacatctttttttttttcgcagaaatatggcatagcagcagcttcctagttctctgttgatttagaaactctgtaagtagcgctctgatatgctcagaaacagcataagttctttgtcatattcttgcctcatrtaataagccactgaagtggatttgctggaaagactctttccgtcacattctaggtacttgcaaagctaaaagggaactaggcaaagtatttttaaaatgtttctctccagctattttcatcgctggccagatatttataccatctttcctcggcatgacatgaaattggctaattgccacgttagaagagaaagtgctgttttattcaagatgggaaagaagctgatatggtttgtatctgtgtccctgcccaagtctcacgttgaatttgtaatccccagcactggaggtgggacctggtgggagctgattggatcacgggggcggagttctcatgaatggtttagcactgtacccccttggtaccgtataatgagtgagttctcttgagatttggttgtttaaaagtgtgtggcacctcccccttctctctctctcgctcttcctcctgccttgtaagatgcccgctccccctttgccttccgccatgagtaaaagcttcctgaggcctccccagaatcagaagccactgtgctttctgtacagcctgcagaaccatgagccaattaaacctcttttctttataaattgtccagtctcaggtatttctttatagcagtgcgagaatggactaatccagatgggtccccaaaacgtctatctggaatgaacttaagacgtatgtcacacatttgtcctccagacacacccctacataattcagccacgtttcttttaatcatcagccctcattctaaagtcagttaaattatttaacaactcgagcacttctcaccttcttcttcagaggatgccttgactattcttattttggcgtttgcatataaatttgagaatccgcctaagtttcacgaaattaaaaagcaatagcctccctgggattttgattagaatctgttgtccctttttactgatagaaaaactgaggtgcagaatagttaatgtgcccaaaatagggtaccaatacacaactaataagagacagggcagagctgcaaacttgggcagttgaactctcaagcccacatgcaaccaccccacaccaggctaggaaatgggccttgaggacagaagtggagctgaaactcaagacccaaaacaaaccaagccttgtctgatttctctttaggctcatctgcttggggttcctctttacacttcaccaatgcyatctgagaccctggttcatgcattgctagtgagggttttacgcacggtaaaatttcaatttaccttgaaattttataaggaaaaaagaattcttaatttttcttcctaatgccctaatattgaactggacactgaagaaggcagcatttaaccccctgcatttccgatgtcagctggcttccttttcttagtgtagaattggcaaagcaaaggatttgtcaagtaatttacaaactctagaccccagaaacctagtgaaaaaccgagcttggcctggccagattgtcttgacgctattagtggctaatccggggacaatgaacaaattgcatgaatattcaacatcaaactgttactgctgccaagctgcaaacccatgtaaacccctcctatttatgtggctcccaaagtcaagtgcactgagcgggggctgccagcttaacgcctattcctcagtgggagcctgggagtgttgaaactcagtaaggagttttccagcctggaaatatctgtggaaatgccgtctgcgaaaggccagagatgtgatgattcagaccctgcagggcctggatttgtgccagagagtggagcttctggggcctagagaatgggatgtctcagtggagctaagatgatttyagagaaatcaggccgaaagcttcttcccatttccctcctatcagaaatgtataggaatcttgcaggaatgcagcctgccttctggatagtcccagtaagtgcaaacatgcctccctgtgactctccatatgcccraaaccatcctcagagccaacctgcatgacccaggagtgactgcactcaaagctgtgctgtcttctgcccttgggggaatttctgggctgctctgccaaagggagttgtgagcccaagagacctcccgcctcacatctcaggagcagaacacccctgacacgtgcaggagaaagagctcggagttaaaactgagccccaagatcagttaccrattgtggcaagcttaggcaagttgcccaacctcaccattgcctcagtttcttattctgaaaagtgggatgataagaatactcgtcttgtgggattcataggagccttaaaatgagatcacatgtgtgaaactcttacagatgcccctcaatttatgatgggattacatcccgataaacccattgcgaattgaaaatactgtaggtcaaaaaggcattgcatgcacctcacctaccaaacatcatcgtttagcctcgcctgccttaaacatgttcagcacatttacgttagcctacagttaggccaaatcatcttacacaaggcctattttataacaaagtgctgaataggccttgtaatttattgaatactgtactgaaagtgaaaaacagaagagttgtatggcctcgaattaaaatttctctgaatggatattgcttttacaccatcgtaaagctggaaattttcagtggaatcataagtcgaggaccatctgtatacagattgttcattattaaaaaagattgtaacaattttagggcctctcaactattattgttagaaagtttgtcgtaacattagacgtcttcctggggtagtctgccaggctcttctgcttccaggaaaagcgagtccgctgctcacagctttccttttcatcagagtatttgaaactcctgccattttcctcaaaggaaagcttttatttcccaaactgtaaagtcatttcattattctgttttgagctggagactgattacaggactgtgagtctaactgtatgtatgtgttgagtttctttctgatttgagaacacttaaggatgtgtgtatctgtgtgtgtgtgtgtgtgtgtgtgtgtgtgtgtgtggtgtttgtgtgtgtgtctatgtgtctctgtgtgtgtgaccagggtgtggtgggggtagttttcttaccttcctagttatttgtatttactgatagcctcaaagttgagccctcgtgtaccttcactaaatcattctacaaatattttttaaaattaagttcccaccctgtgccagtgatggctctcatgtgctggagaaacagtggtggttttcaagtaaatgcttccctagtcccggttgcttgaggggtggcacccactctgggtatgtcctcgtccttgtccagggcaggcttgactttagggcagtcctgctggaagcgaggggtgagcagggatctggaggaggagaatgagaggagggagatggcgtggggctaggggtgagagaatggggctcaggccgcgatggcagcaggaggggaggccggatttgcggcctgtcctgtgggcagccgtcactcaagtgggacccagggctccgtggctggctcagctgctgcccagctggggagcggkgaaccctggccgagtggctccaccttccaggactcagtttcctcatctgaaatcaaagtaccaacctcagaggatattgggagaattaaaggaaggattattgttaaagggcttagactatgctcgacaggaagtaagcactacatcaatgtttgcaaaataaagataaatcaactaacgcacrtgagtttaacctcaagtgtatatttttcttttcagagcactttttttctgactctaaaagcacatcgtgtttttgctaacatttcctatttgtttgtgttttagacgccttcctgagtcctggatctttcttccttctggaaatctttgactgtgggtagttatttatttctgaataagagcgtccacgcatcatggacctcgcgggactgctgaartctcagttcctgtgccacctggtcttctgctacgtctttattgcctcagggctaatcatcaacaccattcagctcttcactctcctcctctggcccattaacaagcagctcttccggaagatcaactgcagactgtcctattgcatctcaagccgtaagatacytaagattstatattttcgtctccattgtggatgtgtgtatcagaattatggctcttgatatggattcactaggctttcgttgtgtgccgagctgtttttttgttttgtttttgttttaggtttgaaatggctattttgttctcaatcccccaaaattattttttgaatgaataatgccagtagctcaaaattcaacagccacagacaggtatactatgaaaagtaaatacgcattccattagtttctttagttctcctcagaaccaatcagtattaatgatttcttagttatccttacagaaatagtatacatatagctcttatacttgtaaatgcatgtgcgtctttctgtgtmtatatctatatagatacatatacatacgtatttttttttaaaaaactaagtggcagtatactatattgttttcttccttgccttttttcttcagctttttattttgagataatagattcacatgaagctgtaacaaataatactgagaaattctgtacactccttggccagtttctccctatggtagcatcttgcaccactggaatagcatattccaatgagaaaattgacattgatacaatccacaaccctactcctatttctccacttttaagtacactcatttgtgtgtgtgtatgtgtccgtgtatgtttgattatgctaggttatttcatacatgactaatttgactggcctgagtttcaacaattaaaaagatgagtgagtgtattgggacatccagaaatgcattttgctattgatattgattagccttaagcctatacctattcttaaaagtagagaacgcagtgtgatattaataatgatatatatatgtgggtatgaatatatttcaaaatatgtgctttttaaaaatttgtctattaaaaacatcaactaagattatgccaagagtctaaaattattgatatatttttgataccctttaaataaaatgatcaaatttgaatttgaatcaagacaattcaagctatgtataattatccaaatggattaccacttatccagtcttatttgttaarcttcagaatactaacttgtaaggaagaaaagtcatagacatatctttatttatgacttttttcaccaactcagaacttgcaaataggcctgatactattttggatatagtttgagtgcaagagcttccatgtctygtattacaatgctttatagaaatatgtcttgaaagtgttcataagatcctaagattgagttataattgtaaaacagcaactttagtctatttgtctctggcctgttgggtacaaccaccaattcaatccaatatgatacaatgtacttttccttgtcatagacttcactcaacattggtctccaagtatgtacccttctacggtggtatagaaaaaggaaaaacttgtccaaacagggcagagacagtaggagatgatttggacaggaactgtagctgtttgaagagagataagtttgtgtaatcaagggaaaggagacagttgactgagatttaaaagatgtttataattttaaatgtctttttaccctctagcagttggtctstatttaagcagaatttaaatttaacaaagcaatactgattacgctttttcattgaaacctgcatttatgtgacttgcatacacctatggagattccaaaatctgttagtttgcartgtgaaatcctgtatgtttctactgtcataacccctacccaaatttcaagtggatggttacgaattggatttctcatttggagttaagaaataagaaacaggatttggaatcagagtccacaagagtactatatttttttttgattgatggtaaagacttgctaagtttatggcaggattgtggagatatttttctcaggatgcattagtgtatttgtttctggtggaaattaagatgggcaacaaattcagaaagsaaggcagatttttatccatcacaaattaattaaattatttagaacaaactccaaatgaaactcaagaattaaccatctaagacaactggcatctcaatgccgggtgcaatgaagggtaggtagtctaatgtcactgaaggacctagaagcacctccatccaggtatacccagtgatgctctgtgccttcttccccagaggaagcacctccatccagatgcaccccagcaatgacctttgcctatgtccccggaggaaggcttcctagggctttgggccaagcgatagtggaagcatttttaaacaatccgaagcgggaagggaagattcctccctctagaggaggagtcctggctactggaaaaagagaatacagtagaaagggagggtgatgatcctgggtggctcgtgggcacctcatggtgataagccagtgcaaactatccccaggtttgagagaatcctcgccaggattctccgtttctggtatccccataggtgttagcagggctgttcgcttttcctggttccttttccttgctctaaataattgacagacttcctctgtcaattatttcacagtaaccaaggccatgtaaaaagagtgtttaggaagccttgctgggccactgatcagccagaggaggagacagtttgtggggaattcagcagcttaactagcagatgactctgcagcgtctatgctgtaactctcctctgcttccctctgagttaagatagaaactgttcatggctttaattgtgtcttctggtgtatgagtcactctgagcttagacagtcatcagcattcatgatttgcagctgattttctaaggaaacggcagaaaaaaatgtttccttgagacacggagcccttccatctctgtgttcgctttcctctagcagagctatggctttgtctcttttctcattaaatatttgttaagagcttggtgtgttaccaagtaagttcaaagcagttaccagccctggcgtggtaaagctctcatgcaaaaggccatgctgatacaaaagacaaatagagacaaaacaagcagtaaagacagcttggctaacagcaggacacaccgagacactgagcagagaattttattctagtggcagcaaccaacctcataaataacaacttgaaagtaatgtaatctcgatggatgatttttagagggttgctttgtcttatttttgcctagatttgtaggcaggaaaggccaagtcaggctggcttggcatgctgaaggaggaagggaggatggagccggcttcgttaggtaaaaagaaggaagaaagttggaagaagtggggtgaagggtagaatttcattgcctttccactaagcaggatatgccatttaatctctagggaaaggtggccaagactggcttttttttttttttttacctctctgacattgtgggtttcaaaacaaaacagaaagattaggagaatctattaatgtcagggttaaaaaaaaaaaaaaaaggcagggggtgggaaggattgccagtgacctaattgtcctggaaagggccagtaaaatgaaatgaaacacagtggacaccaccaccccacacccccagccctggcgccctgcgtccaaattcagtgttgctgtgaacaggctctatgagctggagcctgccactgaatattcctggactgtgatgcttatggttttaaacggctgttggatgcacagctacacatcttccttgaatggggaaggccacatggtggcaagaagggagtgagaatttggagcaccagcctgcaaaattacacatcctgcctcccctgctacaggctgcgtcacctttggcgagccacagaaactctctgagtccaaataacagggccaattacaatggttgcttcataatgcagaatgagatactccgtctgaaagtgctttagaaattccttaaagcacatcaaatttaggattgaaattggaatttgtgtccaggggaggaggaagagtcagggggaccggtggtggcgagggtgtcttgatctttcttcccattggttcatcacttggacaggtaacttcaacacactcagctacatttgaagtaaaggggatggaatagagttgaccaagattccaatagttttctaataaagggtttagaattttttattttcctcttgggaagttgtttacttccttttcaccacccccaccgcatcccacacttgatgagtgtttgccgctgtatttgtgtaacgctcaaaaaaggagagtgagctctatattgcctcttacaacactactgcgtgtagtggtgaaaatgatatctgtttctcgctggaataataataaacatttgtaacatacttcaggatgtgtaagtcacttcagatttgctactcgagaagggatttggcagtggccaggaggcctggcagaagttggtctgctcctatctggaagatgggatcagggcctggtaacaggtcaggaacagcggcagcaagggctgtgcgtgcaagagggttgggagctccgagttgctggagaaactgcagagcaagtcatgtgattactagaacctgtctgaaattaacgaccacggagaatgggagtcctcaactctactttcccgagaggaagcagatattccacccagccgagccttggggcaaaaaggcagtcaggtcttccatctgggttgggggcttgtgctttagcacctcctctgggtaagggtgcctcaattttgaatctgttcatgtgcttattgaccaaggtgtcaccaggtaggtctgaaaacctaacaagacaacctagtgggacagagcagtctttggcacatgagtcataaaaggagacctactagaggccggtgtttctgaatctccaccctgaaaggtatacgacctgctgattttgtgggctttcctgtgtatgccattctaatcccagacactagcagactgattcacttttctgccagcactggaaactgtctccaggtgtgtgactgctagctgacctgctaggtgaggcctgaatttgaatttccccctccttatgcataaagtactttttgcacattgtattttcaaactgtaaaacaaaacaatctttccttcttctattccttcttccttcttcttccctgctttgcctaggagctcccccgagggaggtcagctgtcattctgatggcctcaggatgatgctgtgggtgctgggccagcactttcattttgctgtcattgctgggctggggaaactccttctgcctgcagaccctcctgcccggcagcacagggaaggcaaggtggcctctcaggagcctcctctatggtaacctctctgtggggaatcctggccacatcaatgtgctatcatctgctttcattctatgtgttaaaattttatacaaagtgaacctagctctccagccctgcctggctgcctttctgactctctgagaagtgagagaagatggagggcggcagcttcctgatgtttgtcaacttgaccaggcaacaactgggtgtgggccacccccyaccccacaaatgaaaatacaagggaagtctgtggtgttctcgataagaaagctgttgatcccccaaagagagtgtcgctgtggcttttccaacccctgcatgaccttgagagaagcagtttgttctgctaactctgcagccggcttcctctatgcttctcctccctgcctgattaatgacagggctgctttttctcatttcaattcaatctaagcaggagttttcactctttgagttccaaacaggttttgactccttcacttgtcctgataggtagttactcagctccaagatgtcagaaagggagtgtccctgagtggcccctgtcctaacccttcatatcactgcctttgagcctgtcaaaatgtggagttgggcaggacctactggctacctctgctgggaggacacagcctcaaatttgggtcccctctttgaaggtccaaagagtcatccttatcagttcccagatggtgatcgccttcccagaagagggttcagtaaccggctgtaggtggacatgatcctaaaactgatcatctctcccttcagagtagctgaacaacagtggctttggcgagtcaagtcggatggaaaggaatttaaaagacccgtgacccatgatgaagggaatttaaagcctctcagacccgcctaggcctccttctgcctgtggctctaagattctaacccaaaggcaaagccctgcctcctggactgagcaagcggcccacgagtttatctgttgggacaaccttttyctctttttcctctgtcacctgcgggtaccttttacttctgaagtgtgtccacgctgcacagctgaaacaagcaaacactgcctgacttcacytggagtcacacaccctgacggctccacatcacgagatccctctgcttccaccagtgatgggctagcggggttgcttccagaaactgacgaaaagcaaccttccttcttttcttttctagttctaaggggtgtatctcctgggagacctcaggaagtgacagggaattgttataaataaagtttcggtgctgcaaaagaaatagcactcgaatatamaattttctttttaattctcagcaaggcaagttacttctatagaagggtgcacccttacagatggagcaatggtgagtgcacacttggacaagagaggggaaggggttcttatccctgaagcccatggcccctgctgctgtgtccttcccctattggctagggttagactgcacaggttaaactaattctgattggctaatttaaagagagtgacggggtgagtggtttggcgggaaaaatggttatgacaggggacggaatcagaatgagtcagggtagagtaggtaattggaatgagtcagggtggagcaggtcatcggaaggagtcagggtggagcaggtaatccgaatgagtctgggtagagcaggtaataatccgaatgagtcagggtgaagcaggtaatcggaatgagtcagggtggagcaggtagttggaaggagtcagggtgaagcacgtaattggaatgagtcagggtggagcaggyaatcgaaacaggttgctttacgaggaagttaagattaaaagtagaaggcaaagaattgaacatactgacatattgattctttgaaaagaaatttagaactcatatctaacagaatctataactggaccaatgaaatgagtaagctatgttgaatcaagcaacaaagatgttacttttacatctaagtcattttctgatttattcaagaagtattcagcacctaatatgtgtcaggcattgcgtttggtacttgggaaatagtgggaagcaaaggcagctactgtcctgccctcagagagcttgcagtctggttttctttcttttttttttttttttttttgagaaggagtcttgctctgtcacccaggctggagtgcagtggccaatctcggttcactgcagcctctgcctcccaggctcagatgattctcctgcctcagcctcccgagtagctgggattacagacaggtgccaccgtgcccagctaatttttrtatttttagtagatggggtttcaccatgttgcccaggctggtcttgaactcctgacctcaagtgatcctcccacctcgacctcccaaagtgctgggattacaggagtgagccaccacatctggctgcagtctggttttctaaagatcttatcataatctcttacaaaacggttctacttgccacatgttatactaatcagcattaacaggacagaaccatccatccatcccatgtttgggcacaaatggaccttgttctgttttctcctctcttagtaaagctttatgtataggacaacaaacaaacaaacaagcaacaacaaaagaccatatcaggttagcaagtcagcatgccaaatggaatgtagcagaagcaatccagaaattgctttaatttagatctcacttaaaattctttatcaagttaaagaatttaagtatctgaatttacatgatactggaatgatagacgggagaaaaataaaagaatcacgatccgtgcaggctaagaggaacaacacttcctgattctgcctttttattctatgaacttttagccagctagtatttactgagcacttactgttccaggaactgttttgagtagttaggcacagagagtttaagtgacttgcccagggtcacacaggaagtgatggagcagagattggggccaggaggtctttgagtggagagcctttcactttggcacaacccagccctgccctgcatttgaggagccaagctctggaggtgaggccatgtgtccaactggtcagtgtagtaagtgatgtgttctcaaacctgtggcctctgaggtgccactccacggggctatggaataaaaagagaagcatactcattaatggacagctattttcagctgcagtcattacactcgctacatttgtcacgtgttgattatgtattaagcattgtgctaaacctttcctagccattacctcatttaataacaccrctatgtgaacaggcaattcacctgttaaatgaggcgagaggttggatgacttgcctaaggccgaacagagaggaggagagctgagattccaaaatccccttttccaccacactttgaaataagcaaatgtcaaatgctatgcaagtttttattttaacacccaaggatgatgttaagcaaacatctgctaggatcaaacctgtgcatgctaattcgctgcagaatgcctgtcgccgcccagcaggcattctttaacaaacgtgcacccaagctcagtccagggggccaggcactggggtcagcacctggagaacagagatgagaggggtgcagctgctgtccttggtagggacccagtctagtggagaaggctcatagacccagcatggtagagcagtgagttgatgattagactggaggtacacagggagtgcagggaaggggacagcccagccatcctgtgcagggcgcagcgacgtccccgtgaagcagcatcacaagccaggtgctgaggaatgaggggaattgtgagatgttggcaagaggagaggtggttcagtaggtggcaggagcatatgctggcatcaccaagtggctaaatgggtttattcaggcagccaggcacccgaaggagatggacctatcaaatgtcatcatggccttgctgtgtcgtgaggccaccgtgcaaatgaatgaggccagaggaagcatccacagacacctgcaggagagcaggcaggcatacagtagcgcctagcagcaacttgcagccattgaccctctcactagatgggctccaagtatccatccctcagaaatttcaataattgtgaccatcggtttacttcaagatttatttttgtcttgacctgaaccattgttcaaaatgtgccttgagaaactgttaattggaatttgaaaaaaaaaaaaatctgttcatgcgtaatcttttatagaaagatgcccagctgggtcattatttccttgaaccacgttataccctaaatattattaagtaaaaatagcacaatacaaaactcttggtacattctaataccaattttataaatatagactggaagtaaagttgtcaaagtgctatttttaggaattagagatgattttagaaaattgtcttattatctggatgtcttatattttacacaatgatcatgtatgttataaactggaaaaaatacaaaataaaacccaaacaccaaaaaaggacaaaataaggaacascttatggaatgagtagaaaaggaaaatataaagtgagcccattgtgaaatcaaatgtgctgaaattcatcagcaccttttattgattgatggatggattgactgcatcttccaggctgggtgtggcagaggccctgagaccaggggtgacaaggaaggtgtttcaggctgtgccttacaggacctgagcagagcatagtcaaccctcatcccaaatattgcagtcattcgtggaaaggaactgagaggaaagagctggacgcttggtgtcacacctgaattatgtccttccaagatgttgaaagcccagtgcttgtgaatgtgaacttgtttggaaatagagtcttcatagatgatcaagttaagatgaggccattagggtatgccctaatcccacaagactgcgtctttataaaatgtggacacagagaaagacatgcagagaggaagacgatgtgaagatacgaggacaatatcccctgcaagccaaggaacacctggctcccagccgctgggagagagctgtgacacagatcctccctcacatgctcagaaggaaccaaccctgctaacaccccgatctgaggttcctggaatccagaactcagacaatcaatttctgttacttcagttccccagtctgtggtcctttggcagccccaggaaatgaatccagtctgcgttctaagtcttttcttctactgtggtggtgaagtccaaagtgaagtccagtttcgtgataaatgacacattaatatggtatctatttctctctcctctccctttttctcctttctatctctcccacccctacctttattttattgataagataggaaatgagagattatacrataaaataccttgcttttatccatggacgaggccaagaaatcctttttcccacctcttaaatccaggaactcaaaggagtaaagtgcggctggctggtgacattggacgtggaggaaggtgacaaactgtatataaactgtgtaggaacctcatctggggccagttgccccactcagatctagccagtggttgccatgctggaaacccagccccgaggggtggattttctgctgaccggagggaaagcctcacacgtttccttcaccatgtgttccttgctcaccatgttcatccagcgtttgtgtcatctgtttaaatatgctgtctggggccgggtgcggtggctcatgcctgtaatccagcactttgggaggctgaggcgggtagatcacctgaggtcaggagttcaagaccagcctgaccaacatggtaaaccccgtctctactaaaaataaaaaaaattagccaggtgtggtggcacgcgcctgtaatcccagctactcgggagactgaggcaggagaattgcttgaacccgggaggcagaagttgcagtgagccgagattgcaccactgcactccagcctgggtgacagagtgagactctgtctcaaaaataaaaataaaataaaatatatctacgctgtccgagtcttcagaatggytttgcacaaccaatggggcagtctgcgtaggaaagatagaatgaaactgtccttcaaacatagagaaaggcagaagggcaataggagagggacacccgtcacaaatcaggtgggggcattgcctacccattttgcaatattcggttctgtcttactggcagcrtctttgtttggccaaaaagagggcaacaagtctttggttcctctacttgctctgcttgaggaactataaaatgaagtcatctcaccaaggccatccgttctgttgttccatatacttctagggtttttaatctgaagtatcgaggaagctgtctatctgcctctccagctcatttcagatgtaatgttttctcttcatagttactgttacactctggcccaattcctagtgaaatgattttatttagaattgggcttttacttggctaaacttttccatatgatgcttattccaaaatgaacccttcatgccaacacatttttgtttatttaggagaaagaaggaggtattaggaatgaggtctgatgatgacattagtgtgttattagctcaggtcatctggtgatagcgcaggctgtgtggctgacatacctggtgattggaagcacattaaatatccaaatgaatcagtctcatgaagctgattcaatggagagtgataagcaaggacactggagttctaagttttttaacaggaataatgtaactgtgatagcaagccttgtgtattttgagtaataatccatttattttttaaatgtatctatctgcctgcctgtctgtgctgtctgtctgtctgtctgtctgtctgcctgcctgcctgcctgcctgccgcctgcctgcctgcctgcctgcctgcctgcctgcctatctatctatctatctatctatctatctatctatctatctatctatctatctatctatctctgtctatcttttttactgtgaatctgtgtccctggtacaagaaatgaccttacgttttaaatagggaatttagtcactctaaatttcaaacaggtggccctaaagaatcagcaagtttaggaatacacatgtgatactgaattgtatgaatggatgcttggcttaagtcaagttgtcttagctattcatatggtttataaataaattaattcgcaaagtgcccatttgtttttggaagcattaaatttcacttctgacttaagttacggcttttaaattaggttgtgagtttgactttggtgtcttgtaaggttataaggcgatcgtgtgtggtcttcatggtgcagtggatatttccaggaggtaaacaagacaagccattggggtatagaaaaaacaaacctgagagcttctatttatgttccttttatctcatctcgtatcatgccatcatattctatcatatcataaatgtctggataggacattttatatattttttaaattatataaaatacaaattttacatatataaaagttgtatatgctaatggtgcatatttaattttttttttaaggaatcaaaaacattgaaagaccactgccttagctatgggttttggtttcaccatactggagatagaatttatatagcacacttaaagtaagggggaaatagttttatgaaaacaagctctaaagcaaggaaatcctaatggcaaaaaatatttttgtatttttctctatttcagtttatcttgggcccagatgggatctgaggcattgtcaaacattttgagaactcccttctctggtcctattctggttctcctgaaaggagggaaaatattagattaaaagtattctccaattccacagtctgttttgaaggaaaaatcctagaaacgctttggtagatacagtgttttatcatactgtttggtagatacagtgttttatcatactgtttggtagatacagtgttttatcatactgtttggtagatacagtgttttatcatactgtttggtagataacagtgttttttcacctctgccacctcagagtatatggttacatgatatggaaagtgttgaggacagcagttattttctagcatccttatggctccctttatagcttccaagtggctgtttttgagtagatttgatgtggatacactgtgctagggccgtggagcggaggatcctgccccggtgttatggtaacacgcacttggagcctggagtcttggcttctgaacagtggcctaaccaccttggtgacacagtcaacttacctgggtttggttttttaattgtaagatgagggaaataaattgtaaggtgctagacaaacgtaaagtaaaggtattcttgctgtgatttccccacttagtcagaccatcatgccagcagagggagtcgtgcatgttttaaaagggagctctggtaatttggtaatctcttcccaacttcttcttcattgatttcatatagatagcttggcactgacatttgtgggaatatttgcaccatagaaatcggcagaactataaatcagggctttttttcctcccacctactgcctcccctgccacacaagagctggttgttaaccattttccagcacagcaccattggcaccgtcactgtggacgggggtagagagctacagtcatcttgtgcaggttgtatgtccaccccagggcatgtggttctcttgccagaagaacaaggcaccaactcatcagacacagacaccagccatcacagggcattcccrgtgaatgcatacgtgttcaattggtctttgcaggcatcacatagaacatgctctacgctacaaggtgagttgggagatgaggaagagaccttgtccttcaacccagtcacagtctagtgatggtgagttctgcatgttatccaaacaagaacaaacccagagctggtgtgtgcagggccccgcgggagcagaggcaccagctgtgctgcctgtgagtcctgtcccagggcagtggcctgggcaggcggggtcaggggaggaggtttctggctggactccctgatccaattccagggctttgaggatttctgaatatgccatgcctctcccagccagtcctttcaccagggtaattatgatgttcataaatgagattgttcatgtacaatttctacaccagtagccaatttctttaaatggaaaggaacagattatatatacctatgtctccaactagagctgaacatgattagtgagagaaaatgcaggcataacgccaatgccttcatactggattaccatgcacctgatggactcccccagggacacacagggagaagcatgtcttttgggcttggatatcgcctgcaacgttgtgacaggctgttaacacaggtctccaccacagcctctcccaatgcgtcctccatctgacacaccataaggctttttaaagcacgctcaaacagtgagatgccctttcattcaacttggtagacatctattgagcaccttctgttaccatgtaccaggcattgatgggagcccagttctgacccaaggctaggttttccagctcagcatgtccctggctcccaagcggatgaccgagttctccggtgttcccctgtcctttcgcgtccccacgcctgtgctcactccgcccctcccctggcttgccttctccactgtctgctcatctttcattgctgaaacgcggagtcaggccctaatgataaaacacctaaacggaaattgacaaggacaggaaagcctgaaggtgaagaacacgtgtaacatgagaaccgcatcagcaggtgagcaaaggtgaatcagagccacgtgtgaggggaaagtcaaattaagacagaagcagggattactgggtgataggtttggctgtgtccccaccgaaatctcaacttgaattgtatctcccagaattcccacgtattgtgggagggacctaagaggaggtagttgaatcatgagggccagtttttctcgtgctagtctcgtgatagtaagtctcacgagatctgatgggtttatcaggggtctccgcttttgcttctttctcattttctcttgctgtcgctgcttaagaagagcctttcgcctcccaccatgattgtgagaactcctcagccatgtggaactgtaagtccaattaaaccttttaaaccttttttggtttcgtttcgggcatgtcttcagcagcagtgtgaaaacggacactggggaaaatcatctgaattaagagagtgctggggtggggcctggggcgtcggggctgatgctgccccagcattttggtttccacagtggagcccagggaggaagttgggaaagaatgaggaaagaacgattgcccggaagcgtttcactgtcctgaggagagtgagcctgaagattgtagaaggcagttgcagaggttgtctgtcatcctggacaagagacgcacttgttgcagacgtttgcttgaggacagaagagactggggctgctgttgcctattctgtttcatggctttactctgagagccctgaaagcattgaccctttgcttcagtcatccattgagttattcccacccaaccccaacgtgggttcagaaccctttcagagacatctccaacttgtatttgtgtctaagagtgttagtctcctttgtcagactatgaagaagccttgtcaaggcaggagggaaaagtgctcttggcagcctcacaaatctggctttagctgaaaggtattttttgtttgttttctttaatcctcgtcaactggacatggtgcggttaagagaggcaagtatgtgtgagcctggacagctttccagctctaggggcagaggaggtttgatagcccttcatggcagggtgcatgygaagagttttgcttgccggcrtagataaacttgactatgtctgctctactcaatttgatgtatagtttgaaaggtaatgctgtattaygaataaaataatgggtatatctacctaaaaaggagaaattacaatgggttggtggctggtaggacttttagagtttgagctatcaacaggaaacttggatcttgtgtttttgtgttttctttttttttttttttatggtaagggaggttattctactgtgtggttcaagcagatatacccctcagccactgcaaggatatcagtgtttcaagcatgtgctaggcttcagaatataaagactagaatgttttaggttcaaaaagagcttgttatacatttaaaatatgggttttgcctgtaatgtgtgccagagagacagacctgagaaccacactcatgctgaaggaccaggatatctgaacctgattaccgagcatgagatcagggtgagtcactgtcagtctgtgtttgctgggtatatgcgtatgttttgtaaatccaagagtatgggaaatggcagagaaggaatgagccatggcctcaaaaaccttgagattcagcacaaatatgtccgctgggatgtgtaaacattttcaacccacagatacggggaagcttaattctacagaaacatttgctaactaggcaacagattacaacacatgcagtgtatgagttatggaagagtaggatcataagttaaatagggtcattaatgtagcttgccaaattgtgaagactcttgtaatagtattaaaattgtactcaagcctatagaaatgtgaagcatctagacagtctctatggggtatttaaataagtatttaaaatgtcacrtaaaaaacatagcttgtagtcctaccaaagaaaaaattgttagtatgaagctggatatggtctgattttttgaaactgcagatgggcctgttgcctttgtctcagtcttatctaaggcaggccagcagaacaggtttggaggtcaacgtagatagttttgaaatatagtcacgtgccccataatgacttttcaggcagtagaccacatttacaacggtgtctgctaagattgtaatacagtatttttgctgtgccttttctatgtttattttattatttatttatttatttattttgagacggagtcttcctctgtcacccaggctagagtgcagtggcacgatctcggctcactgcaacctttgcctcctgggttcaagtgattctcctgcctcagcctcccgagtagctgggactacaggtgtgtgccaccatgcccagctaatttttttgtatcttttagtagagacggggtttcaccatgttggctaggctggtctcgaactcctgacttcaattgatccgcctgccttgacctcccaaagggctgggattacaggcatgagccaccgtgcccagccctatgtttagatacacaaatagttaccattgtgttacagtgacctacagtattcagtacagtcacatgctgtacaggtgagcagcctaggagcaacaggcttctgaaacccccaaaatttgagacaggcctcagtaaatttagaaagtttattttgtcaaggttgaggatgtgtgcctgtgacacagcctcaggaggtcctgacaacatctgcccaggtggtcaaagcacagcttggttttatacattttagagagacacgagacatcaatcaacagatgtaacatgaacattggtttggtctggaaaggcaggacaactcgaaggagaggggcttccaggtcacaggtaggtgagagacaaatggtagcattcttttgagtttctgatgagcctctccaaaggaggcagtaagatatgcatttatctcagtgagcagagggatgcctttgaatagaatgggtggcacgtttgccctaaacagttcccagcttgaattttccctttaagtgattttgggggcctaagatattttcctttcacattccccaacacccccacccccactttaaaaaatttttttggagaaagcattttagaagaagatgagtctctgttcccaggttttgtctgatctctcatgactaggatggcttattcctagacaggtaggatctaagttattaggaaaactcatttttataaggttattctatgaagagaaaatagaggaaggaagacaaacaacaacaagcaaaagaacaatcctggaaaaatcaatataggccacattactctgaagcccatacatcagtaggcaggtatgaaagtggcttatgtatgtaaatagattgttgtcattttcttttgaagtttaagttgtctggcttcagttcacagggctttacaaaagcacagcttagttttcagtgactccaaattaggaaaaattgggaaaaaaaggaaggaacaaaaaattgaaaacattattttgaagacttgtagcccagaaaacttagaattcagtccaaactgtagaaaataataaaaattgaaaaatgtaagataaaactagaatctaacaacaggtgtactatagttttgaagcataattattctctcttcagtttcccatttttactaaagacaaatcatggtaggactggtttgctttattatacttggcctaattatttgtatacagtgcagcaagaataattatttttacaaaggcttttaaattggctttgatggaactgtgttccataggaggaatctcagataagacttttttaaagccgagcccagccatggatttgtgccatcaaatacctatgagttgggtgatcagctcctcttgaggttccaagataaacttgaggctcctggacctgccagaaagtgacattgtttacctaccacaggtcaggaaccctgtgcaggggctgtgtagacaaaggtatgaggccagttttttccaaggggtttttattggcttcataagtcaagtttgattccttaarggaaagcacaccattacagtcaaagtcttggtaaaataaacagtttctctgattgtggcctgttacagtgaaaattgattcttactgcactyatgcaaataactgtattgttataagttagttatcagaaacctgcattkaagaacacctgttagagttctatagctgattataaaaccaccttctaaggaggaccaaaacaagacaattgtccatggrtgacaaaatgtattagggtagccrtagtgaaagacacaattgacaaggaaatttgttaccttgtggcacactaacaatttaacataaaaattataattatcactgaaaatgtacattaagtcatattagaattacaggagtttaccctgattttggaacacataccaataacatatttatacaaatacaacctaaaggaaaccaaacaccatttcgtatttgacaatgtttcctgtataatttttataccagataagccaaattatgtcacttttggactttagggaatctaatgtcttaaaggattaattaggtaagaaaaagacataatttataatttgattttggcaagtttgtcaaatawcaaaggtttaatactattgatatcataaaatagggtcattcatttaactaaagtgataactcaaggatttcaaaaaaggcaaacatcttcattctttgagagaggagacttaatgttccaaacaataagccctaataaaaatagcacaaagtcatttaaatttgtttttcaaaattttgtaaacaatctataaaattttaatcttgaccataagatacagcttccataagccttttataacctttataacatttactgaggagtcagttaatgcttcaagaaaactttgttaatttgacacaggggcccatatgctagtcttgcatcagtgtgcccttcaacattaatgattaatttatagagaaactgaacttattttatctttcaaaatcgacctttacaatctcatgcacccacctcttccacaatactctctgggccttgagttgaaatggctttaatttctggccctgtgtctcaggaatgtagtttattttgattggcatcttctacaggacctgaagatggggctttaattgctgtcagtgtttaaaatttastaggatttggtgtcatttttagacccaggactcaaaatcctgtaactcagtgtcacaagtactttaaaagtgcatgcagagagatatacagatgaaataaccttaattaaaaaaattaatttcagttttttcctaagtaaaccaaacttaataataatatgacaacttgatcatataaacgtttttttwaaaaatctctttttatgacttacacagactgttcatgacawgcttggactttctagtttgtcctgaacgtccctctttcttaaataaccagtcattttactctaggactaaatttaccatacaagatttttttctcatatgaaattatttctctttaagctttcttgccaaagaaacctctgtatttttataactttctttacatctcttttatttcctcattccttttaccttgttttatacatgacttttaaataagctttgaattagacaaaaattgttcatcttcttttttaaaaggacacactttgtttttggagagaatgttttctattggcaaatacccaaataatgaaatatctattatttaatttaatataactttagattctaaattatgatgagtttgtctacaagtatttatcctataacatttacctaagtattttatttgtttagctagattatttatggaaactgtgatagtcaccatttaaagttatggtaccactgttggaaaattataactgagaccgtgaaaaagatttgacgtaactgactccatcttgctttttacctccaagctgtccttgctcattcctgggcataggccaaattaacttttggaggaacttagtttatagtttagttttgaaacaaagatgataacaaattttactgcctgtgggctagactgcctaaagccacaagattagaagttacagtaatcttactaaatttgagatgtagctatttttatttaaccaatattaatgtcttatttgttaaagagtacacaagaaaagatcattctgatttgggctgggtttatagttttgtaacccctatgccaaatttttgacaccttatagtatttggcagggataagtatgaaattgcttgattaataaatgcaaacaaaaatatatgctggcaatttttaagacatttctaatactactttaccaataattttaaagctagcttatttattaaatatattagttaagttacataaacttgaaaaagcatttgactagtctcttcctttttcctgataaagtatttgattcaagtgctttagttttcttaaactaattaattggaactctttatatattttcagtagtgaaacattgtgtacacaacacataaatacatagacatattaggcatgccgataraagtacatcttatagattcataaaaaccttttttgttttatcctgtctcagactttcagattcttgataatctgtttcacaatcctaggcagctgtcagctaaatagccttaaatttgcatattaaaggaaacaactaaggtgtaaatcaaatagcaaaatttacattataaagtacagagagaaaaagtctggtggtactagagggaaattaaagatggatgccaaatcaaatgtaaaatcatagaaatctatcataggattgtataaggagaccaggtttatttagatagggacttcctatcttttaactggatctctgarctctgggcaaaacctacactgaatcctgggtcttcaaaaagggagaattattatgaggttagacgcttttacagtgcacttaaaaaaattttttttaaacagagaygttcctaagtgtctaaaccatactcttccttaaaaatccaagaataacctctgttgcaactattttagtcaaaacaaaacaaaacraaacgaaacaaaggggtcttggctatctatgtctctgtggtgtgaacataccagtgccctgtttcacctcctgatatttctgttcttcatcacatcctgcctggtctctgaccaatcatctatttatgccttgattgacttaattcatttattcaacaaacgtcggttgaacacctgcttaaggtacatactgttccgaaagctggacagacaaatgaggacccattccgtgctcttttggggcttatatctccatgggaaaatcgaaggctttgcctgtctgaccctcgaggagcctgttcgggtctgacatggagtcttgctatgaacatgctatgaacatgctcaattcaggtctctcctggtctgtgctttcagagtccccctgttctactggtcccaactcctcattatgcccaaggctgtggaacagagtatcaggatcagcaacaaagggaacagaaaagttcccttctctttctggctttgttagaacaatcaacrtattttacagctaaatttgcaaaaaattttctagcagcttggcaaggctttcctcatagaggagtggtaatgaagcccwtttatccagctccatggctcatacagtgtcacagctgttggtgaaattgataggtgcccatggattaattcaagcccagtagagaagaaagcagccatcacctccaagcaagcctttgggattcctcattgtggctttctgctcagctcttctccagagggtgctggagtgggggaactcatgtcactcatcaaagttccacttcgatgaggaatgcctcattctagcaccaaagtgatgtctgcccacttatcaccaggtttcaagctgatttatgggcaacccaacttctttcatttggtttacacttttttttccttgaaagtcagcctttcctgttcgatgtgcgttttcttccccagtaattaacacaaggtcatgattgccgttttagggactctttctggtgtgggtttgcttgtgttccccaatggtagttctgattacattgtttcacctgattattaatgatttttttcctgttaggcagctgtgcatttcatcctggccttcggcttgaattgttacaaattatgaattgatagacttcaaatcaaattttattgtgccttatgtaaatacttgggaaataattttttatttaaataaatcagcaccaaatagttttcttttgaacacatagacttcttttgcatttcttttttctgaattgtttttctgttgctgtgaatcttgaagatctaagtgatgaatgatagttacctttttttaaccaagttgttcattgcaagtatttttttgctatcgttgttttaagtgaattcaaatttgacctaaggagacagtggttatcatatgcgttattgggttttgtcttaaactttgtgaacattatggaaaaaaaaaaatgcttaaacctgcagatgttgggggtgggtgtgtgtgcgtgcatttgtatacataagtgtgtacatgagtttaattgagctgttaagaacaagaagccttcaaggtgggaacaaaagggagatcttgccaaagccagaaagatgataaatgtacaagagcacattgttagggaagttccacagagggcrcatctggagagagtctctgaatactgagtagcttacttttagtaacagtgcttgtcttggtagctaacgttcatataaaaaaggagactgaaatgtaaaatatatacttgattttcagaaaatctgtttttctgacagttcagtttttttcttattagaattggaactcagcctagccttgttttgaacaagactaacaggattgtgaggtggaggaaatattaataatgaagcctaggaaagggttattaccatctctctcagctctcattgttctacctctcataagaatatccaagataaaggtcttcaaggcatgccttgaatgatctgcatccgtcttgctaagccttgggctcctactcaagcttcaggctgttttccactcctggctggggccacactcctgtccccacccactcaacctgctgctcagaatccctctctcccctgcaactcctcctcctaggacttctctttccctaacactgggtcactgaatcttgctctcagtgaattcatgttccttgccccatatccaacctccactccatccccatttcccctctactattctacctttccttctattatcaaaggaatatcgctttctaacatactaattcatttactttttatggcggtggtttactgtcatctctctccgcctccgcaggtccccattcactggaagtggagctygttggagggatctctgtctagggctccagctatagagagcagtgctttgtaccttgcaggcactgataaatattttttgaaagcataaattccttgcactacacttgttttatcttcttactaaatgtgttcacccagctttatagcatcttcacagcatggcccagcgtgctgcatggtaattggtacccaaaaaagcctggagactgatcacgtaacccaggagttttgttttctcacggatcctgtctttgtgttaggcagggcactggtactcactggagagaagagggatacaaaaagagcatttaggagcgagaggagctcttatatcttcaatgactgatttcattactacttttaagcagttaaagacatttagcaattttacttccagaggatttctggaatcactaattgattgtccacacttctttgcaaaagagagataacactgtctacaaagatttggtagaaacataagactcttaaattcttatctgcattggaaaaagtccctagccagtagctttatactttcaaggaaaccaggaagtccatggaatattccattagataactgaaaggactatttttcagcctattttctctgttgtccagatgagctgatttctactgttctgcctttgagttcactggttctttcctctgcctccttcactcttctgctgagctcatccattgagtgtcttattttgaccaattacttttccacttggttctttttttgaaaacctttttttgtttgtgaagactttttttttatttgtttcaagtttgtttataattgcttattgaaagagttttatgatggccatttaaaaattcttcttaaatatcttccatgtctgtgtcatcccagggttggcatgtgtcaaattgtctttttctctttcaagttgtgattttcctggtccttggcatgtcaagtgatttttcaattgtatcttggacatttggagaattatgttattagacggtaggtcttacttaaacttgttttaacagattttctctgatactgtgtcactgggtcaagggatgccaccttattattgccaggtaagggtagaagtccaggttccccactctgcccccagtgacacctggatgggagaagggtgtctcattactgctgtgcaaaggtgggagttcagatttcccaccaggtctccaggatggtgtgctggctgggaggggagggagtgctttattgtgttgaggaaaagggtggtctcattatcactggagaatgatggaggttccagctccccacttagccttctatgacatcggtcacccagcaggtagaggatgtgaaattacagccccccaccccaacctttgctgatggggggttggggtagggccacagtttttccatgagttcggttggtgtagggcagttactgtctagaggttttcggtcttgctaggctgccacttccctgatcctttagctggagggagcaggcttttcttggggctttttttgtctacatcgcacgggcttgaaaaaacatacgagtacaaagagttcaccaccatgtcgttcctcagatcccgaggtgtgccctagctggtctgccttcttctctccacctttcagagtctcttacgtttattttatatgtagtgtccagggtttttagccatgcttgatggaataggaagaagtgtgcctactctatcttatcccagaactggaaatctagaagaactattttaatttcctgttttaaaagaaacaactctgaaaagaagatcaaaaaagaataaaaggttttatgttggcatgtttgttgttattattattattattattattattgtaatttcaacctttctgtggcttttttcttctgatctgtttcaacttggtgttttgatattttgtgatcttccagtgggaagttgtatactgcttttccccctgaaagtgcgattgcttcttgctttaaaactaggtatttatctagttgatgttccatggtaattggtgacatcctgagtagaaaccaagtaagtggattttaagtttccccatgagatgtgctgtaaatgtgcctctgctctctctggctggggagagctgctctttcaggcttttgacctttcagtgtccctcttggtcattcttgatagtgcctgagttatcgttcagcatcagtgcaggaaaggaacactctaacctcccccacaggacatagaggagaaaggagccttaagaatgccctgtgtcctctttgggttggttctcaccatttggctccactgcttgagtttctttgaccatgcctggagagtggcttggcacaaggccctctggtcagtgggatgtgcatgcccactctctgtggtggggcagccaggagggagatcaggtggacgagaggyggaagatacacattttaggatcagtcgtgccagagaatcatgatgtgttttgactctgagcaaaacggcgttgctgtgcttcccaaacgtcccttccagcacagagtgcctgcagatcgacactcagactcctttgcccagtccccagtggtgaggctgaggctggcttccttcctggtttctgtccagtgtcttttcatcaacagcgtcatgtcgttgttcatasccggtttattgtaaaaaactgctgatcattctaatttggaggtgactcttttttcttaaccacaattgaaattcttcttatagctgactctrtaatcattacaaagtagcacaatggagaaaagggaataacttcactgaaaatatgtgtttcactctggggaaaaagctcctgcctctttgatcagccccaccgtggtctgtatcctctctgcttggcactgtagcactcatattctgtgaatttagggaacatttttttttaacagctgctgatgacaaacaaccatacatcaattttgattgacattttgtttgccttttgagatttaattaacatttgtaaaatttgggagagttaaacttcatcatgagataataagaatccagtgctgtttctagataattgtcttcagctgaaggataaatatagctggaaagggagaattttggagggggtactaaatagtaactgaagtatttacctttaaggttggaactggtgataaaattggttatgtaagtattaaattggagacatgcatcgctattaaatccaataaaacaataaggcactggttcagtttgaaagaaattttgagaatgcagtgattgaaaatgtattcgggccaacttagagatcatctcctcaaatttcagacatatttaacatatacactacctttatatagaaagatagacaaaattattaataaacacacaaatcccttttatgtacacttactaatgagaagtttaaatgcattcatcttctctaaatgcaactgagaaaaatttaagtttttttaagcacacattcctgagtatgtgtttagtcttgagaaggtaaagtcaactcaagagtctgaaattgtttttaaacatttaacaacctagaatcaacattaatcatgagtggctttggcttcaaggtcacaactatttttatgattattactactgtttatttatgttaatggtatgcaagtctgtgtagcatcataaagagtccctgattgaatgctttcaatgtgaatttagagggtcaaatgaagggcagggggaaactaaaaccaaccaaccaacaaaaactctacaaggggtggagaaatggcatataatactgacctggacaggtagatggtgatagctcaacaagaggacttcaaaccagtggggtctcataaattccagacaaagaaaactctcccagccaggcgctgtggctcacacctgtaatcccagcaccagccgggcgctgtggctcatgcctgtaatcccagcactttgggaggttgaggtgggcggattacttgaggtcaggagttggagaccagcctggtcaacacggtgaaacccccgtctctactaaaaatacaaaaatacaaaaattagctgggcttggtggcaggygcctgtaatcccagcttcttggggggccggggcaggagaatcgcttgaacccaggaggtggaggttgcagtgacctgagatcacgccattgcactccaacctgaaaaacaagagtgaaactctgtctcaaaaaaaaaaaaaaaaaaraaaaagaaagaaaaagaacactctcccacaaaattccaagcacttttattgattcattattcatttaacgaacacttgttgagcatgggttacatactaagcattatgctgggtgctggctttatagcaatgagtaagacacagccstaggccctagaagacttacaatccgacaacctaatgggagagagagagactataacagacaatgataatgcaggatatattccagttactaaatgctgaggaacaaatgaccccatgaattayaggcttaaaataatcatttcattgtgcccatggattcgttgggtcaggattctgaacagagcccagtggtaacagctaggctgtgctccaggatgcctggttcccagtggggagactcgagagtagggggcagaaatcaagggctggtatctttactcacaagcctggaggttgatgttggctgttggctgggacctcaactggggctgtcaactggagtaacctatccatatagcccaggcttccccatggcagacagcttcaaggcagtagcatttcttagctggtagtttagggctccaaaagtcagtgtccccattcacggggcataaggttatgacctggccttgagagtcatgcattttttctgccacattatcctggttacaagcaagttagtagccctcttagatcaagaaaggggaaattccattttacctctcgatgggggaatgacttacattctagaagagcctgcgggatatacaatattattgtagccatctttggaaaatacagtctgttatagatggtaatttttaaatatgtctttgacagtcttccctgaaaaaagtgaaaccccatttccctaactcctgagtrcgggctagtaactctcttctcttcaactaagtgacataaatggtgctttgtaactttcaaggtgaggccatagcttctgcctggtttcctctctcttttcccctctgtcctctgtcatccagaggaagccaactaccatgacattcaagcatgaagacattcaggcatcactcagacgggcccatgagaagaggaattgagatctacagccaatagccagcaccaccttgccagcctcaggcaagccccagctgacatcttgactgcgacatccccagagaccccaagccagaaccactcagccatgtcagtcctgaattctccaccttcagaaactgtcggagataataagtgtttttgttattttgagccatcatattttggttatgagcaatagataaccagtacctacagcctgacatataggcatgcaggagtgtgtattgggtgtatatatgagagccaccttgtccaggttcccgggtcaggtagacttcctggaggaggaacacttatgataagtcttaaatggcttatagtggcctttagtaagcrtctttcttactggcatcctacttggcatatcaaagttcacacatctaatgtgaacattggcatatccaagaacactggaaatgggaaaagaattacgggtgaatggttgtcaaagtacagttaattgtctgtgaaatgggacttcctcttgcactggttagagaatgaagagagccaatgtatcttaagagctgagagcaggacctggccctagttgggccacagtaatttacctacccctatcttttgaagtcagcctcagcatcaccctggaattgctacaagtggggaatctcaggctcctctctccagatctaggaatctgcattgtaacaagttgcaatgatgcaaatgcacattagagtytgagaagccctgctgaagragacagaggctctgtattgcaggagagttcctgggacatcgcagatagagctcatggtggggaaatttggatgacagccttgaaaaccagaagtaactaattaaagaacagaaaaccatttctcctsgtttttacaaatgactttcttacttctaggttctatttttaacctcaagtgctctttgaataaaaataagactgaaaaaaaaggtaaattggttcctgtaatttccttttcttctggtactttaacctctctcttgggactgtagagctcattaatccagtcccagagaaaattgtcatttttcattaatggcttcttaaccttcaccttatctgattaggtacagaattaagtctctcttgaacagcctccaatccccactcccctgccagctcattttctccagaaaggacctggaggatcaatattgcagaggaacctgagttgatcaatgggacaagatttcctttgcaacaccgcacggctcatgatgacttcctcrgctgagctgtaatcgtggtggcaggctagagagcaagatgatgcatttgcaggaagctgtcgttctgcctgttrctctgatggaaaggatcacaggctggcccagctttgcagtgaccccaggctgaaatgtgttgttttagctccagccaaaatgcaaagtgtgattgggatctgccattctaaaatgaggcaatagagggtatctgtgtttatgagtttggatggatcagaaattgtggccaaatagaataaccttctcagagacaagagccatcctgcgggggcagtgtaacacatggacygtatggctycaggaacagatggagcctcatttgaattccaatatgtcacttgtttgtccccgattctttacaaagagcagaggagggacctatggtgtccctagtcaacatagtaaatatgattattgaagaaaagaagaggtgccaataattctttctagagtaatcctgagcaatcaaaaaatgagattacgctaccctgtggttatgcccaagcacacacactgtttttccccttgtccagaccaactatgattagatactgggtggaaatggaagaagccagagagtgcaggccttctcatagataattaggattgtactgtggttatttggagataaaatggcatgttatttaagataaaactctctgaattcagacagcgcactccatcatttactgtgyatcccttcctatagtacctggcacacaggccttaatgtgaaatattagttaacacttatcgaatgctttctacatgagtaatcaataggtaaatgttcactcattagcattattctgctgtgattttctcatagaagtgatgtacaatttgacattttttctcatggggaccgggctgaagggtgaacacagaatttctagtttttccttttgctgtctgtcctcatttcttccttcctctttctgtgcacattcgtcgcaatgcagagttaggcccttagaagccctcctcagtgcccttcctttccctctctccttccccttgttgccctggcagtgttaagggagtctgtgcctctgggagccttttaaggaacaagccgttgttctcagggggcaggaggcagagtccttacacagcattgatgtcaagctgctttagtctattctcacactgctatgaaragctacctgagactgggtaatttatgaaraaaaggggtttaatcaactcacggtacaggaggcatggctggggaggcctcaggaaacttgcactcatggcggaagacgtaggggaagcagacacatctttacgtggccggaggagagagtaaagggggaggtgctgcacgcttttaaataaccagatctcacgagaattcacttgctgtcacgagaacagcaagggggaaatccaccccatggtccagtcacctctcaccggcccctcccccaacattggggattacagttccacatgagatttggatggggacacggagccaaaccgtatcacatgcccagggccataaccccaggcagcttggcctgccactgtcatcaacaaggggctgttgtgggcagcagaatctgtcattcccttaagaaacaatgtgtgtgtgtgtatgaccacatctaccaaatgccttcccagacacacctagtatttgattagataactgggtctctgctctagtcagtagacttataaaactgaccatcacaccagccatgtggtttgagcccttgaagttggtctcattagcctgagctttgaacactgaaagaattgtaggaggggcgggcatgacaagatgtgttgagatggtgaacaaatgcctgctgacgacattcgcagtcctatagaaaagcttttttgtatgtttctgcaagtctgatgcacagtgttgcaatgtgctatttatgcagaaaagactgaggccaattaacgtgttttttttttttgtaattcctctataattaccaaactagaatccttttaaaacctgcattattaagcatttctgttatatccagatgttctttagaattagtatacgtaatctgtcccaaaggcttattgcatcatgaatttcaacaagcaaatcttagggcttcaaaaaaggaatcgatatcagcagtaattctgrcatatatttgaggagtttctggagtttaaaatatagaatcgtggatcatataaacaagatatttaccccttaataagctatgtaattttgtctttactcgaaacaacatatacgttccaggtcagtttccctrttaacattcatgcactccgtcagtgtaaaggaaaaaacagdctgcatatagtgttcccagcactctgcggagttccttctacatgtgagcttatttaaacctaataacaaccatgacagatgaggaaaccgaggcacagcaggttaaatagcatgtccaaagtctcacaagtagtagatggtggggccaggatgtaacccagcctgagcaattatgtgtctaaattctaccataaaggtagtgtttgccacctggtttatttttctcactgtcatggccgtaagacaggtttctcaacctcagctgtgttgacacttgggactggatcattctttgtcatggggctgttctgtgcattgtaggatgcttaacagcatctctggctcctacccttaatgaatagcatcccccttccaaaccgtgacaatgaaaaatgtctccagacattgccaaatgccccggaggagaggggattgtgaaatcactctcaactgagagccacttgccaaagcatgaaaaattacttgagattatatttacgtacaagcaagaagtataatttagagggttttattctatttaggaaagaatataaatatcttttgcatatccacttttaatattgagaataagaaacacaaaactcatcaataagcatattagttagtacaatagacatgtgttctttattatggaacagtaaagggaaatattttaaaatattaaacaaaagaagagtgggaagaatgaagtatgagagactgaagaagagttgggggaaacagaaatagaaaatgcatcgtatcaaaaagggaacttattaaaatagaaccaacaagttgccagcccgaattgtctgggtaaaccctacgtgtagcttttcattgctattgacagtgaggccaagaccacatttcaatcaatcagcagtgggtatttattgatgatgacatttcctctagagtccacgtaagtaattttatttccagaactccggcaggcacttaactctcctgggtgccctctgtgggtgacctccctggggctaggccagtggtctccttcccaggctctccttctagcctcccacccttccacctgtccagtccttctaggagctcctgcaagacaacggctctaggttaggaacagcagggaatgtaaagatgtctggcaaggaggcagagtggttcaggagaggaaaacatgagccccaggagtaatgcgtacatcagtcggtacattcctagagggctgaggcaggaggagagagagcctgttgggtgcattgggagcatttgggagtcggaagaggcagctatcactgtggaagatttcccagaggaggggccaactaggtttagatgttgaaaatatttaccatgaccacatggaataacatgttaagaaataaacataagcaggtgtacttactccatcaagaatcacttagagcagtatttcccaaactgttttatggaacgctagttctttaatgtccctagcagtgcaaggtcagggcttacgtgccctggcccctctctgaaagcgctcactgtccattagcacattcaacgttcggagaaggccaaagggaaaagcattggtttatctcatttttttccaaatggcccatctcctaaaatactcattagtatcggcaaattaaagtgttcctggatccgttccatgaaacaagtttgggaaagtggttggtgtcattttcctgtaaagcactcacctcttgtgcgcttctattactgcctcctccattggacacagaattccaagaggacacagactttgcctcttgttcacagctgacttccccagtgcctggagcagttccgggcacccagtaagtgcccaaatgtttggtcagtgagcaagtcctgatgtgactttcttgaccatccagttgaccactcattcctctagcttttcctctccttggcattttttttttttttttggcggggggagatagagtctttctctgttgcctaggctggagtacagtagcacgatctcggctcactgcaatctccgcctcccaggttcaagcgattctcctgcctcagcctcccaagtagctgggactacagctgcaaaccatcacaccaggctaattttttgtatttttggtagagacagggtttcaccatgttggccaggctggtctcgaactcttgacctcaagtgatccgcctgactcggcctcccaaaatgctgggattacaggcattgagtcaccacgcgtgaccctctccttgcttcttaacacattagattgaactgtgacttgtaactctagtctttgccctaactctgttgcttcagacctatttcagaccctggataggaccacagtcctacccctcactgacttaatcatccccaacccaggcactaggtgttatttgatgtgacttrtctgttgggtttgccctgactgcctcttttttttccttttcaaacactttcatagtttccaggacaccttttctgcagatttccctccagcccctagcctctccagttcctggctttttcttaacattgctgttmtttggtaaagtgtcaccactcagtgtctgatgccttaacttactaggtcccatwtcttttctcctagaaagacagtgctcttaagatggcgaaccacaccattctagaaagaggtcagggttatatttctgtcttgggatggtgggtcattaagcctcattaagttatgcaaatcctaaagtcctggcaccttcaggggctctagaatatccagcacgtgaatcacagagccttgtgggtgtgagctgcctctgcacacggtggggagagcctgatcaatgtcaggaagctttgggaaaagataggatcggagcggaccttgagaacattcacattcaagacttgccctaatgccaacgctagacaatcagcctgcctgctggccctgacacctgccccagagagcagtgtagagccatgcctgtgtgacgagccccgagggtgtggcatgcctccctaaatgtctccaggttctctgcatgtgtagttttggatctgagagacagagggtggccttcttagagttctttcctcttcggagtagtcaaaggtgactgaggcatgacacagcctgatgcaaggtctctttctccttctgcagctttgatcacatgatgaagttctgcaacrtttgcttttatactacaggcatcatgggcttgctgagtgaactgttacatraagtgtgcgctaggaagcgctttgagcttttaaagatctctggctactgtacaaacttctgattctgatgaacatgaagttgctgtatttctaggtggctttaaatcttggaatgatggaagcattccttgcaggtcatgccatataatgaaaggtgtttataacccgcccaatggttgtcctgcagtgcttgtcttctctgaataattactttttttcttttattttgggaagactgccactggaaagggaaagctggactcttaccctgaaaatagrtgccagtttcttgtcttgaattatccttcatcttggttttcggttaaatgagaaatttgcttcaaattctgaattatgtttctggtgtggttaaattaagttgtattwtattcttttggagaaaagaatatatttaattttgtacttaatgttgagatccccagaaaggcctcaataaatagtattcttcacagttatatttctaaacaatttgagaaattaagcaaggacttggaaggtggtggccaaagcttctcccggggcaagtaaggtgcaggaaggcaggaatttatctaaggaaggatcctttctaagggaaactagaagtaaggaagttgttcctctttaaaagctaagtgtatcagatcatccatggaaaccattttattcattaatttctgaagtgtttaaggagctcctgcaatgtgacaggcaccaagtctgataacttaaagatgaacaaaataagtttcctctgtcaagaaacagccttgtcgaggacacatgcaaggacatgcaaatacacacacacatatgcacatacacatacatacgcacacacaatacatacatacatacctacgcatctatacacacatacacatacatacatacacatacacacatacacatacacacatgtacacatacatagacacacatacatacatacacatatatacacacatacacatacacacatgcacacatacacatacacacatagacacacagacacacacatatacttacatgcacacacacacatacacacatacatgcgcatattctaacacacacacacacacacacacacaaacacacacacacactactctggaaaggaatggggaccaggtttggctgacagaggagacaggagcagctcataaagcatcattataacattgccaagaagctttatcttttagattagtgtcrtgcgtccaaattacaatgagaactgcacatgtaattttaaattttctggtagccaaattaagagataggtgaaattaattttaatatatctgattaacataatgtattcaaaatattaccagttcaaaatgtatccattgtaaaaattaatgagatatttggcattttctttttttgttggaaatcttcaaaacccagtgtgtattttatgcctacagcttatctcagtttggactagtcacatttcacatgttcagcagcctcatgtggctggtggctaatggagtggacagcatagctgtagacagtgattgcgtgtaaccttcttttacatacaggaaaattatggcttagaaaagtaaagtaccttcagcagaactgacttccattttcaatgatatggcagcttaggttattttgcccaactcttcttctaaaaatattggataaaatatatttttaaaycttaaaagtatcgaagagctgtcaagatagtaaggacataccaggcaaaatctaagggaagatagtgcagatagtcagggcaccacagygttgctgaggatatatacgaagccaagaaaatctgattgtcagcattccagtagtgtcaacacagacgtcaaagcccagagtctgccttggagtctaacagggattcttcctccataaaactggaactgtgaaaggctgtaacctcaatgtaaagatgaaccaaaaggaaggttgatcaccccacaggtctagtggccaactcggaagtttgtattggtctgagttgagctgaggataataaaagtctctgaaaagtggtgaccacagagcggcctgcttgcaaatttgcagcgtgtattcagatcccccggatgctctggaaatctccaaccatgatgttagcttcagatagtcttggactgagcatgtggcacatgtcagaaacaataaactgtaaaaattaacctaggaggttttaaaatgaatcaaaagaacctgtagaaataagaaactactggattgaaaagctcaccgtatgggtttcatgtcagcttaaacacagctggaaagactgttagtgaactggaagacacatcagaaggaaatatccagaatgcagcagagatacagacatgaaaaaatactttttaacaaacatgggaaagagattaagtatgtccttccagaagatggggatggagggaagaaagagacagtatttgaagagacaatggctcagaattttctagaactgacaaataatactaatccaaagattcaagaagcccagtgaaacccacggaaaataaaagaaaaawccagtcacacgtagatgcatcatagtgaaattgtggaacaccaaaatatacaagacattaaatgtcaccagaagagaaaagacaccttccaaagagtgacagaccaccttccaaagagcgacaccctaaagtctaacttcttcccagctgcagcagaagccagaagatgatgcaatcgtatctttaatgtgtgctgaaagaaaaagaagttctagtctagaactctacacttagcaaaaataacttccaagaataatggcaaaataaacacattttcagataaacaataattgtgtttttcaccatcatatcctcactaaagaaaatgctaaagataaattttcaggaaaaggaaaaagatctcagatgacctgagatacaagaatgaaagaagagaaaaaaaggtgataygtggatagatgtaaatgaacactgtataaacaatgataaagtcttgtggagttaaattagaaggacaatattagaatattaggccagaataacataaaaggcactaggaaggataaattgagatatttaaaaaatatatgacttccagccaggtgcagtggctcacccctgtaatcccagcactttgggagcctgaagtgggcagatcacctgaggtcaggagtttgagaccagactggccaacatgggggaaccccgtttctactaaaaatacaaaaattagctgcgtgtggtggcaggcacctrtaatcccagctattcaggaggctgaggcaggagaatcgcttaaacctgggaggcagaggttgcagtgagctgagattgtgccactgcactccagcctgggcaacagagcaagtctctgtctccaaaaaaaaaaaaaaaaaaaaaaaagtataacttctaaactagtagagggaaaaaatgtttattgcaaaagaaggcgagaaggaagagagaagaaaggcaccatggaaacatgagacaaaaaaaaaaaaaaargaatgcacaaaataggacaatccttgtaaatccaagaacagttacacctccctacacactgcccagctctggtcctaaccaggggagaggaaggtgaattgagaattgaaagcaccattgaaagaaacacagttaaatcacttgttcaagactgtagtcaggaaatcaaaccagccttggcttgttgaggcaacaatggcctccttgcagtttagttttgtccatgctatgtgtaactctcttctgcacctacatccttatggaatggattggtgtagagacagtctcccaactcatgtaatctgtatctgacacaatctttgtttctgatattttaaatgtcagtccacaaaagtcaaacagctgcaatttaaccttgtacttttaatctaattaatcaacatcttcaggactatgacaggtagaaagaatatgtatacatctttagtcctgtctggctctagtttcacccactttcagagctgctggaagtggacagtgtccctccttgtatctaagatacttggttccccttgatattctaattttagggccatggtggggcaggtgggattggcccccttggtctgagccagctttcagaatgacgtctctccaactgaatttatatggcaatggtattattttcctggtttcattcagttcctaagtaccacattttaactcttccatacttcttattcctaatttgcagcacagcacagtgggttagagtgtgggatgtgaagtgacacaggcctggkctgagtctgggtgtgatatctgctggctttgtgatcctgggtatttatgttaactcctctacattttggtgttctcgtctgtcaagtgtatgctaactgcgttgttacatagataatgtttgtaaaccatttgtcactaggtgtggcccacagtaagcacttaatgaatgttattatatttggaatcaaatgattaaccttctccatattgtgttcttaaggagttaaaaaaccaaagcaggggtgctgaggagatttgaaccaagattagcatgggtctaaccagtctgtcttcatgggaaatccagactggaaaaaacttttttcctctggacatctggatatatttattgggaacaaagaacaaagtctgactattgttataaccttagattacagtctattggataaatacatctaattactacccaagaaccacaaaattgactttttaatgattagtttatttctgcttgtctttattctagagatgggtattttagatcatatataaattgttcctttttccttcagacctatattggcatattgcttgtctttctttcccattggcatgattagagagtgagatttggaatattcagaagttaaggtggaatgagaatctttctactcctttgatcaatatcttaaggtctaaggatctttttttttttttttttyccttggtttcttctgggtaaagcttcccatgagctctctgctgattggccacagatagctaaaaccagttgggaggcagagggagaatcagaactataaaatagtattttatgtattttctttaaycttttttaatgggagaaatataaaaggatcaaatcactctgccttttaaaaaattaatgggctattttttaagagcacttttaagtttacagaaaatttgtgaaggaagtacagatagtttccatatactctcttacattcagtctctctctctctcacttgctcactcgcttttccattagtctggtacatttgttacaattgatgaaccaatgttgataatgatacattattttgactaatgcataatgtcatgtgcccatgaagacaatgtcctgcagcagagcgtcactgccataaaaatcccgtgttccttattcatccctcccttcccstgaccctggcacttcccacatacatggctgcacttcagatacagctcatctaaatgacatcagcttcctaaggtcaccctgtttcgttttaattcctgtatttcatagactctagtcattgaccgtaagrtgcatatttattatgcatctctaagaaaggaaaagaaatgctccaattaaactaagggatgccatcaatagtgagacacaccctgatttcagcatgttaaaatgtgaaccaacggagcatttcagaactgataagacagaacagagcctgggcctgcacaaaactcagtgctatcttgaaaatgaaaacaaatactcagagaaccacatttcaggttggcattcagcccttttttgggtggaggagagaggggttaggagggcggtgggtgaggaaggggcaggtggagacagtgaggtggaagagggggccagagactgatggaggagcccacggatgtgcagctggcctggatctgccgtgtgcaagtgtacagcacagacagaagtccgtacygtctcagtggcctggggcaagttgctaagactttcagagcctcagcttcttcatctgtgcagaggagggatagtcctgacgggcaactaaggttgtaagtaagtgaattccgcatgtgacgagcctcactcactgtgtggctacagtgtgtgtacaatacatgtgggttctctcttcaccccgattcctcaatgccttcctcctcttccctgctcctccatcctgttcgtgccccttccctggaccccacccatcacctgagctgtgacctcagggcaccctgctggtcttggcacactcattagacttcaccacaagagccagatggggaggaggcaggacagtccgcagatgggaaagcctcctaattcctggccttggtcttcccagggctgccagacaatccgggtttagcaacactgttgcatgcccactcaccagcctcatagcttgattagataaagctcacctggtagatgaaaccctggcaaaatgatttatcagggatgttttaaagatggggatataaaataggcacagatttattacttcaaaattactaagattctaagaaacacgtgttctgcacgtgcacgaggccagcaaagcaagaggactgagccctcagcatcagggtcagcagcagctggtacaggaattctgcccccagaatgggcatgaccttgggaaagccatctctcttccatttgccattggtgaaatgagatagcgatgccgatctcaccaggtggctctcgggattctagggaatgatgtttacggaagccccattcgacggccgctggctgctcaacccagaggtgccctgttcagttcctcccyaagctgccctcccagaggcacggccgtgcttgttaccatggtgactgctgggttaacaaggactggaatcgccagatttaacaaataaaaattcagcacacccagctaaatttaaatttcatatacacatgattttttagtatgtgtcccagatattgcatgcctcataatgtcgtttagtattgcgtgggacatacttatgctaaaaaataawgtgtaatttatctgaaattcaaatgtaatggggtaccttgtattttacctggtcatcttaatagggacagaatattacgttgttggaaacactgggaagtttcacttgaaacaagtgatgtaaggagaggatctcagaattatctggtgacctaatttatcacaagtctgatagaaaaatgtgcaatttatacataatccttaataattaaaagctgctctactgaaaaagttggttttctactagaagagagacaaaattaaatatcctaaggcgtcctaggctgagatatggamgcaatcaatgtcccatgtaaagacaatgttttttaaaaaacagtgccgggatagagtcccttccacatttctgcctgtaaaaattattttggtaattgtgtatattttagcatcttaatttatccatttcaraattagaaagtacatatatagcattttattatatatttgtacatattaaaactgcattttaatgtatacgtatttctctgctctgtgggtaatgaatttggataatgaaaatcagctgaattacatttcartaagggaaaggtgagagaagacattaattagatgaaaatttagagcaggtatttatcttatgtagattttacaatttgctttaaatattcctaaacaagttagtaattttataatggtgcttttaaaataaaaaaagttgggccgggcacggtggctcacgcctgtaagcccagcactttgggaggctgagttgggcagatcacttgagatcaggagtttgagaccaggctggccaacatggtgaaaccctgtctctactaaacatacaaaaaaaattagctgggtgtggtggtggacacctgtaatcccagctacttgggagrctgaggcaggagaatttgaacgcgagaggtagaggttgcggtgagctgagattgtgccactgcactccatccagcctgagcgagacagtgagaccctccctgtctctaaataaataaataaataaataaataaataaataaataaatgggcttcaggaccatascatccttaactgatttttgctgtgatttggatcctggtgaatttttccttagctacacaactsctgctgtcacccatactgttggattccaatatttgttgagacccatggttgggcaaaccctgccttgcatgctgtgggcagcaacaacaacgaaatgaacaagacaagaccctgctgttgaggaaagcacactctatggtagaagaatactgaacaagacaaaaygtgcctgtgaatagaaggtgagaaagaaagtatggaaggcggagcaagaggttccgggaaaaaggtgaccaccaacatcattgccactcacagttcttttgcaaaccttagtcttctcttcttagatgttcacagcagttctgtgagtgattatcatattattccatttttacagataaaacaaagtcagcaaggttaagtartatgccgatgttattagtaaatcgtggaatgggaattcaaattcaggtctgacttcagagtctgaggctgtgtccctcgtgggggattcaggcgagttgaagagagagactactcctaagggaggtgaggggcaagtgggtggtcttatttgaactgaaacttggaaaacagaaaaggctggacatcctttagaaaggaatggtcttttgggccaagagaacagcttgagcaagaacccagagcttggggtaggtacagagaattctaggtagttccaggaacagcgttgcagttgctctgggctttagctcaggaagtgcggtggggagaagtggrggaaggagagggtggcctggagttggggcttgctggggagcctgcagtcatctggttgatcgtgcggagccagcagaggcgtctaacaggaggaagtggcggcaaggcatgagactggcatgcggagcgggtgactttggaggcagagagactgggtagaaggtcatcaagaggtaaggagggcagtgctggagatggaagggaggacaggcggtggtggacatggaagatgtgggcggacagaaccagtgacggcagcgagccggtggactgcaggggccgtcggtggtgtgcacaggaacacgagttgctctaagttgaaattcttggaaacataccatgtggctgcaaatagaggagccctgggagacagcagggargtggcagggtttctcgtggactgcctgtgcctcgttccagagtctgattcccagatttgtaggctaagaaatgtgattcatcatcatgttagtcaggctctgattcactcatcttaagcatgagtgttccaggttagccatcaggagactgaggcatgggggttggagctgcccatagtcagtcagcctcccaagaagtggggggctggaaggtccaacctcagtggcttgactgctctgcagcccagagtaggcaatgagactttccttgttaatggggtgaggagaaaatggaagatttcgagaatttctcactactccatgcagtaagcaaaggaggggcagaaaagggactacttttactcttcgggaactttagaccttttaatcgcttcaaatatagtggcattgaaatgcaaagtattttcaaattgcattgtaatcttcatctctttcagaaattaaaaaaaagaaaatccaggcatgaccgtgatctatattttagggatgaacagttttatgccatttttgtctttgtctctcttccggctgctgctagagaagaggcagcggtgcccaagccaggactgagaggtttcgggtgatgcctctgccgtgatgatcattgcttcctggacttattttctgtggaagrggcaacttgtttcttgaactttttaattaaaatctatgtaagagtagagagaatagcataaggattctccaaagtcaaagaatctagatttcactttaaatatttcatcctactggcaggtatcgagttgattgatgaaaatgtaaaaattgaattccagacattgtatgtcatgaaatatcaccccacattgtcatgagatgtgttttataaagattcaagacatcttggccaggtgtggtggctcaggcctgtagccccagctacttgggaggctcaggcaggagaatcacctgaacgcagggggtcaaggctgcagtgagctgagattgcactactgcactccagcctgggtgacggagtgagaccctgtctttggaaaaaaaaaaaaaaaaaaaaaagacatcttaaaaacataatcagaatgtcattatcaaaagaatataaattaatggcattcttaatataatgtaataccacctatattcagatttctctaattgtttccaaactatctccctcttgttttttttttttttttaaacayttggagtatttacatagggatttaaatagggcccatacattgcatttcgtttttatgtctctgaagtttctcttaatttagaacagaccccccgctccacccaacctcttttttccttaatttgtgaaaagcccagcactgcctcgtagaacctcctgtgctctgggtgtgtgggtgctcatcgtgagggcgtttaacctactcctccctcttgacctgcctgtraactagaagttatgtatgggtgcttgatactttgagtttgacagttttcccaggaatactacacacaccacaggtacggtgtttagagaacaaaatctaagggctgatggtatttatgrctaccaagctctcattgctcctaggcttgatgtagtcagatttctagtcttgccaagtgcccagatgggtggaaacctggcaggtaaactgtccctgatgactgactgggcatgggctgtgaggagacgtgccactaggtgtaggagaggaacagaggtggaccacagagcctgggaggaagcagggacagagaggccagaggatgacaggtgggaatgggkggtccrgggcagggccaggggaggccagggctacacagaacatcacgagaacctaccactaagccaaggatgactgatgtgttcaaacccaaatgccagactcctccatcacctgcccctctatctccctccacacaccttcctctcccccatgctccccaacccagttaacagcaagtccttccccagctattcaggacaaaaaccttagcttcactcctgaattctcctctgtctcttacaccacgttgaacccaacagcaagttccactggctctgcctgtagcatatatcatcctaaatatgatcatttctcaccatttccactatgcccaccgagcccaccacccctgttgggctgactgcagtagcctgcttcaacacctgccttccacccgtaacctgctgcacttctttctccacacagcagccaaagtcatgctctgaaatgtgtccccagttccaggcactggatgtacaccagtgggcaaaaccaatccctttgtggcacaggttctagtagactgtatttcaggtggatcaagtcatacatcacgctaaacttccagtgacttcctgtctcaccaagagtaagagccagacccctttcagaggccccttggcaccctctccttcccttcgtccttgcccactgagctccaccctcctgggcctccttgctgtccttgaatatggaagccctccctgcttccccatgtccccagagagccacgaggctggctcccctctctctcaggtctcttctcatatacgcgtcatctgagaggccttctgggccccccagaaggatcagcctccctcccctcccctcccctcccctcttctcccatctcctctcctctcctctcctcccctctcctctcctcccctctcctcccctcccctctcctcccctcccctctcctcccctcacctcccctcccttcccttcccttagagcttctctctgtcgcccaggctggagtgtagtggcatgatctcagctcactgcagcctccacctcctgggttcaagcgattctgctgccccagcctcctgagtagctgggattacaggcatgcgccaccatgcccagctaatttttgtatttttattagagacaggttttcactatgttggccaggctggtctcaaactcctggccttaagtgctccgcccacctgggactcccaaagtgctgggattacagttgtgagcctctgcacctggactctcacacagcactttctatagttatgtgactgtctgtgtgtttattgcttggccactaggattgttttgctccctgccacatccaagctcctgtgcagccctgggtgtcagcaggctccacatcagcacgtggtggataagaaaagggactggtccaggcctgggtcatcagaaacacttggtgttgtggcttcatggtcttggactgctctatgggaagggagtttaaaatctcaatgtcagggcactggagtggcaatggtggtgggggcaggaggaaactctaggcccttcctcatcctcttctcccattgaggtgcattgagggtgggaagtgccaggcctctccctgcctcttgttatcctcactcaagccagtggtatgcctyggcgtttcctcttctgaaagctccacctgtgagcttttttccaccatggggtgggaagctgtgttcactcctgaggttgtccactccgcgtccatgtgctgtaatctccagatgtcaggactctctcccaaaagcagtgcccagtgtccctctcctgggttttagaggctatgtcatgggcagggagcagcagtgcccgcctctcaggccttattgtaccagccgctggctgcccaccctctttggaaggctccaggagccaggccatgccaagctggatgtagtgcctgtggcagcagccctttacccatgagctccagagagcactccaggctgagctggttccttcactccctgccagggacacatgcagcatggaaatgggcacctcaaggggctggggtgaggggatagggtgagaggctgggttgcagggctggggtgagggcatagggtgagaggctgggatgcagtgctggggtgaggggatagggtgacactgggatgcagggctggggtgaggggatagggtgagaggctgggatgcagggctggggtgagggcatagggtgagaggctgggatgcagggctggggtgaggggataggatgagaggctgggatgcagggctggggtgaggggatagggtgagaggctgggatgaggtgctgggatgagggtatagggtgagaggctgggatgaggtgcgggratgaggggatagggtgagaggctgggatgcagggctggggtgaggggatagggtaagaggctgggacgaggtgctggggcgaggggctgggctgtgctgagcactggtgtcatcaagaatctgctttgccctgctgcctgttcagagcagactggtcggggtcaaagatgggttgtggtgctactcaaatgttttcatcatttcccctctaaggaaccttttcagacactttttccctaatcatctcccatgatgctttatactgcagagggactatcattcatgtgctgtggacgtatctgtgctttacacataaaagagtaagatttttgtccaccccacgccccctccaagaaccaatttttgtccccttgggggcaaaatcaccccctaatataatcctgatggctttcaagagcttggccttcttggaccctcggcttctagcctgagcgccatctgatggtgcggacgtgtgagtgggaagagcagatgcttgggagattctgggatggggcaggcacagctgggctcccagtttggtgtcacagaaagtgctgaaatctggttgcagagattgcagtgagccatgatcgtgccactgcactccagcctgggcaacagagcgagactgtctcacaaaaattaaaagtaaaaataaaataccagcacatgcccacaggagccaagctcacttagtgttgggcagttaggaagcgccccccgccccccgctacccccaccgtgtctgcatggcctaatacccaggggaggtttcctggaagtatgggtgtgaactgagcctggagggatggggaagcttagaagaggggacagagtggggacaagggaggaagtgtaagtgtggtacagcttggagctagctgcttagtgcacaaagggactgcttggcaccacaacagaacctgcaggcgatgggagcagcaggcagcccgcctccctcagcaatcccagactgtgttgagtaccaggacacaagagacgcattgggctgctgaatactgttccccttcacagcgttgctggggcccacttaacacctgcagcaagaactcttgggctagagctgggaggcacctttctgtttattccgtgctagtagtttcactttgtgcttttrttaatttttattaataaaaaccagaccctctcacagagctgatgcccagttcctcagggtgatgactggagagggtgccatcatttccctcctccatctttacagataggacagcagaggcctttcttccttaactccactttgtttttgtctatctacttctttttcctattagtaatctcttaagctgaacagcacaatggcaaatataataaaaccaaatctgttttggctttatttatcaggcacagagagggtctggtgggcaccctgtaacttgacgactgaccyccaggtgagggtgttgtgagtgtgaaggcaccgtcctgtctcccaagcctccttatgatgccaggagagagacccggccctccagcaccgctacagggaagaatgacaccacattcaggcaccagaaacttagtagcttcgcttttgcattttggatgcttctgaggatgagggctttaatttttaacctaaattattatcagttaaaagctaaatgataaaaggttattataaatgtataattatacatatttgttatatttcatagcaatcacctatgtaattatataattgttaaagttggttagagctaatgatcataaggccatttccccacgtaacatggtgcccatatctgcagctgtgggaggttctgactgttggcgtgtgcttgaacagtgaactgtgtactcctcaaggctcccatcagcagtgtttggattgtgaggtctttcctacagggtccttgcctcccctgttttagtagaaattctccatggcacttctgggatgggctgcagagaggagctgggcccacccrctggagcgaggaaggagcaggagccttggggaatggtggggaaggggagcctaagacccctctctacctgcgtcagggaagagcttgcctggaggcttgaaatattgttggggtctccagggaggataggcayccctgggatcctgaccagaatgcagccaggtcttgtgactgactacttagagaggagtaggagctgagaataaggaggtctttggggatagcagattcagggctgcctagaagtggattcagggcrtgcttcttaatttctttcctgtctttctctgattttaaattgtttattttgttttggagtcaaatagccacatgtaacttttgactccctaaaacttaactactaatagcctacagttgactggaagccttaccaataacaaacagttgattaacatgtattttgtatatgtgttatatctggtattcttctaaagtaagctagagaaaagaaaacatgattaagcaaatcatcaaaaagagaaaatgtatgtactattcataagtggaagtggatcatcatagaggtcttcatccttgttgtcttcatgttgggtaggctgaggaggccaggaagaggggttggtcttkctgtctcaggggtggcagaggcggaagaaaatctgtatataagtggaccaatgaagtctgagcccatgttgttcaaaggtcaaatgtagtagaaatcaggagaagaaaaatgtactggctggtgcagggtgcatattcagtgctttaaatattttagcatctgctcttcacaccaaacctttgagttgggcattttatctttatgtcgtaggtaaggaactgaccacagcgctgcctgaggtcaaggtgtgattgtatattctgatcttccttttatttcccttctctagccccccgcactgcaatcatgttttatataatcatggcttttagtgtcttcagcaaccttagagagtggtgctgggcccttgtgtctggattcagctcccagccacacacgtcctaactctgggggcatgggccacaacccacgcatgttggaaacgaactcagtaaactttagttgccatctttttcctattagtaacctctttatggccccctgagttttgttcttcagtcagcccctgaatagcaggcaatggttaaatagcaggcaatggttaaatgacaggcaatggttgaatagcaggcaatggttaaatagcaagcaatggtttggggctttgcagaggtcacctactgcgttctgcaccctctccggtcatcaccctgaggaactgggcaccagctctgtgagatttccaggtggggtttgtagaacaggcagcagcaactggtcaaagccagatgtggctgcaagagcagaatccgaatgtgactgctttgtagagagatggcattcactgagccctcagagagcagcacagtcaaaacaacatctgcaaaattgggcaaactgaaattttaaaaatatgacaaaagtgatcaaccatggcaagatggccgaataggaacagctccagtctacagctcccagtgtgagtgatgcrgaagatgggtgatttctgcacttccaactgaggtaccaggttcatctcactggggcttgtcggacagtgggtgcagcccacgcgagtgtgagctgaagcagggyggggcatcgcctcacccgggaagtgcaggggtccgggaattccctttcctagccaagggaagcggtgacagacggcacctggaaaattggttcactcccaccctaatactgcgcttttccaacggtcttagcaaatggcacaccaggagattatatcccgtgtctggctcagagggtccgacgcccacggagccttgctcattgctagcacagaagtctgatmgaactgcaaggcggcagcgaggttcggggaggggcatccgccattgctgaggcttgagtaggtaaacaaagtggctgggaagcttgaattgggtggagcccaccgcagctcaaggaggcctgcatgcctctgtagactccacctctgggggcagggcagcagaaacttctgcagacttaaaggtccctgtctgacagctttgaagagagtagtggttctcccagcacagaatttgagatctgagaatggacagactgcctcctcaagtgggtccctgacccccgagtagcctaactgggagacacctcccagtaggggccatttgacaccacatacagtcaggtgcccctctgagacgaagctttcagaggaaggatcaggcagcaacatttgctgttctgtaatatttgctgttctgcagcctccactggtgatacccagataaacaggactggagtggacttccagcaaactccaacagacctgcagctgagggttccgactgttagaaggaaaactaacaaacrgaaaggacatccacacyaaaactccatctgtacgtcaccatcatcaaagaccaaaggtagataaaaccacaaagatggggagaaaccagagcagaaaagctgaaaattctaaaaatcagagtgcctcttctactccaaaggaatgcagctcctcgcagcaatggaagaaagctggacggagaatgactttgacatgttgagaaaagaaggcttcagacgatcagtaataacaaacttctccgagctaaaggaggatgtttgaaccaatcgcaaagaagctaaaaaccttgaaaaaaaagattagatgaatggctaactagaataaacagcgtagagaagaccttaaatgacctgatggagctgaaaaccatggcttgagaactacgtgacacatgcacaagtttcagtggccgattcgatcaagtggaagaaacgatatcagtgattgaagatcaaattaatgaaatgaagcgagaagagaagtttagagaaagaagagtaaaaagaaacaaacaaagcctccaagaaatatgggactatgtgaaaagaccaaatctacgtctgattgatgtacctgaaagtgacggggagaatggaaccacgttggaaaacactctacaggatattatccaggataacttccccaacctatcaaggcaggccaacattcaaattcaggaaatacagagaacgccacaaagatactcctcgagaagagcaactctaagacacataattgtcagattcaccaaagttgaaatgaaggaaaaaatgttaagggcagtcagagagaaagatcaatttacccacaaaaggaagcccatcagactaacagcagatctctcggcagaagctctacacgccagaagagagtgggggccaatattgaacattcttaaagaaaagaattttcaacccagaatttcatatccagccaaactaagcttcataagtaaaggagaaataaaatcctttacagacaagcaaatgctgagagattttgtcaccaccaggcctgccttacaaagagctcctgaaggaagcactaaacatggaatggaacaaccggtaccagccactacaaaaacatgccaaattgtaaagaccatcgatcctaggaagaaactgcatcaattaacgagcaaaataaccagctaacatcataatgacaggatcaaattcacacataacaatattaaccttaaatgtaaatgggctaaatgctccaattaaaagacacagactggcaaattggataaagagtcaagacccatcagtgtgctgtattcaggagacccatctcatgtacagagacacacataggctcaaaataaagggatggaggaagatctaccaagcaagtggaaaacaaataaaaaaagcaggggttgcaaatcctagtytctgataaaacagactttaaaccaacaaagatcaaaagagacaaagaaggccattacataatggtgaagggatcaattcaacaagaagagctatctaccctaaacatatatgcacccaatacaggagcacccagattcataaagcaagtccttagagacctacaaagagacttagactcccacacaataataatgggagactttaacaccccactgtcaacattagacagatcaatgagacagaaagttaacaaggatatccaggaattgaactcagctctgcaccaagtggacctaatagacatctgtagaactctccacccaaatcaacagaatatacattcttctcagcaccacattgcacttattccaaaactgaccacatagttggaagtaaagcactcctcagcaaatgtaaaagaacagaagttataacaaactgtctctcagaccacagtgcaatcaaactagaactcaggattaagaaactcactcaaaaccactcaactacatggaaactgaacaactggctcctgaatgactactgggtacataacaaaatgaaggtgggaataaagatgttctttgaaaccaatgagaacaaagacataacataccagaatctctgggacacatttaaagcagtgcatagagggaaatttatagcactaaatgcccacaagagaaagcaggaaagatctaaaattgacaccctaacatcacaattaaaagaactagagaagcaagagcaaacacattcaaaaactagcagaagacaagaaataactaagatcacagcataactgaaggagatagagacacaaaaaacccttaaaaaaatcaatgaatccaggagctggttttttgaaaagatcaacaaaattgatagaccactaagaagactaagagagaagaatcaaatagacgcaataaaaaatgataaaggggatatcaccactgatcccacggaaatacaaactactatcagagcatactataaacacctctatgcaaataaactagaaaatctagaagaaatggatgaattcctggacacatacaccttcccaagactacaccaggaagaagttgaatccctgaatagaccaataacaagttctgaaattgaggcaataattaatagcctaccaaccaaaaaaagtccaggaccagatggattcacagccgaattctaccagaggtacaaagaggagctggtaccattccttctgaaactattccaatcaatagaaaaaaagagaatcctccctaactcattttatgaggccagcatcatcctgataccaaagcctggcagagacacaacaaaaaaagagaattttagaccaatatccctgatgaacatcgatgcaaaaattctccataaaatactggcaaaccgaatccagcagcacatcaaaaagcttatccaccacgatcaagttggcttcatccctgggatacaaggctggttcaacatatgcaaatcaataaacataaatccatcatataaacagaaccaaagacaaaaaccacacgatcatctcaagagatgcagaaaaggcctttgacaaaattcaacagcrcttcatgctaaaaactctcaataaactaggtattgatgggacgtatctcaaaatcataagagctatttatggcagacccacagtcaatatcatactgaatgggcaaaaactggaagcattccctttgaaaactggcacaagacagggatgccctctctcaccactcctattcaacatagtgttggaagttctggccagggcaatcaggcaggagaaagaaataaagggtattcagttaggaaaagaggaagtcaaattgtccctgtttgcagatgacatgattgtatatttagaaaaccccatcatctcagcccaaaatctccttaagctgataaacaacgtcagcaaagtctcaggatacaaaatcaatgtgtagaaatcacaagcattcctatacaccaataacagacaaacagagagccaaatcatgagtgaactcccattcacaattgcttcaaagagaaaaaaatacctaggaatccaacttacaagggatgtgaaggccctcttcaaggagaactacaaaccactgctcaacgaaataaaagaggacacaaacaaatggaagaacattccatgctcatggataggaagaataaatatcgtgaaaatggccatactgcccaaggtaatttatagattcaatgccatccctatcaagctaccaatgactttcttcacagaattggaaaaaactgctttaaagttcatatggaaccaaaaaagagcccgcatagtcaagacaatcctaggctgaaagaacaaagctggaggcatcacactacctgacttcaaactgtactacaaggctacagtaactaaaacagcatggtgctggtaccaaaacagagatatagaccaatggaacagaacagagccctcagaaataataccacacatctacaaccatctgatctttgacaaacctgacaaaaacaagcagtggggaaaggattcgctatttaataaatggtgctgggaaaactggctagccatatgtagaaagctgaaactggatcccttccttacaccttatacaaaaattaattcaaggtggattaaagacttaaatgttagacctaaaaccataaaaaccctagaagaaaacctaggcaataccattcaggacatagacatgggcaaggacttcatgactaaaacaccaaaagcaatggcaacaaaagccaaaattgacaaatgggatctgattaaactgaagagcttctgcacagcaaaagaaactgcacagcagagtgaacaggcaacctacagaatgggagaaaaatcttacaatctacccatctgacaaagggctaatatccagaatctacaatgaacttaaacagatctacaagaaaaaatcaaacaaccccatcaaaaagtgggcgaaggatatgaacagacacttctcaaaagaagacatttatacagccaacagacacatgaaaaaatgctcatcatcactggccatcagagaaatgcaaatcaaaaccacaatgatatgccatctcatgtcagttagaatggcgatcattaaaaagccaggaaacaacaggtgctggagaggatgtggagaaataggaacacttttacactgttgatgggactgtaaactggttcaaccattgtggaagacagtgtggcgattcctcaaggatctagaactagaaataacatttgacccagccatcccattactgggtatatacccaaaggattataaatcatgctgctataaagacacatgtacacatatgtttattgtggcactattcacaatagcaaagacttggaaccaacccaaatgtccatcaatgatagactggattaagaaaatttggcacatatacaccatggaatagtatgcagccataaaaaaggatgagttcatgttctttgtagggatatggatgaagctggaaaccatcattctgagcaaactattgcaaggacagaaaaccaaacactgcatgttctcactcataggtgggaattgaacaatgagaacacttggacacaggaaggggaacatcacacactggggcctgttgtggggtggggggaagggggatggatagcattaggagatatacctaatgtaaatgactagttgatgggtgcagcacaccaacatggcacatgtatacatatgtaacaaacctgcatgttgtgcacatgtacccttgaacttaaagtataataataataataaataaaaaataaaaatatgacaaaagtttcaaaaattgccatatgatattgaagaagccctgaccacatctctgtgggtggcaggcttccctttctgtcctgtggcctttctgtccagctggcctttcccaggtggccgtcctggctagggacaggcttctttggtgcccctggctctctgggattccctgtagtgtgtgcaccttgggatgccctctccacactgtgatgagtcccacagtctgtgtgtaccccaggcctggatggggtgccccctgtgctcggcaggtgtggtgggcactgccctgagtggacatgtctgtggctggggtattcactcaccctaaagggcaagacccagaatctgcagatcctgggatctccgctgaccatgtccttcctccttgcacttctcgcactgagggttcctcttagtgcaggtcatttacagcttctgggcttttctctaggaggtcataagtccttccctstttcctcttctcctgtttttattctgatttgatgcattgttttcattcccagatatactatttttcaattaactaccaaatggctccaattcttatgaagttaaagccttggttgctttttctggttgtttaatatgtgttagtttggatgcctagacaagaaggtaaatatttcagggatgctatgttctgaatgtgtcccccagagttcatrtgttggaaacttttggttttttgttttttgttttttgtttttgagatggagtcttgctctgtcacccaggctggagtgcagtggtgcgatcttggctcactgcaagtgcagcctcctgggttcatgccattctcctgcctcagactcccgagtagctgggactacaggtgcctgccaccacgcccagctaatttttttttttttttttgtatttttagtagagacagggtttcactgtgttagccaggatggtctcgatctcctgaccttgtgatctgcctgccttggccttccaaagtgctggaattacaggcatgagccaccatgtgcggctggaaatttaattcccaatgcaacagtgttgagatgtggggcctttaagaggtgattaggtcatgagggctttgcccttgttaatgccattatttcaggagtgggtcagtgggttcctgctaagtggatgagttcagccgctttcccttatttctctcacttgagtacatgcttgcttgcccttctgccttctgccttcccctatgggatgacacagcaagaaggaccttgccagatgcagccctcttgactttggacttcccagcctccagaactataagaaataaatctctgttctttgtaaattgcccagtctcaactattctgttacagcagcataaaatggactaagacaaacagcaaatamcttatctttgcttctcttagatttaccctcgtagggctcctggcattgtaacgctagttacaggattgcaacctgaaactctcaacaggtgattttcccttarctaaacaacagaaagccctgctttctcacaagcatctctgttgtgcagcacctgctgatagcttctggtcrggatggattgctcaggtgcccactggtaactttctgagttaaattggaggttctaaataatatgtcctttgaaaggaggtgacactgccctttccatggagtgagcgtacagggacagaatcttgtgggaagagaacgagatggagcaattccaagatctgcagccactgtgaactgatggtgagagtggaaggacaggctgaacgtacttgaaatgctgcatgccctgagccctgagcagttagaaagccctggcatttgatgcatgatggtaaaaagaggcatctaatttgaatgacagacatcccacctcaaatggaagcagctcctgtagggctcttcagcacaagaaggggctgccaggtggagctggctgtgcagctgtagagagaaggctctggctgatagcattgaaagcaaccacacaggagaggaaatgaaacctaaattcatggagatatttgtaagtcatgtgcagtatatttacataagaacatccaactaaaacatcagctggtaagccattcaactaaaggcaaagctttttgagtatatgtgtatgtgtgtgtgtgtgtgtgtgtgtgtgtgcgcgcgcacgtgtgcacgcgcatgtgtataaatgcctaggggaaaaaactataagactattttccaaactgttcataatggttaaccttggagaagggagggaggttggggcggtaaagaggaagtgtctctcggtcagggttcaataagaagctaaaccactgggagatatgtagacatcatctcattggccttattcagctgtgggggcttgtttagcagtctctgtagggaagttgtatctgcatgtgatgctggagcttgcagtccacagggcaggcggtcaggaaggggcgatggatataaactgggagagatcaagatgttggaaccaccaagcacaagcgggagcctcawgagaatgggctaaaacttgcatcagttcttttgcatctggcattgatggtgtggatgtcctgcagaagctgggatcttggtcacagagcaaaatacaaccacctggcctgggattcagagaagctggcggggatccaggggaaggaggagcagtagcaggcctagccgctgctttgtgctgaagacgtgaatcagcagatcagcaaaaacatgtgtgacctacaaaatggtggtatttcctttccaccttgcaaacctcccaagagtgtctcttgtggtgccctctaaccagaaatatacaagaaagggaagtttgggaaatgtagtccaggccagcgtaacacatcctgaagctagttagaggaattttatattttcttgtacatacttctgggttgtttgaatcattttacaatgtgactgtataaatgtgtttctgtgaattaaaaaagaagtgaaatcatttgattaagaaaatgggctagtcgtggtggctcatgcctataatcccagcactttgggaggccaaggtggaaggattgcttgaacccaggaggttgaggctgcggtgagctatgtatgattgggccactgcactccagcctggatgacagagtgacacaccatctcaaaaaaaagaaaggaaaaaacaaaaaagggaaatcaagctcttttatccagtgaggttcagagtttagttgtctagtgagcagcctgctgaggtgagtgggaaatttggtcttcccccacctggtcccagcaccatcccctctcgctgtgctgatgtagtcacccgctaactggcctccctattccagtctgttcttgtttcaatcagagtgatttttttttcagatgcaaattggatgttggtgtgtgtctatttaaaaatgctccagtggtttttatattgcctttagaatgaaatcataaatcataactccttactctggtaacccagargtctctgtgatgttctctctctgggtttctctccatctgcctctgtctcctccccacccttcctctccccttcagtggtcacagagcctttgtgtgtgataaaattatcaggcatataatagtaattaaaaagctgtccatttattgattgcctgctatgccccatgtcatgctaggtgccttgagtccatgctcttatttaatatccacagcatctctaacggcatttacctgtccctactttacagagaagggggacattgagaaacatgccagaagtctcacaactagtaagtggctccaccgggatcggagcctggatgtgtctgactcccaaatccatgaagacaatattcagcagccatcctattagcaggcctttctcctttccctgtcatgttgttttgtggttgtgtagctgtcttttccctggacagtaagctggaggggtgccaggatctgatctaatgtttaatcatctcctgtatctcgcagagtgcttgaacgcattaggtaatcacgcggcatttgttgaaagcatccatgtgccaggctcttgctgagtcttggagtcgaggctaaggtcggrgtgaaccaaacagtacagttgctgtctcgtggcgcccgtgctctrtagtaggggagagaacctcacgctgtggtcacagctgtgatagggctgtggagggtactggggaacatgtgartggggtagggggcggtgagagtggccttaggcaggaaggagtcccacagagaggcatttggcctgtgacacaaacgaaatgtgagtctcttggaagcatcagctttgtctccctgactccctgtggagttgtgctttggtgcttatctgtggcctttggccagtaatggagtagattgatccttcccatcctcgggcttggaaaaactcagcccagcactacaggcatcttcgtgccccatggtaacaaattgtccctctgtccctttgtcaggctgccctgccaggytgcatgttgttaccctagccccccmccccmccaccgccttcctgcccccacaaccaactcccaggatgcgtcactattccttgacttgtgcttctggttccagcaatgctatggcctggtgggacaactgaatgggagcttgatattttctcagttcctagaaataggtagacactttttattgttcatttctggagaaggaaggggagtggttttcgtcgtttttaaggagactgatagcttcagtttgctgggaacttacaatgtgctctacgctgagcacatactatgtgttaggtgctttatgttcacagaaccctttggggcaaccccattccaaagatgaaggcactgtcgtgttaggaggttaatttgtccaaagtcccgcagtgctcactgcgtaaaaactggactgtgatgccttctagagggctctggtgctccacatcaagcctccagcttccagcctggaggagaaaagtttccaaggacagccgcttgagctacaacactaggcttactggagtcaaggccaaatccacctgcctgtagggtagggatggggtggggagggagtgagtcctctgctgcatgcatgcttcactaacgagtgattaaaaatggggggcacatggcccagtgcagtggctcacgcctgtaatcccagcactttaggaggctgaggtaggaggattgcttgaacccaggagtctacccagtaggcagcatggcaaaactgcgtctttacaaaaaatacaaaaaaattagctgggcatggtggtgcacacctgtagtcccagctactcaggaggctgaggtaggaggatcacttgagcctgggaggttgaggctgcagtgagccgtgatcacaccactacacttagcctgggtgacagagcaagactccatctcaaaagaaagggggaggaggcacaaccctcgcagagcactcaggcgcccacccctactgaacaccgtcaacttcaagagtccatttcaaagtccatcacccacattcaactgtttttctggacagtttctaccctagaggcttttcctgagcctgccagattgggaataggttccctggatgggaggcatcactgaagaataaactgcaagtggtcatgattgcctgaagaaagaatctttttcttttcacaagcccctacaaagactatttcaatagttctcttcagacctgctgtgggctgactctcactcccgctgccctgcaggtgctggggctcctgcggctggatctgccgttctccattcttcccctgccctcaagtgtcagaaatgggagaggaaagttgggtatttaatattctttgatggagtttataagtatcccaattagtcattttccaggatattaagaattctatacctcatctcacgctgcctttcagagctctgtaaacacaagggcatgaattcttgacggattctggctttctgatttattttcccccaagatacttaatcaaggagtaagtcatttaccttctccaagtatccttctcttcttccctggagaatgttgtgaagtctttctcgtgtttccttccgcttctgaaccctttcaaggaccaaggtctgtgctgcaacgatccagaactttgcccgtagaagttgctttctcccctagctgggagggcagagccctgctctcagcagggctcccaggacaaggctgcatgtagtaaacatctgtctgttgtggtttgttccagagctggtgatgctgctggagtggtggtcgggcacggaatgcaccatcttcacggacccgcgcgcctacctcaagtatgggaaggaaaatgccatcgtggttctcaaccacaagtttgaaattgactttctgtgtggctggagcctgtccgaacgctttgggctgttaggggtaagtcagaagtgcattcccccctgcctcacacatttctctggttcagccccaccacttgtctttttgctcctggtcattcagaacttgcagaagaatcaacagagtttctacttgatgaaatggtcctaataaactgctttttattcttgctgggagtcagtcttaacagcttcttatgggcaatcataagaggtactcaacaattgctacctgccggccattttacatatgattcatttatttaatccttacagcaacatgaatagatgatgtgccacactccattttttaaaaactaagttatatagagcttaatattcggctcagagtcacacagctgtaattagatttggatttcactcccatccatatttcttaattccatgctctactgcctccttggctaacaggcagacatcacctctgcattttgatcrttgaaggcttaagaactttgagtccataagtgagagagtgaactgcaaaattcagaattattctgaaattctgttttttttttttcccaactagtttgacctcttgcacgtagcttgcatgcctttggaactgggtctcttcagttgacttttgtcgtcttcaacacactgcagcgtgtagcrgttgagcctgtgtcacatagctgaatcagagtcatctgcggtactcaggtattccgtaggaatcacagtgtacacagtgtacattggtctggggctaggaaaggtcctaagagtttgcaccagaacttagagatcaggttttgcacctgggaacaatgccctgtagaacagatacgggggctgctgaaatcaccttgctttttggtagcccctgaagacaaaatcgtggtgtttagaatatagaagattggagacagaggctatcaggccatggaggacatagggaactagacgggtctggttcctggaggcagatgaagatagcctcctgcccactgttttctccttttgttttcctatttattctcccagtgctaacttgatatcttcttgtgtgtacacgtgtgtgtgtgtgcaaatatatttctaggaacaagagcaaacattctagtaactatcattctctgatgtggagaacttgggcagagatctgagttacagctttgtggatttattctctctgatgagagatcgccccttagaatgtcatggtcctaaccccgtcatggataccaggggtgaatggcagggttcttctcctgcccaggaggaagggtatggggagccggtgcatcttgactgtcaggtcacctgtcttaccacctttacagctaggctttctgaggtgccagcgtctcctggaattcaaactgtagtttagaggcagctggtgattttccaggctttgtaagtactttctggtagtgttcatgcttagaatgtgcaaacattcataattcgtggaccaggagtctctgaggtagagcagaaggcccattgaacttgggggtgccttccaatccctgcttgccccttggtggcattacacccacgagctcactccgtgtgctgttcaccttatttccgtaatttctaatccttaggatattattatccacattttataaataaacccccagagcctcagtttggctgagtgatttgcccgaggacaatagctcctaagtctgctttcaaagcttctgctctttcccctggaagatgttgggggcacaaaagcaggggccctggggcccaagacctgctccagaaacaggaccctgaccatcctaaaacgacccagaccagctgcagtaaggaccaggcttctaataccttcctggctcgtgatgtgcaaaggcctcattcgaggggtgcaagtcacccgcaccttcatggggttggggatggagttgcaggagctggcagagcagggtcatgcacagagatgctggagaagcacccagatgcccagcactagcaggcacggggacaggcacagatgagggagaaggtgagccccacaacacatgcagggagggacccaggtccagagagaggacatagcccccagacgggaagagacattcacggagcgggaatttaatctcagcaccgtttagggttttgctcccaaaggcttccgaatccatgatcactttacaactctgagcataagggcgggagcgctgatggcgggaaagcaagtcaacagcacgcccatcccacctgcagcatagggaccgcacctccccttgatttcatcggtgatattctatttataggacttcactcattactgtgaacacccaaacaactaatgctgtgtgtaagggggtctgcgccctgccactgatggtggagactgtgcttaggattagagtcttcgggggctccacttacaggtgaaataggcaggtctgggagcctggggccagggcgatgcctcttctcttctcactggaagtttgggagccttgctcagtgggggccttgggttttctggattcttgctaaagtgcttccttaagccctgagtcctctcttctccaaacaccacagaaacagccagtgccattgttatgcacattctcacaaagcaaggagctagagagagcaggtgccaggagaggactgagtggggcaggcacatggcaggcactggctggggcggatgggagctgccagcctgtaccctcccagggaaccccctccccatgtcacagggaacagctttgccatctactggagagctgtggcccatgacggtgggtgagatggctggtgctcatctctgccaccctggaagggggtaaagaacggcattgccttatattcattgttcagcaacatcttttgtctttaatgaccttcagaaaaaaaaaacaacctcattcatctctctgttttttcttaaataacacatgatgttgggatccttctggagtctgtggaatttgctttttaaagaggaaaggaacagaagaaggttcctgaccaggcatttttcatcctcacctatcacagtccaagaggaaatgagtttaaattgaagtcaatgaaatttgcagaaattcacgaaggtggcatttttaaatgtaaaattggtctttttggggaaagtaatggaattgtctttttaacaaagaggctttcaaccttttaaatgtactcaagatcccatgaggccactgctcwttgcagtgcctgtccccagaggctctggttctcctgggagccagtgcttcctggcatgtgccagggctctgaaggctttggttgatcttggagtcacacgctgaaccttgcctccctggagatgagagtgacacgcagtcagctggggcacaggtcactaaggtgcccaacaaaccgtggtgtgcaagcgcaggtcaggttcctgaggcttcacgtccccatttgcttatctttttcccttagcaggtcccggctggttgcataagagcatgatcgttcagtgtctgggtagcgccaggccctggcaagcacaccatgagcagcagctattattatattatcaatatttatctgccgggccaactgggatatttgtcttcagatccttaaagaagccatgtggattagttatccatggcagcgtgatgagacccaaaacatagcggcttaaaacaacaagcgtgtcataaaggtcccctgcctatgtggtcaggaatccaggtgcagctgagcgggggatctggcagggtctctcgggaggggcttgtgtgtgatctgcctccaagcttgctcacgggtttgctgcccggcctccatccctcgccacacaggcttgttttaaaacacagtgtttcccggaatatggcaactgcacccctgaggttgagccatgcaagagagagagagcgggcgcccggggcaggagccatgaagcttctgtaaccgggacccgggagagacctcccatcctttctatccatactgttggttggaagtggatcagtaagcaccgcccgtgccccagggatgtggggtagggtgtgcaggggcgtgggtgccaggaggccaggatcacagggccccttggcggctgcccaccccacggtgacatgacatttggtctgagaccttcccttgccctcttagtaaatatgtaatacagctgggcctgaacacagattgagatgttgcatttctggcctggcacagtggctcatgcctgtaattccagtggtttggaaggccaagatgggaggatggcttgaagccaggaatttgagaccagtctgggcaacacagtgagatctctgtctctataaacataaatcaataaataaaacaaatgaaaaatagcagcattgcatttctttgcacagagaaaggtgagaggaggagagtggcattatccctcctaggcagagtgcctgtgcgtgagggcgcccataaagccctgtgctgcctctttaaacgaaggattttcgatcatgacaacgatagcaattgatataccttcaaaatacgtgtccagtgagtgttgattgtgtgtggtttctctaggagaccgtgttcatgcaacacagcattatttcaccgcctttaccccagcttcttcatacacatgcacttgtcaagggctctttggctgaagagaagttagaagtttccagatatggaggggtattttcagcagatatgcccaccgccatggttttgtcagctctgtagggtggtcttgcaccctgctyactgctggcatcacctgagcctatggcagatacccagtgctgcccgccaccatgtgarttcatcagctctgcaggcacagaccttgcactaggaatgggctgggacgccaccctctgcctcttaccattcactgggtttggcaagtgtgctgggatctggaatcacatggatgaggaacccgataatggtgacgaccgaggtagcaggcgaaccactggccagggcaggaagtgggcagctcacrggactatggctgcaccgcgggttcataccgactaccatcctggaggtgggagcgcatgctcatctgtaaaagtccggtcccacgttggacacaccggggtcttcttctttgttgaccaggatcctctggcagtgtctttaacaagccagagtctgatcccaccgctcataaagccagggttgttgaaagcttggggcttcctcctcctctgtgcgcagccctcagcaaacggtcacagcctgtgctgtctgctgtacaccgacttggtatcatcccatgaactgtccccctttcgtgctctgtgcttagggccctctgatgccccatctgcctgtgcttcctgcaactgtttagcaagcacctattatctatagggtgctggggtgctgggcgaggccaatcgctcctattactttctgccctggggacgtcctgttttcccacctacccctgtaacgcctctgctctgccttcccatctgcggggctaacgccatcccacaagggctgggctgtccgttcagaagagaaactgggaaggggccttgaggacctgtgtccaggcagggtggacaagggctttgtgcagggagctcctctcccatctttgtgtcctgacagccgtgaccgtgacccctcaaagcagagccagtagtgatcagtatcctgctgcttcaagcctgcacggtcctcttctcctctccgcacatctgcatgcctgtcaaacccagaatagtttggggcctggtaaacagagggaagttggctggaggaggccagtcaggagtgcaagaaccccgcgtactctgtcccacgtggataaagtctctaattccagtctgaggtgaattcttagagagtgctttcatttaatgtttgctttatgcatttcccctgcagctgtgactaattgtggaacagcatacattttgttttgagactctcttgagatttttctggcagtgtaaggtctacaccattttcctctcagcatcagagaaggcagaaagcaagagaaaggaatgcaatgtgagcaaggccaggcacacttgtgctactgcagttggcaagaatggagtctaatcccagcactttgggaggccgaggcgggtggatcacctgaggtcaggaatttgagaccaacctggccaacatgttgaaacctcgtctgtactaaaaatacaaaaaaaaaaaaaaaaaaaaaaaaaaaaattagctgggtgtggtggcaggtgtctgtaatcccagctactccacaggctgaggtgggagaatcgcttgaaccctggaggcggaggttgcagtgagctgagattgcaccactgcactccagcctgggcaacagagcaagactccatctcaaaaaaagaaaaaaaaaagaaaagccaggtttggtggctcacacctgtaatcccatcccagcactttgggagacctgaaggtcaggagttcgagaccagactagccaacatggtgaaaccccgtctctactaacaatacaaaaaattagccaggcacggtggcaggtgcctgtaatcccagctactccggaggctgaggcaggagaatcgcttgaacccgggaggcagagattgcagtgagctgagattgtgccactgcactccagcctgggcaacaagagtgaaacttcgtctcaaaaaaaagagaatggagtctctcaccttttgatgaacacacacacacacgcacgcgtgcacacaaactgattcattattttgagctccagtcttttctgcattttgctataactagggacagatttcagagattccaggcccataccatcctctcttgcrcacacctttcttgccagaaggggtctgtacaacaacttactggcagagtttagtggcagaagtggaacacagaaactgaaagctttctgcttctcccttcccactagactctgggcacctcaaggccacaggtaatcataaccagcattgagttctcggcacctgcataatgcctggcatagggggcttcttaatcaatacctttgcacagacagagcagccttgggttgaagattccaatctgatgcgcttatgcaccatacatcagaatggaggctgtgctatggggagacttgtggggaccctggagtgatagggctggatggcttgtcttggctccagggaactgaaacatttgctacagtggctccagctggtagtcaagaaaacagtcaaaggactcaaaggcaggctgtttagcctgctttattgttaaggaacatctcacctgtttttgaagttccacttaagatacctcattttatatatttagtagaaataaatgaccttggctcacttgactaactggtaaccctactgggaaaccttcatgaatgactggacgtttgcaaacaaagctggccatagagcctcagcccctgaggggttccttgctggtgttagtgggggtggaggcggtgcaggagcaggataccctgctgctcccagccatgctgctcgcagcaccggggtttggaatcttcatctgaagccttgatgagtagccattttggagaaaaccttaactagaatggcctcattccgatcccttttcaccccagaggctgtagagcttctgaaggtcagggtcagagtactgggtctcaggccctctctgcgtcagctcttcccaacgtccagggtctctgcaagggctggcccacttgccagagatgcagaccaggtcatggggctggctgcttccctgagctgtggggagcctcaggatgggtcgctcaactagattagctccaagcacctgccctaagacaactctctctttcactctctctctccatagtggtttactccaygtgaaaattttagrttgtctaaatatgcttgtatctagacagatctgttgatacatctaactcatcagtaaatcctttcacgttgacctgtgaaataaatccagaattgatgaaattagtatattttcttgtacattctctctgaaagctgttggcatcacacatggaagcctctgagtggcctgggaaagccatgatagttatagcctattgaaccttttgccgggggaactgtcagtatgtcttaatagcagtttctagtctctttgtcataagtgagttaacttgggcaactgtctgtgcacagtgactcttcagttgtgcttaaataaatgtaatctattgttgttactattacgctaaagcatggcagagaaaatgggttgaataaggaggtgttcagatactgcttgctctgggatgaaaataatagctacaagttattgaacgcccatgtcagagtctcaactttgtgcttttgtagatgtttccatacattattcagtctttacagggacaccagggaatatgtgttgtcttcctcatcacacagaggggaaacagaagctcagaaggattgggtgtcttgagcacagttacacagctgggtcgtggtagagcctggttagaaacaggactgtctcattccagagcttttcatgcagccctgccagggaaagagaattgagtgacatttcttcagtttgaagaagtaaaagcttctaccttaatattttaacatgtttcttaccaaacatagttaacatcaaaacctagacatattgataacatccaaaattttaaggctgaaagatggattaagccagtataaagaaagttatgtctcttcttttccctttgatcatcaaaaacacctgttaccccagcactttgggaggccgaggcaggcagatcacctgaggtcagsagttagagactagcctggccaacatggtaagaccctgtgtctacaaaaaatactaaaattagccaggcatggtgatgggcacctgtaatcccagctactcaggaggctgagacaggagaatcacttgaacctgggaggcggaggttgcagtgagccaagattgtgccattgcactccagcctgtgcgacaagagcaaaactctgtctcaaaacaaaacaaaactgtttctgacccagagcctcacttatattcccaaagcagatggcgaaagcatgctgatgtcagccccttcttaaaagtgacattgttacagggatactgtgaaatatgtttacaataaaaaactggaaaatctaacaaaataaaaatcacttgtaaatgactgcccagtgctgagaccagcttggtcrggcagaccctaacccagcggtgctagaggaattaaagacacacagaaatatagagatgtgaagtgggaaatcaggggtctcacagccttcagagctgagagtcttgaacagagatttacccacgtatttattaacagcaagccagtcattagcattgtttctatagatattaaattaactgaaagtatcccttatgggaaacgaagggatggggtgaattaaaggaataggttgggctagttaactgcagcaggagcatgtccttaaggcacagattgctcatgctattgtttgtggtttaagaacacctttaagcggttttccgccctgggcaggctaggtgttccttgccctcattctggtaaacccacaaccttccagtgtgggtgttatggccatcatgaacatgtcacagtgctgcagagattttgtttatggccagttttggggccagtttatggccagattttgggggcctgttcccaacagcccagcaacaactactgttgtttttctctgctttacttttttcataaagtcataataatgctatagactcacctttgttccagatcttttaaaaatttagtattatacagtaaaccattgcctagccattacacagtcatagaaaacaagttttagtggctctaaattaggctctaattagtggctctaaatttagtggctctaaatgtcatctggaatgggccagagaatgaatattttaggttttgtggaccacagcgtgtctgtcaaaaaacactcctgtgtgtagcgtgaaggcagctgcagacaataggcacatggacaagaggctgtgtggccacaggacgtcacttacaaaagcaggcagaggagcaggcttgtcccgagggcagtagcttgctgactcctctctagtgttatacaagatctggtacacaccataacccacgtgacatgtctaccgtgggatatctaaacatttttggtgatctaagagggatggagatagagactcccatcccaggtgaccatctacgggtctagataagccgcatcactgtcaaagttgtcgtttccatttagcagcaggtcatcagaggccaaccactaggacccactaggatcttgcaagatagaattgtgaacgggaaatatccctgagagtgcttttccccagcagaagccatgattggctgcatgggacctctcaccttcccagggccaacagctgctgctttagtctgtggccccytcctggctgcagaaccaatcatcatttatagctccttcaaatgactgcatgtttggaatgagttcaggtaaatataattttaaaaaataccatgggcacagcacacggtaagccctcacacccrcaccrgtgggttcacccacccacggggatgttcccggagtcccctggagatagggcctccgatttcatggctaagttttcttggagagaatctgcatgttggatttgtgtgaaaaacaaactccatcagaaaatggagatgctaaacctagaaggtatctgccttttctatcccatgtgagggaagaagtttcttgtttttttaaagtagggtagcaattggctgtttagacctttttctgttctgccagtaggttgggggacacggcttactgaccctgtgctgagctggagctgcggagaggcatgggtgtaacggggaggagaggagagagggctgtgttgaagccggagctctctgcgctgtgggcatcctaggtttagggctgccctgaccgctgatatcccattgatcagtcatcgacccactgatcaaggagcatcttggccagttccaaaattaaggtgaaaagataaacatccatcagataaaaagcagtttttgtgtctccactgccccgtccatcccactgaagccctggtcttcctcagtgtagggggactgatgtagtggacgcctggctggggagggccacaccgagccctggggacccaggactgccctgagactccccagaggggacctgtggggcctagctcgtgcacctgcgtcagcctcaagaaggtctctggcaggtgcttctgccccgtctcagcctcaaggacatgctggcagcgggtgtggagggcaccgagcacatctcctggtctgggttttactcccagcttggaccagctgtacccggagatcccactgggctccgcagcctgctctgtgagcggagactcctgtttgcctcaactgcagagctcagcagagtgagttgagctgtctcggaaaaatcggattcaaatgaatctttggccaaccactgttcaagaaggatgttaacctcacacctaggaatgctacattttctagcgtttgacattttcagcgatcaagaattactatattttgtaatatcacaaaactcagtgagatctgcagaaaagaggtgcacaaattagtgtcacacagctgcacggtgggcttagcgagtatgtgacggtgataacctagaaaccgtttggatggtggtgggagcatcgtcaggaccctgaatacctgtgactgctcgctgctgccttcttgactcctgccgtctgcgctgagaaccagggtgcccctgccccctgctcccacactggcrgggcaagcacaacctggacctctagctgaaaggtggggagggcaccagggtccatggcctcgacagcatgtgttctgggactgtcccgaggcgtctggtgtgaacgtcccctcctctttttctacttcagtctccaacagccccggcaggtggctctgacgtctccttcatgggcacctgggctccttcttctgtttcagggctccaaggtcctggccaagaaagagctggcctatgtcccaattatcggctggatgtggtacttcaccgagatggtcttctgttcgcgcaagtgggagcaggatcgcaagacggttgccaccagtttgcagcacctccgggactaccccgagaagtattttgtatgtaggcaccagmgcagctgtgtcccaagggctcctgcaggactgtgaccgtgggacccccatgtgacttccacaggacacgtgactgtgtggtcctgtgcgactccagggctgtgtgtgaccatagggctgtgtataacctcagggatgtatgtgaccatggggccgtgtgtgaccgtggggccacgtatgactgtggggccgtgtatgaccrtggggccgtgtgtgaccccagggctgtgtgtgaccccagggctgtgtgtgaccatggggccgtgtgtgatcatgtggccatatgtgaccctggggctatgtgtgaccccagggctgtgtgtgaccccagggctatgtgtgacctcagggctgtatrtaaccatggggccctgtgtgatcgtgtggccatatgtgmccctggggctgtgtgtgaccccagggccaggcatgacaccagggctgtgtgtgaccccagggctgtatgtgaccccagggctgtgtgtgacctcagggctgtatgtaaccatggggccctgtgtgatcgtgtggccatatgtgaccctggggctgtgtgtgaccccagggccatgcatgaccccagggctgtgtgtgaccccgaggctgcgtgcgactcctgcctccttccttccagttcctgattcactgtgagggcacacggttcacggagaagaagcatgagatcagcatgcaggtggcccgggccaaggggctgcctcgcctcaagcatcacctgttgccacgaaccaagggcttcgccatcaccgtgaggagcttgagaaatgtaggtaaggaagagtgcgtggccctgggcctccccgtggcagcgaggaagacaagccccagctccggatgggcagagcttgcttcctgccagcacttcccagctgacttgaggctaggagctcagagtggctgctcaagtccagtctctgtgactgggaaccaaggtcaaatggcatttgcacccctggctggcactcagggtgggcctgtgcctgcttttcctggggtgcccaggccagcgctgccctctgctgtgcaaatgtgctgggtgcctggatggcccatggggtaacctgggtccaggcctgcaggcccaagacagcacagttgggtttgaggggcatttcttgcccacctgttggcatcagctgaactctgaccttgtggtctgtcacagctgacctcggagtctggaaccctaaatggccatcggtaagaagaagaaaatagcaacaacttgcctctggcctcttgtcatgcttttgtcttctttttgacccttctgtctccagttcagaaacaccctctgtgtccttctgcacacctggcctccccacgccctcacagtcccttggccctttccgtgggctccaggccctgggggcggcttcctgtgctccttctcaggcaaagcacttcaggcgaagctgtctccttcctggagggagctagaacccagctgaatgcggctcccggccccatgctgccgccttcctcrgccttatcctcttgtctcctctcctccttctgaggcaaagggcagggggccccgaactcctccccaggcctgcatctggggccccttggtttctccagccctggctgaccccctaccaggacctctggagcaacagagttggtgaatctgtacctctgaaagtccccaggtgacccaccggctkyagcggtggttgaaggccctgggtagccctccctgctggcctctgctgcctgtttaacaccctgctgcacacccgggccagcgccagccccgctcccttctggggctgccgggacccaggccaggcgggctgtgcccctggccccctcgcccctctgtgtgcctgccctgcccttagccctgttaaccagtttcttcttccccacattcttcccttgcttcctcatccctcttctcctggtcaccagtgttccttgatgacctctattggcacaatgccatgtactccacacagtgtcaccttcaatccccacaacatcctggcaggcagctcttactcccrgagaggagagagaaaagcaggctctggagtctcagcagctcacttgggcctgcagaaccgagggcccaccgggccagccacctccgaggtccttcccctctgcccagcctcttagaaggtcagcggcacagaggggcactagctgcctaaatgtctctcttgctctgggctcagcccaagggccagaattatcctgctccctgcagtccctgcctctacaccgaccctgggccccagggccaaggatgcccccattgctygtcccccgctccacctcccaggctgctgcgctctgcactgtccagcagcgtcaagaccctgtgcactccctgatcaggagacctcactgaatcctgtttcctctgctgaccagctgtgtgactctgggcaagtgaccttgtctctctgatcctaagtttgctccgagttctgcaaaatctgttagggctgcaaggaggattaaatgagaaaagctgggtaaagggctcagcatcccacctggtacatgataaacatttaatcaaaggctgctcttgttaggggccccctgcctcccactgcacatctcaccttctgcccctggtggggttgcccagcttgcagggctacgtgtccccctcctgatccatcccctctgggttgggccagcgcrgctccctaactgagctttgcctcagtcttgcctcgcaaggccgtccagctctatgctgttcatcacggagagttaacaaggctgtctccaagaacagccaacaccggtctcgggcgcgtctggcacgccaggccctgtacgcactgtgcacatgggatgtcctcacaggactcaggaaggcagattgctttttctttttgctttcggttcacagataaggacattggggctcagagaagttaaggagctggcgcagtgtgactcagccagtacatggcgagctgggatttgctcctggctggcgggggctggcagcggctgctctcactccttctgatgcgccttgcagttagaatcaggctggctctccattcaagacactttttttgaggttttcctctggaaaatgagacagttggacaagtcactgatatttaggtggctctttggggaacccgtgggttctccccacctttgcttaaccagagtcagcctcttctgttgtctgcatgggtccctgtgtgaacaggttggaggaaaggaggtgtcaaaaccgctgaactacgtgagctctgtggccccttcttactgggaagccctaggacactacagtcatggtccacacagcctgaacagctgttcctgtagatacgcatttatgctttaaaatgcctgggaaatgtgataascatccaggttctctcccagccaccctgaccaggcagctactcctcaggagggctcaggagaacagtcccgccttcagccccaaggcgggggtgagtggtctcgggcactccgggccccacttccaggctctcctgcagggcagcagatagtggacctgcagaccccgcatggtggtcaggcagcaggtagaagaaaacagatggtgatttattgtttttgaatcttggttccacrtattcccaaccagaccaagggcctttcctccttcctgccattctcccactccttttattaatacttgcacatatgtaaagctcccagtgaagtgtctggctcatcatttattgaacacaaaccatgtgctggtccctgcagtaagtgcctgacctccatcatctcagcagctgtgtgacagaggctcccttctccaggagaagacctagccccagctgcccaagagaagatcccaccggtgggaaaaggtggcagccgctggggttcccacccgttcctcctaccgtctggtgctcttacacttcagcaagtagccattttccactgtgcatttatctcttctgttccttcactcgttccttcctatattctttcatcctttgatccaagaagcttcaactgactacartccaattccttaaggagtttctcatcagtatcttctcctaggataatttgtagctaccttctttttctaggggaaaataatgctmatagaatggttatgctgctgtaactgagacacatccttastttcctttggaataatttttcttatcatccacacttgttcaaatttcggtgtttcttgactgaaatgataggctgggcacattagaaagttacaaatcatcgtcgtagtacctctagacctgactttgcagtattgctttaaaagtgatctgggctgggcacagtggcttacacctgtaatcccagcactttgggaggctgaggcgggcagagcacttgaggtcaggagttcaagaccagtctgaccaacatggtgaatccctgactctactaaaaatacaaaaattagctgggcgtggtggtgggtgtctgtaaccccagctacttgggaggctgagacaggagaattgtttgaacccgggaggcagaggttgtagtgagccgagattgcaccactgcactcctgggtgacagagtgagactccatctccaaaaaaaaagaaaagaaagaaaagaaaaaaatgatctgacttcagcaatgaccctgttttctattactaagttctagtgggattttatgattacaaaagataatacacattcagtgtagaacatgtggaccatatagaaagaaagaaatctgaccacaccatttctagataagcagttagccatttgattattgtcttccaatgtgtgtatctacagaacaaaattgggttcacacgctatatactgctttgtatttgttttattttttatagtttcagctgtatatgactgtacactcaatttcagaaataatgaaaatccaacactgctgggagtcctaaacggaaagaaataccatgcagatttgtatgttaggtaagtcgaactgttwcctttccagaaaagacagtgcccatttcaaagtaaacacatcacaaatgacctagagactttcttccagggatccctgggtcacactgacttctttgcagtctgttttgcattgaatttgacacatcctactattggaatgatctgctgaagtctccttccgtcccagctccttccggatcctctgtaaccagctttttcgtatcaaagagcttaggttgaacaaatggaaggctgtattttataattattttggtgttggtgtgaagagaatatgttattgacccttttcgtgggcgatgggtctgctgtatggaatacacacagatgtgtatttatataaggcggtctagacacaaatgcagaactcttgcagtgtctcacttatgtgttatgttccaggctattaatgattttattgaagacacttccagaacatattagtcaaactagttctctctgcctgcttatagaatgggctgaacacctccagaatgtcaccaaaatcagtgggaaacagaattggaaggtgctgcagatagtaaacacaatggcagttcatgcattaaaacccagtgtgacgggtcagggaccgtattggtttgttgtgctgtggatcatcttctctgaatgctaatcaagagaatctgaaatgcccactaatggagaactaatccaggggcgtataaccttctgattcaagaccttacagaagccacattacaacacagcaccctgaaaatccaggggccctacattcccaccaggccacaccaaacgtccaggctttcctgggagatattttggtggactggcggccaaagttaagtagcttctgatctaaaaatgactctggctttcccatgaaaatargacagcatcgtcatcatcactgacttcttgtctgatggtgcaggcaasagtctgccctgtgactcagttctgtggcatatgaaggcaggagaatcacccacctgcccgaaggagacctttagaccttctcctaggagtaaagtgaggttttattccccatgttctctgacagctggcaggagctccactcaatggccagctgggctcagttatttgggaaaaccccaagatgtgtacaagattatttcacctctcaggtagctgcaactctccaaagcatgtgtgacaatcagcccaaaaatggtactggcacgttcactcaccgaagccagatcaccctcttgaccccagaggaaggttagcattgatgctattcaacacacatctttttgttgtagctgcccattaaaaatgattgaggcatgtttctgaacacacatcagtacaaagcactgaaacatcaagggcgataatgtcaagttgctgaaaagggcaaaactcactacattcctactctccaaataaagaaatattaggcagacttgagagatctcatttccaaagcagagtagatcaaacagcaaagaagtagwggatccagagaagtgcagtgtgcgtaggaacagaaaaggtgaaagaatatttccggaggagcttatggggtaagttctaattatgtgaaaaacttacctctgtacaatactgccttgaaaaggaagtggctcattgtaatctgttataagatggaatcccatcctttatctcttaacagactctagtgtgatagataaactctcaaatcttcttactaagatattcttaggccatagaagggagtgaagtgacctgagaaatcaagccagatgcagactttgacatggacaaaattgagtataaatgaacgtcccttgaaatcacaagagccatcaacctgagaacaaataggaagggcaaaggtggcagagtgacttctcccygtgttcagtatgggctctttgcaaatgatcgagtggcaagcccttgccagcaccagtccccagagccacccaagtctctgagctctcgctggtgcacagtgactcaagacccctgtctgagccatggagcctggggaagatgccctggctacttccatctgggagaactttaattccccaccatccacatcactgacttgtcaaaacctttgcagaaagtctgcctcaaggctaaccaagaggccagaggaatcatttgatgggagataatctgccattaccagtaagttggttacttggctaagaagaaattactaggttattgtctctgatgcatcgattctgtgtatattggattgtctcgtgtggaaactgaggcagtgttrtcctctttggaagaggcaaatatcaggttttgggggcctttttgtgaggtgggagggaagacggaatgaggcaggtgtcccctgttctcacagcatctgtctgtgccattgaattggcccctgggttgttccttcgtgggtcataattgcatttttgcctgtttctccagtgtggatgtggaacgccccttctttctatcacttgcattactctcttcagttccacattatttaggtgacccagataaaaacaaaaaacggcagcrccgttactggaaactgtatgttgtaggggggcatcacctcctctctgctagctgctctctgcctttgcaggaggatcccactggaagacatccctgaagaygatgacgagtgctcggcctggctgcacaagctctaccaggagaagktcagtgcactgggtgccaggggtcccttcmcgttgcagctgtgggtgcgccgtgtggctgtgttgtgtggtagcaggcctttctccggtgggcgagatctcacagagccagttattagtgagtctggagctgaccctctcttggcaatgaagaacatgacaaaatattttttaaggagggttcacacacacacaatgaagctattctctaggtgtagtggaycaagggagaagtaatggccccaatcgcccctgctcgtattttcctgcctctggtcctaaggcaggatgtgcttgtggggtggatgttctccgcagcaatggacatggtcttgattgcttctggatcaacaatttggttgtcaatctgatctcaaagcatctccagaataagcaggataaagccctacaaggatccaccttggtcttggctgggttcgaacctgctgtggtgccccctgtcctgttcctgtctgtggtccagttctccagggtccccctacttgttctgtcctttctctgagcaaggcctttgctttcattggtttctctcctccaaaggcatatgcaaggaagggagtctcataactactggatcttatgaaggagcgaagcttagcttccccttggtgagaaaagcatttttatggccaggtctcattaaccagtaaaaaattatttctgattcaccatatgttttaaacccaaacaagtcattccctagaatcagatatattctataggattctgatgaccttttcctcaaactccataaatgcgggctggctctcatgggttctgtttttctctgtttctcaaaggagagaattacccagagctttgcaggatgtcctctgcagctgaataagaactttaaccctacctacwcttgggaatgtgttaggattttagtccacaagactcttaacagactctagtatgatggataagctaaatttgcctcctttagacaaatttcagtccaaaagacttgccatcacctttagcagagaagctcttgtaagtttgctcagtttttggaatcaagatcctgataccttttttccctgatgatgcctttataccatcactgcacagagctggcatgtgggcctctttcctatgtaggttatgggcattgctctctggtmtccccttacaaatacacaaattacaaattgtatgtatggactcatttaccttgtcattagagcatgagttgtgcagattcccaggcccgaaccccagtgattctgtctctgcaggttagaggtagaacctagaaatgtgtacttccagcaaactgcttctgatgcagatggctttgatggagatggtctgaggcctgaagctttttaacaacaagattctaagttatcgaggttctgcaccgatgcacatatgtgccccgacagagaaacagaaaaccatatgaatttcccccttctgttttcatgcatgaggcagtatttttcttgctctgttttctggtctaagcattgaggcagcatataaaatgttactttttttattttttttttttgagactgagtttcactctgtctcccaggctggagtgcagtggcgcgatctcggctcactgcaagctctgcctcctgggttcacgccattctcctgcctcagcctcccaaatatctgggactacaggcacccgccaccatgcccggctaatttttttgtatgtttagtagagacggggtttcaccgtgtttgccaggatggtctcgatctcacaaggtcttgtgatctgccctcctcggcctcccaaagtgctgggattacaggcgtgagccaccgtgcccagccgaaaatgttacttttagccgaaagcagagtatgctaagaaaaggtttagaaaatgagcctcttttgtaaagagccacacaaacaaatctacaataaacgtgggccctcaagcccatcaaggcaaaggagatttttctcaacgggcccttcctcccctgtattcaggcagagtgtggtcatcgtgtaaaccaagctgagaggcacatctccttcttgttaaaagtctcttagggtgttttcctctaaactatgttcacatttaaatgatagtgttcaacttggtagggttctcaaagtgatcatctactccaaagctcttacactactgatgaggaaattcaggtccgaaagatgaagtgatttacccagttttccagctcactgatcaaagccaggtgctggagtccaggccctttctctctccgtgcagggctggggcgacaccgagttctctaagcagtatgtgtctgtgagcaggcctgggaggctggccctttgcccttccgagaagatcgctgagcagcaagtggaagtggtgcatggtttctccaagcagagtggtgaatagacatcaagggacaattcctttctgtatcagcctattttgctaggagcctagatctaaagctttacgtgccccaaatctgggtgcccgacccagtttgtcaaagtgggatttcattttaatgatcaaccttgcagtcagaagtgtggtgtatgtcaaaagacagttctgttgattttgaccttgggattttagggcagtagttctctgacttttcaatttcatggacaagtaaagtttctgcaaaatgggaggggaatggcaggcagccaacagaggtgtgccaacattctggtctttccaagcatggacataaataaagagaaactcgccatctaccactgacacagttatactctttaatatgggaaaggcaccatctctgaaaacagggccatcctttgagtggacctagtttagctttatgaaaaatgcacagtatttcttgctcgtcagcatttgggactcgtgttgttggaaggctttgagaaaccattcatgcccttgtgtgatcttctgtggacaaaagcagttcccaggtaaactcgctctgaggctgaacctacaacctcagaacccccttttttccagggaggtcacgatagccatcacggtttcttaattgtatggggtgaacagattctaacttttcatttctaacttaaagtacttcttcaggttgtaatttgacatttgcagaagggactataacttggccattaatagtgcaaattaagaaataggtgaggctgggcacagtggctcatgccagtaatccctttgggagtaagcactttgggaggctgaggctggaggatcacttgaggccaggggtttgagaccagtctgggcaacataatgggaacccgtctctacaaaaaaattttacaaactagctgcacctagcggtacacacctgtagtcccagctactggggaagctgaagtgggaggattgcttgagcctagaagttgaaggttactgtgagctatgattgcaccactgcactccagcctgggcagcagagcaagaccctgtctctaaagagaaataagtgaaggacagctacattcagagccgtcctgtggaggccaaggtcgggagcagctctgggtggggtgcagagttcagggtgcaggcatggtggcccgtgggaaacactgtgctctcctgctctggccttcaaggacaagaaccattttggggactggcaattgttttttcacttaaaccataagggcattgctccttagaagggcagcagggagcctcaaggcttggcccccatggtaagtcctttgcaagtcctggccgtgcactcgggtggtgtctgcgggctgagaccaaggcttgcgagcgcttctcacagagcctctccccgcccagacttgctgactaagaggagccgcttcttcctctctgttcctcaactttctcttctattcttcgttctttcctgttcttcctcccgttcttttctcccttctttcttctcctgggccctgggaaagctgagcggacgtgctgtgtggacgtctccttcgcacgcttcctccctagtgcctttgttgcgggctgcagggggcgttcgtccggggatctgccgcctctcaataggatctcgttctcctcttggcttgtaggttgatgcttctttctggaaacaaaccaactctccttcattcaataactacatttcccagttccaactttatactatgccacacggtaacacacaaaaacaaaaaacacgagtcctttccctgcggggcaaattttattacaaaacgggtccacaaccaagatgggccacggacattctgctgccagagcctggagtctggccagagctggcggtgctgttctctccccgatagtcagtgggaggtcctgtggcaatgtcatgggccataagtgaggggaggggatgagatttagtgttttaaaccacagacaaagaaaactttaaagtgaatggggctgggcgcaatggctcacgcctgtaatcccaacactttgggaggctgaggcaggaggatcacctgaggtcaggagttcaataccagcctggccaacatggtaaaaccctatctctacaaaaattagctgggcatgatggcaggtgcctgtaatcccaggtactcaggaggctgaggtgggaaaattgcttgaacccgggaggcggaggttgcagtgagaggagatcgtgccattgcactccagcctgtgcgacagagtgagactctgtctcaaaaaataaaataaagtgaatgggaagttctgagttgggaagctcctagaaaagggagtgcttttttcttcttgctagaggtgcaaataaaacaatcttggcctagcaaatgtctttctggaaacaagacagaaaaggcaccatggtgagttcccctttgtgatattactgtaaaaaagcactataaagactgttaaggaaaataaattcaaaagccacatttgcccattttttaaaatgggtgagttctatggcatgtaagtgacatcttaagaaagctgtttttttttttaaaaaaaacaaggcacaaaaatatcaccccccttgtctagttatcaggtgccctgtggccccaacctgggataagaaaatcaccccgttctggtgggcaggcgaatgccgctgcttccctggcagagttgggtgccacctctctgggcattgcctgtgctgctgaccgtcatggtgctcacctccttgtctcctccaccatctgatcgctctcactgcttgagggtaggagtgcttggcacacacgttgattgttcttcagttgcttgatgatgtgacttcccctgagagcccccatggcttctcttggctgatgtccaacagcagagtcacgcgacaagtgacgcttcggaccaggcttgttaatgggctgcagggggccgaggacagagcagaggcacctgaactgcccagggaaggggttgggggttctccttccaaaatggcctagtgtgtggactattattaaaagtgcctctgagaggccaagaaagcctatgattcagtacaccctgaatgaaaaagaagaaaagtatgagatactttagacttttctatctcaagttgttaaaggaaaatattcagcatttaagtagtataagtttcaattataaggaagctcattttccagaaaactcgactccttagagaactgggacattactaggctagttcatgggacacaaacygggcctcactgtgacccacacccatttttgtgtggcgtgcatgctatcggccacgtgcagcttttacaatagctgaggcagctgcccaccatacaacctgggcaattccctgtggctgcctggttcagctctgctccctgcaggcagcttctgccctggcccctcctcacggccaggacctgcccttagacgggccagcgggcatcctggtgccacagctccttgttccccccaggtcctggctcagctcagctcccagccgcttgagcacgcctgctgacctgggttcctgggtccctcccttgtgttcagcagctccttgcggctgagccccagtccctgagcgggagctccgtgacatgagacacccagggaagagccaccgcgttctttcgcagtgcatttatgtggggccgtgagtcccctgttctcacccagggactgcaaggagcgccatgaggctctggagtaactgccctgcaagctgctcggtgacacacacaccctgtgggtggatgtggatgagtacatggttcccactaaggatctgcttagtggaaggacatgagcctgtttgtttacctttcacacggtctaacaatcacttagaagagtcaccctggacacccagtcctgagtgtgctgtcacctctgagagccacacccagcagccctcmagccctttgtcattcatgatgccttgaatcacggccctcagagccctccagtggcaaacagggtggtaggtgcgggtgggctgcccraggtgaactggctgtggaggccgggaaggcggggcatgtgccgggccgggctgggcgagctcctcctgactgcgggccaggtctccaccgagtgtcccctgcgggcagcttcggcgcagcatccactccattctcccgccgacctatcgtggaaggcactgctgccccattagacagactggggcctgggctcagggatgcaggtgcctgcccacagagggtggatcctagcccaggctggcctggcgccagggttcatgctccacgccctgcactcagtgacagctgcagcggccccaccactcccagtgtccctgtgggaggggcggccagatgcagctttgagaagacagcagctgcctacaaagtgctttctggaaggagctgcagaccccagttctgccgagccccggtggcacctgtgtatctctgcgattcccttggaagcagggcctcgggagggacctgccaccgagccccgtgtggcrtctgagggtcctctttcctgtcccccaggatgcctttcaggaggagtactacaggacgggcaccttcccagagacgcccatggtgcccccccggcggccctggaccctcgtgaactggctgttttgggcctcgctggtgctctaccctttcttccagttcctggtcagcatgatcaggagcgggtcttccctgacgctggccagcttcatcctcgtcttytttgtgggtgagtggagggcaaggggctggtgggtgctgacagcaccaccctgggagaggtggcatcagggctgggacgaaggccatctgtataggcagttgtgccgtggatgaggagcaggctcagcttgcaatcacagggaaagattagacttcaggatgagtgcgaggccctcgaataccaggcctgggaccccctccgcagcctggacggtccagcctcccacctggggctggattccacacgttccctgttgggtggtgatgcagctgccacttcactccccgacagctgggagtgctccctccctgtcctccgcagacagctctgctcattggcatcatttcctgcttctgaagaaagccctgtgctggagcytggcggggacggatgggcagctccctgccttcctctgggggygcctgtggcttctcctttgctgcaggtggatgacactgagtggagacactcggcgacagagcttttcatgggtctgcgctggctccaggtgaccggtattctcgggctactgctgcttcttggtggcaagcccctgtgcaccctgctccttgcctctggcggggcagcctgtcgtgcctgcttcctgccctgtgaacagcaggtccgtgcttcctggagccaaggaagacttyggggtttccctgtgaaaggccctgtctccccaagcctggcgtcctctgaggctttggagagcccgggagagacggcacattgtccaagcacacagagatcacgtgcttcttccaaatggacaggactcagttattttctgtcaaacacaaagatgcagtatgctcactataaaaggcccaagcaatagacaagcgcagaaaatggaaagtgtgtcaggagaccattcccattgagcccacttcccagataatcgttaatgacaatttgatgcacgtggtggttccagtctcaagcatatgtgcatctataaacccgtatcagtggagtttcttcagctcgccttttcacctaatgaatcataaccaccaaaacaggtcacagcacataaacctagctcattcattctgactgagccaaccaatgctgcagcatatgggtgcagtagacaagctggctcctgttcctcaaatagaccctactatacagtcttttgaaagattaagatgtattttagtgttaaaaattaaaatattaaaacaacacccacaccgtgtaagggaaaaaaataagaggttggagaagaaagcacctcatctccttaaggcaggtccaggggcacccccatsccccgccatgctgaggctggccaagggtccggggcagctgcaggtgccagggcccctggtagggcgggggcaagctcaacccttctgcttcaatagcaggcaacagcaaggcacacacacacccacgccgtcttggagargggccccttcaggatgaaggctgcagacagggccacccagctgtgtagcgagtaccaaaaaaagaagcctgagcactgcccagggtgcagtgtggacacagggcgtctccaggagcatctgaggggtgcagtatggacacaggragtcttcaggagcatctgaggggtgcagtgtggacacagggagtcttcaggagcatctgaggggtgcagtgtggacacagggagtcttcaggagcatctgaggggtgcagtgtggacacggcgtctccaggagcatctgaggagctgactgccgtgccccattactctgagcctgcgcctgactgcattcttccctgaaggactttgtgtttgtgttctttactcctcttccaaggccacacggtccacgttttactcacttctttctgctctacaataactccactctcactgttactgttacgctccatgcaggagccctccagtttgtaaatgacccatgggagatgcgtgcctcctgctggctgggctggattcgcccatcccaggctcttgcatccatgtcccagttagtttatcgaccgcgatgctaatgctagataatcctgtgcatcatgatttgggggatttcattcacttattcgtctatccattcttaagcatgtattataaatggactgttttccaagccccatgcccagtgctgagcacatcaaatgattaagtcttgggccctgcacccaaggacctcaccacatctgcccgctccagagggtgtagttgaaattgcaacttctgagcattaggccctgctttccagcttcctatattaaactgggctcccacgagggtcctgcccattctctggtgtaggcaaatcctgccgtcagaggagagggcggggattttctcactgctctaacgcttgcaccaaaagcagtgctgaaacgtgttgggcactcgatactcgagctcttgcgtcttccaggctcctggtctgttctttataaaacttcgcygaacatgccctgttaacttcctgtccctyattcacaaaagaatcctctttacctgggggtcagcagaggaagccagggatttctctgagtccctgcgaacggctgtgcatggcttgccaaatcattcaccttcagggtccaaggaggaaaacccccaccagagcagccttgctttgtcttaatgtcacatggatgtccacactcaaggatgattgtaaagccggcaggatgatggcacctcaaacccgccagccagctctsagctggcgcttgtgatttgcggccacgggccttctcacttgctctgtgggaaaacggccctgtagtctgttcgggctactcctaactctgctctccttgtctctgcagcctcygtgggagttcgatggatgattggtgtgacggaaattgacaagggctctgcctacggcaactctgacagcaagcagaaactgaatgactgactcagggaggtgtcaccatccgaagggaaccttggggaactggtggcctctgcatatcctccttagtgggacacggtgacaaaggctgggtgagcccctgctgggcacggcggaagtcacgacctctccagccagggagtctggtctcaaggccggatggggaggaagatgttttgtaatctttttttccccatgtgctttagtgggctttggttttctttttgtgcgagtgtgtgtgagaatggctgtgtggtgagtgtgaactttgttctgtgatcatagaaagggtattttaggctgcaggggagggcagggctggggaccgaaggggacaagttcccctttcatcctttggtgctgagttttctgtaacccttggttgccagagataaagtgaaaagtgctttaggtgagatgactaaattatgcctccaagaaaaaaaaattaaagtgcttttctgggtcatctgtggtgtatgttgacatggaccgctgcccctccatcctgcccttgcccgtggctttggtgtttcagatcctactcacgggaggcagctgccgcggaggtgtgggcagctgagaggggtgggcaggccagcacagctcctggcaggagacacaggtccaggagcccgtgagcatttgtgagagcagagatggcaagcacgtgcgtggagaccaacgaagcgtgtccctggcacacagcaagggagagtttcgctcggtctctgcagtgcagtctcctggcgtaagtcttgaagatggacccaactccctgaagaaatggatcttgaaattgaacacaaacatcatgaacgtacagcctgggcattctgcagtgatttgtgagatgagcttgcatcgactgttcctctcagcagtgacagccaaagtcacccctgataaaatgcagtttcactttataaaatgcctcgccccttcccagcatgtagagcttgtctgcagccctaaaggagccaggtcctgctctgatgagggtcaaatcagagccgacatcccatgtacaaaaaacccccaggcttctgccttccttccgggctcctgtctgctcccattttactccacggaatagttctgccctgtagcatctccagcggcctttgcagactgctgtcagccaacaggtgccaaaaatgcaaaagaagaagaaactaaaagcagtgctatttttgcagaacaaatgctagctattaaatcatcttaggccaagacaccaatggcacttggaccgataggtatttggagcatgagttaggaaggatatgtctttctccaggtgcgcagctgaaagttgctgagaaaagctgcctgtgttgctgtggtaacatgagaaggaatgaacagctctatacaaaaactggccacacattataaggcctattctatgcagttatgtttttggctatttgctcatttagtcattgtttatcaaccaaactaggtaagccaaggagttacaagacagctctagagaagctccctctgcttacaggacaataatgcattgtttgtttgttgatacaaatgaattatttgaatccacagaagtgaaaaagggaaaaaatcctggctgacttgtgggaagagcgtactgcagagcctagggcctgagttaactcgctggcggccctgcaggcaggcttgatgggagcgcccagcacatctgcccaccctgcacagggcatgaagcaccgtgtgcagagatctgtgggcaaaagcccaggacgtgaccttaggcaagaggggtccttggagaagtggaggtgtgcatggtgtgtagccttgcgtgtctgtgagcacgccctagtggacctgcgcctggattatcgggccagtctctcggaggggtccgtgatgctgagttacgccattcacctgaactctgcagctcatcggctgtaggatttgggtgagacacttttccttgctgactcatttccccatctgcaaaatgggggtgacgatatctacctcttggggtgtgtcaagggtaaaagagcacactttaagaatcctaaagcactaagccaaggatgaaagactagaaagctgcctctatgttgctactctcaaaaatgctcagaaattttcttgtcgtactaaaaatgtgttatttttctcattttcattcttccattcaacacagaagtaatctaagtaagttctaaaaacatagatccgggggcccacagacattcaattttcttctgaattggctctggtatcacacaacacacaagcaagcaaacagcctgcctgctagggccttgggttccaggctggaggaatgcaggcagaaatctcttaggaaataactaagtgagcgccaagttttgaattgccttagagccgaaagagaatgtggcgtgctggggagagatctggacctctttctcatcagtcatttgacctgtccacgaagaacaattttgttatgcagcctgggaacctggtttccttacaccctgcgcccttaatgacacagacaaccacgggtactcctggacggaagctcatcacgcctcctcaaataccttcacccatgttcaggtcacacggaggtcaccatctcctcagcacacaacaactgctttggttcccagggttattttttctacgagttgaaaacccacggagcctaagccatctttttgtcccctaaggagagccccatagactaagagctacacttcctgtctgtctttcccacctttccatctcattctagcttaaagcttatcacgctactgagagcctgttctgtagttcaaggtggcagagaaaaatacgaaccttgagtgaaatctggagagcagtgcagggtcatccccagacgtgacgggccatatcctaggcgactcctgcagcttatagaagcagggaatttaatggacttcttccaggaaagccagcccacggggactcttaaaaagacaccaaccatttggaagatgcagcttgaggtctgggggactggactgattctgccaccatatagtgaacacgattaatcgggaggaagaagtaaggcactctgtgagttagtctaccaccctattgactttgacagagagaaaaccaacttttttcatatgatcacacagtagtactggaatatctcgactgcaatatcctctaaacaaatgcatgcaaagctttgtaaaagcagctgatgattaaaaaaattttaaaacattagggtttttctaatatatccatatgtgggacagtgatttaaatgtcattaattgtccagccacaacttgtaacagtgatgtgaaagacacaaaaaaggccccactggagtggaggagtggtctggctggtccccaagcaaaacagaatgggcttcgcataggctttagaacttattcataaatattgaccaaagtgtgaagcaaggtatccagtgaagattctctagggtctctacttctgctcaagagatttaatccagctttctctaaagcagtggtccagacttgccacatactaggttaaagataaagtgagaaaaacaaatactttggtttgcacgtctcttgaggggccctaggctgtatggaggaatatttagaggaatatttgtgagctgccatttgtgtttaaaagaacatgaaagcaagacgggccctaacccgcctgtgtctgtagctgaccaggaggccactgcttccttcccccagagcttctaggagagccccccaaaatgcaactctccaaggtcctgtggagtagtcccctcataatgcctccaccacacctgtgtctcacgatgccttaactgacgtagctcctaagtgatgttcacagagaaggaaatacttaggcaagcccatgtgtaacatgctcacagatgtgctggctttgccaatgctttcggactccaccatgctttctgattcttctggtcctagtcacgccttggcacggggcagaagcggccgagctatgctgacaggtgctgctgagagccaacagccattcagccgagaaggcgtttctaggtgagggcatgagagctggcattccaggctgctgagtgcggcatctgcaggtgcaccacattgctccacggtgtgttcagaagagaccagcatcttgaatctcaggctctgggctcattctttgcctctgccaagggaccattcaggggcttcaagccagctgctgaaaatcccccttttctggatttttccccatctatataaggatatggtggctgtgtggacaagaaattggtttcatctcagaagggtgcttccctacaaagatcttcagaaatttaattgaaaacaattttttgaactttttttgtttggccaggatgaatgaagctgaagtcacatcctgaatgtgcatgccagacaaagggtaagcaagcagtctttacaaatgccaatccctctgcactccaaaaccggagcccgtaatgaaggcccaggttccagtcatcacaggatcccccaagccagcacagtgcctgatgcctccctaggcattagcacatcccagcactctaattcacatcctcagcatccctgcctcctgcatccagggcttaggttgagtgtttccagagtgtcaagtacatttaaacacaaaccaaatactccagggttttgacctgtcacaatggcttttgaaaacaacagacgtacaatttgagagaaggactcgatggacttcttaggctgaggactaaggacatgttgctgttcctcttggtccaggacattcaataccattcacagcattcatcaccaactgacatagtatcgatcacgacattcaactgtttgaaattactgctattttggtcaaaaactaagaaatcagaaattgcacctacatagtgtgtctcctcattggagtcccatctctctgagcacagggatgggctcctgagctcacagccctgccctgcccccccagcagggcctcaccctcatggccctcagtgaatagtgactacatgaagggggcacttactagaggcctgagtaatggaatttcaattagcttctgcttcccttttctaaaaaagaaccacctttcttaagaataattaggccaaaataaacttgagtaatttgtacagtcaatattttgaagtttcggagttaccagtgaaatagcaaagctgttctccaggaaaggacatccaggttcccacccaggccttccttcctcagctcctgcagcctcatcctagtttaatatgaaggttgtgaatgggttaaaaagcagttcttaagcacctacttagatcttttcagtatctggaaatagcacccagggctgtgttagtaaagcttttcactgggtaagagtcatacaatttttacatttaatttgtttttttaaaacaaggcagtcttgttttacatattggaatgactagatattttttgacatttctggcacctctggttctgctgaattttaagggaggtgagtggtatgtacacaaagttaagattgctgcataataattcctttgcatttccaaaataaattacacaaatgtcacttttccttttctattccatagtactagttttagccagatctttgccaaacattctaggacattcagaaaagtcatccatggaattttggaatgccattctctctgtatctttgcagatcatgaggaaggaaagttgatgaactagtacgggatggctcagacttgtaaagtgtctaagtcacaacgctgcagagccagcttccgggtagcaatggcatggcctcagctgtgccaaggctacaactggagcttccttactcgcatctgaggcaaacacagcaaggctggcccaggccgcccacagtcaacagatgttcacgggagatggatcagcccctcttttgcttgttctatcaaggaaagagatctaaccatgggcaagggtggaacacacccggttcaggtcagggaatgagttgctctaagtgaacagtgaattcttacttctcagcctgtatcaattgtacccagggttcatgattactgtgacccactaagggatgatctttgaggaaacagacctggagggaggtaatttaaggagggaaagcgagtgggttttacagactgctttgtggcgacattcaggaacagaccattcaatggatgacttttcagtacataaaagcaagcagtaatggccaggagagagcaaagatgccctaagaatgacatcagactgaccaaatgtgccttttcaaataagttatgagaacgaatgaattggaattagagcaaggtattggacagaaccatgctagtctttgagagaacgtgtggattgggtggatgtttggaccgaatgaatggtaactttttaatgtgaaacagagaactgatatatgggctgtcatgtcaccctagggtactgtcgctctgtcatgtgtagcaatctttccaaatttttgttggtgggc

SEQ ID NO: 93892 - DNA, 27746 bp, Homo sapiens
aagtgtgacacacagagctacgtggagtctaagtagagcagctgaccacattttcatagagcagctgtgctgtgctgggggtacatatcagcccctggtcaccttggaacctccaaacctcaaaggcaggattggttaggttgcccaaacagcaaagatgacagcctgccccttccccagaagctctatactaaccctatacctgaaaactctgtcagctaaggaacaccagtggcggtacccaaaatccctgttgggagactccacccagtgatgaggagcagggtcagggatccacttaaaaaagcagtctgctcacacatttttgtaggactgctttgctgtgctgggctatcactttcaccccagtcatcttggactgttcaaagcctccaagttgaaattgctaagtcgcccaaacagcaaagatggcagcccacacctcttgcgagccctctcccagggtgttttcaaatctctagtggcgggagaacactgattgsggyggctagaagcccctgtttggaggtcccgcccaataggaaggaacaggatctggaacctgcttaaagaagcagtctggccaagtttaggtagagtagatttgcaacagctgagggattccttccacccgcccccggcccagttcatctggactctccaaagctcaaatggcagaacagctaagttgctcaaacagtaaaaatggcagtcctcactgcacactacccctctgcacccaacccccagctccatccccggtaggcacaacactgctaccatgactgtctggaattccaagccagtgggtcttatcctgtgaggtgttgtgagggtggcgcttgcaggtggccgcctgaattcaacctctttgctaggaatatggtcacattcctaacctcccactttgccagaactacagctacttttgccaggaagcccagaaagctggggtatctaaaactcccaggtctctacacatgcctgagctgctgctctgcctaaactccatgtagctctgtgtgtcacaattaaggccctggtggagtgggttcatgaggggacttcctgacccgagggttgcagagatctgtgggagaagcatgttacctggagttgcacattcactcatcacttccctggatcagggatgtttgcttggctctgcattgctcctggatggaccatcatcctgcttgctttcttttctttccttccttcctttctttctttctttctttctttctttctttctttctttctttctttctttctttctttctttctttctttctttcttccttgctttcttgcttgctttcttgctttcttgctttcttttcttgctttctttcttgtctttctttctttcttctttctttctttctttccttccttccttctttctttcttgctttctttcttttcttcctttcttcttcctttccttgttcaaaggtcatttattaataatttatttttgttgttgttcttcattgtatttgttttgtcttaagtttcaggatacatgtccaggatgtgcaggtttgttacataggtaaatatgtgccatggtggtttgctgcagctatcaacccatcaccgaagtattaagcccggaatgcattagctatttatcctgatgccctcccttccctatcccaacaggccccagtgtgtgttgttcccctccatgtgtccacgtgttctcattgttcagttctgacttataagtgaaaacatgtggtatttggttgtctgattctgtgttagtttgctgaggataatggcttcgagctgcatccatgtccctgcaatggacatgatctcattcttgtttatgtcttcatagtattccacagtgtatatgtaccacattttctttatccagtctatcattgatgggcatttgggttgattctatctctttgctattgtgcatagtgcagcaatgaacatatgtgtgcatgtatctttaaaatacaataatttatattctttgggtatatactcagtaactggattatgacaatattaaccttaaaagtaaatgggctaaatgccccaattaaaaaatactgaatgacaagctggataaagagtcaggacccatcagcatgctgtatgcaacagacccatctcacttgcaaagacacacataggctcaaaataaagggatggaagaaaatttaccaagcaaatagaaagcagaaagaagcaggtcttgctatcctaatttctgacaaaagagactttaaaccaaaaagatcaagaaagataaagaaggctattacataatggtaaagggttcaattcaacaagaagagctaactatcctaaatatatatgcacccaatacagaagcacccagactcatgaagcaagttcttagagacttacaaagagacttagactcccacacaataattgtgggagactttaacaccccactgtcaatattagacagagtttcaaaacagaaaattaacaacaatgttcaggacttgaactcaactctggatcaagtggacgtgacagatatctacataattcctcacccagagacaacagaatatacattgttctttgtaccgcattgcacttactctaaaatcaatcacagaaatggaagtaaaacactccttagcaaatgaaaataactgaaatcataataagcagtgtctccgaccacagcacaatcaaatcggaacctaagattaagaaactcacttaaaaccccacaactacagggaaattgaacaacctgctcttgaatgactcctgagtaagtaatgaaattaaggcagaaatcaagaagttctttcaaaccagtgagaacaaaaagacaatataacagaatctctgagatgcggctaaagcattgctaagcgggaaatttaaaggactaaattcccacatcaaaaagcttgacagtcctcaaattgacacatatatcgcaactaaaagaactagagagccaagtgcaaacaaaccccaaagctagcagaagacaagaaataactaagatcagagtggtgctgaaggagatagaaacatgaaaaactattcaaaaaatcaacaaatccaggagctgtttcttgaaaaaataaaataaaatagacagcagtctagactaataaagaggaaaagagagaagaatcaaatagacacaataaaaaatgataaaaggggatatgaccactgactccatagaaacacaaaccaccatcagagaatactataaacacttctatgcaaataaactagaaaatctagaagtagataaattccttgacacatacaccctcccaaagatgaactgagaataagatgagacctataacaagttctgaaatggaggcagtaataaataccctaccaatcaaccaaaaaaaaaaaaaagcccaaaatcaaatggattcatagctgtcttgtttttctccattctctgtgtatcagttgcttccttgattagtcccaatgcaagtatctgaatgtttcagctgaaggtgctgtatttactcactccatctgtttctctccacaagagccatgcatatgagctgcttctagttggccatcttgcccactcccccacttataataattttcaagagtatacctcatattaagtgattttgctaacacaagaaatacttctgagatgttgcagatttggttccaggctactacaataaagcaaaacatgcaataaagtgagtcacacaatttgttttggtttctctggcacataaaagttatgtttacacaatgctgcagtctattaattctgtggtagtattaagttcaaaaaaagtacacaccttaattaaaaacacttctttgctaaaagtagtaacactcatctcagccttcagtgagttgtaaacttttttcttcgtggagagtcttgcattaatgttgttggctactaactcatcagagtagtgactgctagtagttggcgtgactgtggcactttcttaagggtaagaaaacaatggcatatgccacatccactaacccttcttttcacaaaagatttctgtttagcatacatttttgtttgatagcaattttcccatagtggtacttctttcaaaactggaatcaatcctctgaaagtctaatgctgctttattaagtaaatttaagtcatattctaaatctattgttgtcatttcagcaatgttcacataatcttcaccaggagtagattcaatctcaagaaacaactttcttttctcttccataagaagtaactcctcatgtatttgttttatcacgagattgcagcagtttacttacgtcttcaagttccacttctaatttgagttatctttctatttccaccacatctgcagttatttcctccactgaagtctttgttatagggccaacaggttcatatgcccactctgcaataatagaccaattacaatgagacattatgttttgcaacaaagaaagagtataataattggagggcactgagaaggaagatagttggaggccctcaaacttacctcctcaaggaaatctgggctggagtttttaaggggttaatggagggtgatggactgaaaaattggagtcatagattagtcaggataatgaagataaaatcagtaggagttggaaactgcattctttggtgagtcagctccttgtggggtccttgagagcagctggcatcagggaggtccctcagaccagctgagtcagtagtttcatcagtatgctggacctgaaggaatacctcaaagagaaaaccacatttcaaaatgtttaagttattatctatagaacagttaagatgaactttaatcttgtaacaatgtctgcataattctaagacaatagccaaaaaactattaggaagcgagtcagagagcaagctaatgtaataattaatactgaatgtactacaggcttggtttacttttgtttttttttttcccctccctttgtccttcattaattcaacaaagtctataggaatagtttcatcttgaaactctctaaatcatacatgatggttgtaagaatcaacacgtaaatgctatatcataaatgaacctttaaaatattatgctaagtaaaataagccagccataaaatatcacatattgtgtgattccatgtatttaaaaaatgtccagaataggcaaatctatagagacagaaattcaagtagcagttgcccaggataggacaaatgcagaaagaaggggtagggagtaaaaggctaaagcttataggstttatttttaggagataagagttctctaaaattgactcttacggtagaagcacaattctgtgaatatactatgaaacattaaattttacacaataattgataatttgtatgatatctgaattatacgtcaacaaatttacaaaagtttttgaaccacatttagctattttatctttagttctgtgtcaaagagactgcaggaacatgagcctctcactgctactcttatgcacactattctgaaatatattacatgagtcaggtgatgagtccatccaagatcattgatattagctgaattacagcacttaaaaatctagggctgggtgcggtggctcacgcctgtaatcccagcactttgggaggccaaggagggcagatcacaaggtcaggggttcgagaccatcctgccgaatacagtgaaaccccatctctactaaaaatacagaaaaattagctgggtgcggtggcaggtgcctgtctgtagtcccagctactcaggaggctgaggcaggagagtggtgtgaacctgggaggaggagcttgcagtgagctctcaaaaaaaaaaaaatccaaaaagaacattaaacgcacttgtgtaaacaggtcatctaccttttatttgtctctttgtcatccacatgctcagactgttaatataatgtatttactttgaagtgtaaaagttacattttaacttcttgactgatttatactggatgtcaccatgagaaatgacagaaaggagcagcaactggaaaacaagcattgcattgcatcaggatgtctatgaaatggacttcagctcttctgctgatacagctgagctgttactttagctctgggagttgtggaaaggtgctggtgtggcccacagaattcagccactggatgaatataaagacaatcctggatgaacttgtccagagaggtcatgaggtgactgtattggcatcttcagcttccatttctttcgatcccaacagcccatctactcttaaatttgaagtttatcctgtatctttaactaaaactgagtttgaggatattatcaagcagctggttaagagatgggcagaacttccaaaagacacattttggtcatatttttcacaagtacaagaaatcatgtggacatttaatgacatacttagaaagttctgtaaggatatagtttcaaataagaaacttatgaagaaactacaggagtcaagatttgatgttgttcttgcagatgctgttttcccctttggtgagctgctggccgagttacttaaaataccctttgtctacagcctccgcttctctcctggctacgcaattgaaaagcatagtggaggacttctgttccctccttcctatgtgcctgttgttatgtcagaactaagtgaccaaatgactttcatagagagggtaaaaaatatgatctatgtgctttattttgaattttggttccaaatatttgacatgaagaagtgggatcagttctacagtgaagttctaggtaagtaacttttttgattggtaacatgaagatctaactttcttgtacctttgaagctgagtttgtataaagccataaagtcagggtagtggggtatttttgtaatraatttatcaaatgaaattgtaagatgatctaccaaactcacaagcactatagaaaatgtaaattataggatcagttaaaactctgtggccatcactcatacagaagactccaggaagtcataagcctgtatattagtgcacctaagatttctttaagcaatcacatatctgttttattatacattttttcatcttaaaaaaaagtcagacttattcagaaacatcttgctgaatgcatactggtagattgagtagttacacattttttagaactatctatataacattgcagaaattgttttttcttgtatatttcagtcttattatttagtaattgcaatatgtacccatgttactagaacgtttcctccacagttgagagaaatgatgtctccatttcagaatcaaaaaccaatgcatgttatttgaagtttccagtgtttctattccttcactaaaggattggaaaccatttattttaaggctaatcatcttgtcaaagtgtgaacattaagttacaactgtatagtttttttttgaaactatgtatctttmtttaaaaatatgagccaaattaaggttgaatgcaaatttctgtttcaacaagttctcaaaattttctagctgtaatttgcaaacatatttacctaaaaactaatattattatgaggttagcatgactcaaaagcagtagtaggtacaaggatttcagccatcatttcaaaataatcaacagttaacctgaagaaccaaagataaaagattagattaatgaatgggaaattagactatttgttagaaaattgtttttatgggtatggtagaattaattgatcacggagctcaaagagtggtttatacgtatatctgctactatcgaaggtttacaaaataaagaaatggagattaattctctatggcttgtttgtgattgtgaatatactgatgtgacatgagggatgcagttttccctcatgattctctcaccactttgcctttcttgtaaatacacatgggtaaaatatataatacataaaaattaaattatgcctatatacgaatatatgtattttttttcaaggcacaaacactttgcctacatttttgcccacattattctaacttctttcagaaaattacctagtttaattatcttgtgtcatctatcttttctttttttttcccccatcaggaagacccactacgttatctgagacaatggcaaaagctgacatatggcttattcgaaactactgggattttcaatttcctcacccactcttaccaaatgttgagttcgttggaggactccactgcaaacctgccaaacccctaccgaaggtaaactattactgtttgttttgtctgctttgaagtttcagtacgaatggttctatattcattcraagtgtttgacttacactggaagaaaggtggaagtgggaagagtaaagcagataccaattagaaactgacgtacatgttgatactatcacaagtttatgaatttcatcattattaccaataaagagggatactaaagagactttgaaaatagggttggtaaattaaagctttgattatgcaacatrtaagaaggtactggccattcattcaaagaatatttataaagagattagcacacaccacaggtacgtgtatgggacacagtttctatcccaayacacyttacattctattttgaaagatagaatatatgcaagtaataaaaactgtgtaaaaactgttatctccagagaaaaaccaatgctaaggaagcatccagtgtagataatagagagtatcctggagtcactgatattaataatttagatgagagctgaactatatgcaggaataggtaaaagaatgaagaagagaaaaaaacacaaaaagaaaagcaggtaaagtgttcaggacagttctcaagactcaaagtttagtttgcaaggaagatactgagtaagaatcagatgatgctgataggcaagataagagccagatactcctcaggagttgaaatatttattaagcacatttagggactactaaaaagagttaagaaaagaaaatatgggataagattatastttttaaaaaaagattccaagatgttcgatggattaaattgtggaagggccaaactagaaagagctgaccattgaggaaattttgtatgaattcaggtagcagatgatggaaaaatggactagaaagtggatagaawtacctatgcctacttttacagtaatatgactaacttcatattgtgttgtgtggaaaaaagttaatacaaataaaccacttaaaatgtctctggcatatagttagtgattcagaaatattattttgcaattatggttatttttgttattactaatactatgaattacttaacatgtgtaagtcacttgagatattattcctcatttaatagaaactaattattcagcatttcaagattatattctctaacaaagtcctatggtcttctatatgacagataccctgtagacttgtttaaaataagacatatcagttttgacagtaagatgagcaaaatgaaattgtaaaattctaccacaagtgacaaggatcttcatcagtattctaacttataagaaaataatcccttaccgatataaatgtgtgattctattagtatttgcagccagacccagtgttcacttgattttactaaagcatttaaatcattctgcgttgagatcccagaggtttacatcttagcataaacataccctattagagcaggtgttttctgccttaagacaagcaacccagtaaagcttcctgggatagcttgtgtctcaacatcataagtgcctgagaragaagcacagaaaaaatgaacaacgcatgtataataaagaccaaataatttctaccactcgtatctgaatcgtgccctcagtttacaataataaaagaattctgtcatcatataacattatattctttatggaggaatataagaatgtaatatattttaaattgatatcacccttctaagaaataggtagaaagtaagcatttttattacattatgtaatctcttaagagataatttttgcctacctccttattaacagcaacatgaaactgatattttattccatggttaaaatccaatatctatgttgaatgcaaattgtatgggctttatatggtaactttctaaagagacaaaagctgagataagactaatgaaaattctgtcccaccctatcctactcttgaaagatttccccactcacattaagggaaactgacagtgccagtaagagggagaagagagtacgaggtgtggaaggataagaaaaagattgagtcgtagtacatgtgataattactaatactagctgttgttactaacttgtagaaagctttgaatgcaagtcaatggttgtgaaagccattctctaattgtttatcatgtaaaataactgcaaacccaatttgctttctattcaattaaatattagattctcagataatttatgcatactttaagagaaaaggacacttggcaaatgtattaagtattaaaaatgcatatagccattggttttataatatattcacatgaaatcatacagagaaaaaataaatcaagatgtacatatttaatatttatggaaaatattcataaaataaacatcaaaagtaatcaaacatctgaaattaaggaataattaaaaacatatactagatgcatactatagcattacaataattttatcaataaaatattcagttacagtcagctataatacaagtaaagtgaggtagaaaattataaatattacaggctgacacgttttttgtaggaggaaaaggtatatacaatcagaataaaattgtctaaataaacgtcacaagtgtacattgaactataaagatagaacaaaagccatgatgaaaacatatgtagtttacaaggtgacatctctcgacaaaaattttagaaaaaaaattattttctttttagaacttgcactacttctataaaataccttacatacatagtgtattattattttaaagttgtcacagaatgggaaacaaccagtccacatcaataatgaatcccctttagggattatattactttaacactgggtggatgaaggcggctctggacatcaagccactgaaacaaaacactgaacgtaagttacatcaaatgtggctacaggtaactgcaattacgcacaakacctggatatcctatgtattaccttgaatagcagaacaatgactctaacatcattaacactgatgtcttaagattaaaaatcatattttaaaaaatgcttagccatatgtggtctgcaaataaacatttggaatcttttttctttgttttgtagagaacacttaagaaaaagttttaccccaatgattaaatctgaaagtatttaaatttcaaaattggcgtacattggggaacacaggtcagaatgattcccagtaaattccagccaagtacatcttcactaagatttttatgtagtgtgggtgatctactcaagaggktgaccaaatctctgcagaaagttctggcagtctctcgcattctggtgcaagtgctgctgcctctgagacacagcaaaatgatgatgagaattcctcacatgcagttataaatagcacatcaatttaacagtgtgatttcagggaaaaattgttccacttaaacaatcacctgaaaaatataatcattcgacyatgtaactacatactgtacgattctgtattacaaatgagaatacagaattatttatagaaatttatagaaattccaaaccacaacagcagactccataatgtcagtgattcttaaccaccaccttttacagctacttttttttctcttttgaaaaaagactggaaaactctgacaaactttaagtgaagtgtaaaggattatagaataagataaatgtaggtttacgtaatcccagctgtgagtaacttttcctcagtgctcagagtsagggaagtcaaccactaatgacttcaaactaaaataattctgtagaaaacctgcctaaaataagcatatgtgatttagcgagcaacaatatagcattaaagccaactggtgccactttaaagaacctatattagtacttataatatgataagtgaagagtttgggtatctcctcaaatactgtgtaataactctatttcatttctccctttcacaaacgcacacacatacacacacacatatttacacaaagacccttaacagaggcaacctatctcatattatacatattgcaaaaaaaactgagtaattgagtcagttaaaaaacatcctttactccaataattcctgataaaacttgattttctctctttttataacaattctttcacagtgcttgctgtgctgataatctattatgatagaacaaattcttttttttcacaggaaatggaagagtttgtccagagctctggagaaaatggtgttgtggtgttttctctggggtcgatggtcagtaacacrtcagaagaaagggccaatgtaattgcatcagcccttgccaagatcccacaaaaggtaagataaaatgttttaatggtgtaaaaaactactgaaagaggctgttaaagtttgtaaagaacccaattgtagaaacttcctgcctatatattcagctgttgggaaagcactaattatctcagatattaattcaaaatcaaaaatatgtatggaagatgataaactcatacagaaggtgtttttcattggtaattaatttggcattaatattgtgatcaggaataaatacaattaagagttgcaggtaaagttttggtattatcatgataytggggtcaggtaagagctatcaccaaattctgcccctgtgatttgatccttttgtttaagaactcctgagggcgatgtacatcctacagrtgttagaaaacgttacattttaatgagtaacttcactagcacaataacaatagcaggtatttcaaaaaggctgacatgcatcatgcagtttagtgttgccatgttacccagcctcgtgtacttcctgtacattttggaataggcctattcaagtgatattcagggtactattcagagaaaggaaggcctaggctgtcagacaactagtgtaaggatccrcagagctaggcagatttggagaaagagaaaaagcagcctgctttgctggactggacccagccaatgtctgaagtaggcagatgaaagagaaagggtrgagatggatcctgctctgagggtggaccctgtgtagtataaaatgtggccccacaaggacgctgcactatgagattaacaactcctcccaatggaggcagcagaaggaaatatagaaaggactcaagcagaaggaagccaggcaggggaacaggttcagatgccccctccatagaacatagtaggaacatattttcttttatatagaataaaatgtgtatttgtcaattactttttagttccctgcctgacatatccttcttgtaatgacctatgctaatattttgccaaaaactcaaagttactttaacactgatgtaacaaatagaacttaaacaccgtaaattatttttttttaatttataaggattccttgggggttccaaaattagtaacttaaacataaaaatgtctcagctatagcaaaacatacgaatcactgttgtcaaaattttgtagcacattttctaagtgttaacaatcaattgaccaaaattcagcaaaatgcaattttgaatttattcaagagttgtatttttatttatggtaccaacaggttccttatttctacattgacaaaatatccaaaattagcaatactgagaatactctgaatttgtgtcaaaaattgtcacttgaaatttttcttggaagtagttcttgataatttgtaatttccaagaagttatacatgctacctttgcagcattaattgacttcttccaagtagcttattttatagacttgcatttttgtcaatcaaaggacatcaaactctgttaaaatgacttatagataagtagatataagtgaactacttcccatattactcaaaaaaatgaataaattaatattaaatttggtagatgaaaactcataaaatacattaaaaargcatataggtcattagtaaattgttgttgctttttcacactagaattatgastacctaaaatttttaatgcatataattattaaaattttttatctttttaaaattaagttttattttttaacttttaatttcaagggtaaatgtggaggtttgttacacaggtaaacttatgtcttggggtttgttgtatggactgtttcatcttacaggtagtaagactagtaccttttagttatttttcctgatcctttctctcctcccaacccccaccctccaataagccccagtgtatgttattcctctctatatgttcatgtgttctcatsttttagcttccacttataagtgagggcatgtggtatttggatttctgttcctgtgtttgtttgctagggataatggactgcagctcacttatgttcctgaaaaatacatgatcttgttcttttttatggctacataatatttcatggtgaacatgtaccacattttctttattgaatccatcattgatgggcatttagattgatttcatgtctttgctatggtgaatagttttatatagagtaaaatgtatatttgtctgtagtaaacatacatgtgcatgttctaatttgcagtcctttagatacatacccagtaatgggattgctgggttgaatggtatttctgcctctaggattttgaggaatcgccatgctgtcttccacaatggttgaacttacagtcccttcaacagagtataagcatttctttttctatacaacatcacaagcatctgttattttttgagtttttaataatggccattctgactggtgtgagatggtwtctctttgtggatttraccagtgatgtaaacctttttttcatatagtggtttgccacatatakttttcttttgaaaagtgtaacaactttttaaatacttgaacttttcattgattatcttatttgtctaagctactattttgaaaaatcatgatttccttatatacctaattatgaaattaaggaaatgaaatatgagtattctatttacatcagtctgagtagttcttgttacttaacatcccttgttcttctcattgttaatctctttagatttctaacattctatgacttttgagttccactcatggaataagatattttcttcactgtaacaggttctgtggagatttgatgggaataaaccagatactttaggactcaatactcggctgtacaagtggataccccagaatgatcttcttggtaagtctctgaagaacaaatactgaatatattagtaacagattattaaagtgttaatagytatcatgaaacaagcttactgaacatttgttatggaaaaacttaaaatgaaacttctttatatttattttccagtcccgggggaaaagaataaatgataattgttggcattttatgatatgcacccacattctttacaatcagagtcagagtatctttatttcaggtgttattacctcccacagaatttttctggcacttcctgggttgtcttcctttctcatatttctacaactttacacctgttctttcctcctctgtagggttatttcaaatgtcactaaaagtaacagctcttctgctatcaccagggatgctgcattttctgtaggattaaatccctaatcttaatcaaaaagtgatgacacatttcataatgaaatgtgacctgtctttcctcaattctagcaccaccaccacctcactgcctgctgccttgcacaccctacatatcacactccgtgactgtacttaagagaacacattctggctgggcacggtggctcacgcctgcaatcctagcactttgggaggctgatgcaggtggattgactgagctcaggagttcaagaccatcctgggcaacatggtgaaactctgtctctattaaaatacaaaaaattaactgggcatggctgtttgtccctgcagtcccagctactcagaaggctgagtaggagaactgcctgaacccaggagatggaggttgcagtgagccgagattgcaccactgcactccaccctgggcaacagagggagactccgtctccattaaaagcaaaaaacaaaaaacaaaaaaacaagaacacattctttcatgtccatcccttttctgtgctttttttcttttctgcacatgatgtttccttatctaaattgcacctttttgttagttcaactggtaatcttgtattaattttttcagtctgaagttaaacacaccacatagccttcacttacatctccagcagaagtaggsgttccttcctctgaagtctcaaaaacaattttaattcagttcagtgtgttatctaggaaacaccgtcacattcagattcttccattgtgcatttctcattttattcctatgaataattttgctaaaattcatccaatcctaggtcacccaaaaaccagagcttttataactcatggtggagccaatggcatctatgaggcaatctaccatggaatccctatggtgggcgttccattgtttgcagatcaacctgataacattgcacacatgaaggccaagggagcagctgttagtttggacttccacacaatgtcgagtacagacttactcaatgcactgaagacagtaattaatgatcctttgtgagtataactttttttttactcggtggtctttatagataggttcccttgtgaatagtgagtatgacttttatcctttttataagcgactgatttcgaaagaatttaagtgatttaaacaatctgaaatctgcttttatttttgagtggttatttaaaaattttatttgaaccacatacatttaatgaataatcaattattgaaataattttctacacaaaaataattttaaagtgatatagataagaagacattttaaaataaatttgacgtaatcaatccacagtagaaaggaaagataaacttgacgtaatataataaaatattttaattcaatatctaaaatgtctcaaagtatatctgttttctcactgaaaaatttatttttattatcattattgtaacagacttgataattaaatttaatttccatagcataaaaccgacctatttaagtrtaaaatccaaatatatttagtakgcttacagtcatgaagccatcaccatcatataattttagaacatttgtatcaacgtaaaagaagccataatggtatagaagtcactttgcatgaccccttagccctaggctaacaccaatttgctttccttctctatagattattctctctacatatttcatataaactgaatcatataatttatgatgtgtaaatgacttcttttaccaagtacagtttttgttgtttttttatggtttttagctttatttatattgtgtgtattaatagttcatttatttttgcagcaatatattttataatatgggtatgccatattttatttgtctctttattagctcattcaccttttgattgtttccagttgtggctattaggagcattgctacatgtttttgcatgaacgtgatttcatttcttttgggtagatactagamgtggaatttctggctcttgtaggaactgtgtgtttatgaaaattgccaaactgttttccaaatgcttgttccatttgtcattaccaccagcagtacaggagggttccagttcatccacattgttgccaacacctgttattatttgtctttttgttataccattcttggtgggtgtaaaaagacctctcattgtagccttggattgcattttgattatggccagagatgttgatgttctttatatgtggttactgaccatgcatatacattctttggaaaaatgtctattttaatytttgaaacattttaaaactttgatatttgtcttattattgagttttatataagaactatttatgtattatggatacaatcccatatgagatatataatttataaatatttcgtctcgttcttggtgcactaacattttacatttttgatgatggtctttgaagcacacaaattttatttttagtgagtaaaatttttgataattgattttttcatactccaaagaaagcaatgcgcaaaatgccttgcccaacccagctactatcaattcagcattcataactactattaataatgtttttatgtaaaaggggcttcacctaaaggaatactttaaaagtactttatcacaaagaaaatagaaggataatgaatgataaagctacctttaaagaatacaggaaataattggaaaagaaacataaaacaggttagacaaatagaaaagaaatataaaataaggtagtagatttaaatgtgaatatacagatacttccattaaatctaaactgacctgaaaaataagaccaaataatgagtaaggacataaaacawytgaagaacacaattaacaattgtaatgttgtaatgtaacataacacacacacacatatataactcatacatatgtattctatatatcaactggaaggcatagttttctagagcatgttgagtaggtaatagttatttgaagttacatggggagggtcataaatcaagattcagtatgtatgaaaagattyaatatcataaagagtataagatccagccatagtgaatgtgagaaattataaaaatgataactaaaaaatctttaaattttgaatattaaatacactttagaatattttaaagtaaaaaagtaaatcataattatgcacacacttttatttcaacaattccactctcaattatwtaggaaaatatatgtataaatttgtaagcctattgctatatacaagaatgtttatgacagaattattaatagtgtccagaaattgttggcactcaaatgtctattgattataaactaaaaagataatctgtggtattctcaatcaatgaaatactacacagcaacagaattaaaccaacaactgctacattaaaaaaaaaagacactttgggaggctgaggcaggtggatcacgatgtcaggagttcgagacaagcctgaygaacatggtgaaaaccttgtctctgctaaaaatactaaaattagccaagcatggtggtgcgcacctgtaatcccagctactcaggaggctgaggcaggaatattacttgaacctgggaggtggaggttgcagtgagccgagatcatgccactgcactccagactaggtgacagagtgagactccatctcaaaaaaaggaaaaaaaaaggagtatatattacataattaatttaattacataagcaagtaaagctgaagtatgacctttgaagtcaggttaatacttaattggaggacaaaagcagtgactaaaatggtccaggaaaagagagttcttctaagaagattctgataccctctatcatgatctgagagatagtggtatcttcacttcgaaataatgtttaagatgatcttaccttattgggctgtttcacttagygtatgtacacttatgttatgtgttttatgcttaaatgtgtattttagaagacgtacaatgtattttaagattataggaatcaaataagttcaaaataagcacaaaaagtagaggaaatcctaggggttctatcatagtgtggccaggaaaagcctctcttattggtaacatttagagggttgcctcaaaaagagatagaagcatgccttgagttgttgcaagaaagaatactccaagtgtgggtagaggggacgcaatgtgtaagatgctaggacaggagcttaaagaaaaatataaggccaatgtccctagaagacctagtgtgcatgggaaagtggagaagagcttgccagtgtctgataatgcaggatcctgaggaccaaataacagagttggattttattcttgatatgatgaaaagtcaggcaaaagtcttaatcaggggagtatcacaatctgacttttatttcaaaaataatcattctggctactgcgtgggaaacagtaggacacaaagagtagaatagaagcagagcatgtggctatgaggcatttcacccacatgacacaattcctctttagaaacttaaagatgataattctcaaattgtattttaaggtgtatatcttttaccacttaaaacggctcatgatgctgaccatgattttatacgcctgctggagaactaaaggagtgtaactggatatttcataacacaaagataaatgcttaagcartgggtagcctttcttcatgatgtgattatttcacrctgcwgcctgtatcraaacatctcatgcacctcatagaaaaatacccctactatgtaaccacaaaaactaaaaattaaaagaaaataaaattgctcatatgttctctgcctcaaataattaactttctcacctgaccctccattkttactttaaaaatatttgtcaattatgaaattccaatttaaaagccaaactttctatgatgactcaaattaaaatacacacattctatgtcaattctatgacatttactttgaatgatctggcactttaaaaacctttcgtggacttgatgtgctcaggcaaattaacttaccttctctttttttgagagggaagtctcactctgtcaccaggctggagtgcagtggtgtgattgtggctcactgcaacttccgcctcttgggttcaagcgattctcctgcctcagcctctcaagtagctgggactacaggcacatgccaccacgcctgggtaatctttttttttttttttttttttttttcatatttttactggagacggggtgacggggtttcaccgtgttagccaggatggtcttgatctcctgacctcgtgatccgcccgcctcgacctcggaaagtgctgggattgcaggtgtgagcctccgtgcttggccaaattaacttactttcaatgttgatacttttctgcttatcgtttagatataaagagaatgctatgaaattatcaagaattcatcatgatcaaccagtgaagccccttgaaagagcagtcttctggattgaatttgtcatgcgccataaaggagccaagcaccttcgggttgcagcccacgacctcacctggttccagtaccactctttggatgtgactgggttcctgctggcctgtgtggcaactgtgatattcatcatcacaaaatgtctgttttgtgtctggaagtttgttagaacaggaaagaaggggaaaagagattaattacgtctgaggctggaagctgggaaacccaataaatgaactcctttagtttattacaacaagaagacgttgtgatacaagagattcctttcttcttgtgacaaaacatctttcaaaacttaccttgtcaagtcaaaatttgttttagtacctgtttaaccattagaaatatttcatgtcaaggaggaaaacattagggaaaacaaaaatgatataaagccataygaggttatattgaaatgtattgagcttatattgaaatttattgttccaattcacaggttacatgaaaaamaatttactaagcttaactacatgtcacacattgtacatggaaacaagaacattaagaagtccactgacagtatcagtactgttttgcaaatactcagcatactttggatccatttcatgcaggattgtgttgttttaactgttgttgaggaarctaataaataattaaattgtatagaaagtctcttcctcttgatattttgagatgattagtgctgcttggcttttattgtgcatcgtgcttcaacgtcattttttttcctaaaaggtatgataaaaatgcttaccattttagagcttaagtcatttcccagtgaaaagtatgtggaattagaaatatagcaactcctacctggtttctactacaaaatgaactaattttacaatgcgtttggttttttgagccaattctatttttctgttcatttgaaaatattcatctttttttattctttgttttttaggtatttcaatagcttttgggtgacaactggtttttggttacatggataagctctttagtggtgatttttcagattttggtgcactcattactcaagaagtatacactgtacccagtgtgtactgttttatccctcacatccctcctacccttccctctgagttccaagagtccattatatcattcttatgcctctatgtcctaatagcttaggtcccccttataagtgagaacatacattgtttggttttatatttctgaattacttcacttagaataatggtctccaactccatccaggtttattttgtccattttgatggctgagtagtgtatatatatatatataatatatgtgtgtgtatatatatatattccccaactagtggctaaagtaaatgtgatatttatatataatatatattagatatatataattatatatgtatgtgtatatatatataattatatatgtatgtgtatacaaacacacacacacacacacacacacacacatatatatatatatatatctcacattttctttatccacccattgactgatgggaatctaggctggttccacagttttgcaattgtgaattgtgctgctataaacatgtgtgtatatgggtctttttcatataatgacttattttcctctagatagatgtccagcagtggaattgctggatcaaatggcagttctacttttagttatttaagggatatccatattgtttgccatagtggttgtactagcttgcattcccaccagcagtgtaaatgtgttcccttattactaccatgccaacatctattatttttggatttttaaactatggccattcaccatttgtatatcttcttttgtaaattgtctattcatgtccttaagtcacattttgagggattatttgtttttgtcttgctgatttgtttcagcactctgtagattgtggatattagtcttttgtgggatgtgtagtttgtgaagattttctctaactctgtgagttatctgtttactttgctgattatctctttcgctgttcagaagctgtttagtgtaattgagttccatctatttaactttgttttggttgcctttgcttttgggttcttggtcatgaagtctttgcctaaacaaatgtctagaacagtttttatgatgctatcttctacaatttttatacttccaggtcttagatttaattatttgattcatcttgagttgatctttgtataaggtgagagatgagtatccaatttcattcttctacatgtggcttgccaattatcccagcaccatttgttgaataggttttcctttccccattttatgtttttgtttgctttgtcaaagactagttggctataagtatttagttttatttctgaattctctattctgtttcattggtctacatgcctgtttttataccagtaccatgctgttttgttaactatagccttgtagtatagtttgaagtcaggtaatgtgacacttccagatgtgtgttttttttgttgttgttgtttgtttttttgcttagtcttacttgggctatgtggacatcaaagctgagaatcaaataaaaacctcaacccctattaaagcatctgcaataataataataataataaaataaatacttacaaatatacttaaccaagaaggtgaaagttctccacaaagaagaccacaaaacacttctgaaataaatcatagatgatgcaaacaaatggaaacacatcctgtgttcatttgtggcttgaataaatattgtgaaaaagaccatactaccaaaagcaatctataaattcaatgtaatttccattaaaataccatcatctttattcacagaaccaaaaaaaaattctaaatttcttgtgggttctattctcatttttcacctttaatgacaaatgttaagttcttaatttttggttgtaataatataggaatttcattatgaagggattaagtgtatttttaatcttgctaaacatacatgtacatatacatgtccatttttttaaaataagacactgcatcatttagttacctaatagataggtggtaaaattcaatgtgtttattgaagacagtttgaaataataattatattccacatactatacttcaaataatcatctctaatttttctctttttccacagggtcttttgatccatttcttctctaaatataaaatagaagcatgaaatcttttaggatgacaaaaagtgtacaaagtatacaatgagtttataaattttgtggaaaatagctaaatcaagccataaaccttctttaatatacacatcagggaagcactttatgataaaagtggtccagatggacaaaaacttagttgtctttgctggtaagaagccttactatttactaattatcacacaagtattctccagtctaaggaatgatttaaatataaatattatatatatatatttcactacatatgtatatatatttatatatgtatatataaatcatgactatatatatatatatatacacacacacacagtataacattgatgctagagaaattataggaaaagtttataacagaatatttcatagaaatcatccaggaactgatacatatataaagaaacacagaactaatatagtgccaaaggttaataatgttgttttatcatgcttataaacctctgcttatttacattaaacctatcctacaacacatgtaacaatagattggtttccattgtttagtgacaactacaaaacaacaaccaaaaaagacaaacaaatctaataaaaagttgatgaaagtatgaataggtaattcaaagtaaaaatggcaaataacatatcaaagatgataaagttactgatgctcaattaaatagaaataatgccaataaattattgctataaaaacctcaaatagaagagtcagcataacatggtggttaagagctggcactctgaattcaggtcaccttgattcaaatctccgagaaatcactaaataatggtgtgggttggacaaggtatttaaactttatttgcttcagctttctcaccaatgaaatggcaatgttggtcacagtattatctacctcaggggttgctgaaagaagggattcactaatattgtaaagtactagaaacaattttgtatacatcaaaataaaatttgcactcttataattaaataaaaaaatttccacaacaagtttactgttcataaaattgcgtagtacaggctaggcatggtggctcacacctgtaattccagcactttgagagaccaaagttggtgcatcacaaggtcaagaggtcaagaacatcctggccaacatagtgaaaccccatccttactaaaaatacaaaaattaggtgcgcatgctggagtgtgcctgcagtcctagctactcaggaggctgagacaggagaatcgcttgaaccccaggagtcgaaggttgcagtgagctgagatcacgccactgcactctagcctggtgacagagtgagactctgtcaagaaaaaaaaaaaaaaaaagtaaaccaacagatacacaaaaaacatagtaccatttgaaaacatgatgtgtttgtaatgtaaataataaaaatgacataatttactatttcaaatatgtgggaattaaatttatagcataaaacaagggctaacaaactatggccttttggtcaaatctggccatccacttgtgttcttttttaaataattggttaaaaatttttatgccacaaaattaaacactttaaccatttaatgtgtacaattcattggcgtttaatatatttgcaatattttgccactaccaccactctctagatccaaagtattttgtcacttcaaaaggaagctttatacccattagacagtcatctcgcattctcccatcctccatctcctgcaacctggcattatctgttggcatcattctatagcctagtagataatgtttttttaaaggcaaataggtacataacttcaacaaagtgttttatttttctttatttttacatctcctatttgttcctaaatgaaaattctgtgatgtataagaattagttattatttcctagttgctctgttattaaatatattcagcagtgttgtgatttatattgttacagtttctgtccaattttgtattgaagtctgtccctttagaattgcaataaaccaagctctgatggaggtgaggaagtgaaattcagatgtgtgtgtcaggtaaaatacaatgaaatgtaaaataaaaccaaaatgcatgaaatagaagaaatgtattacagttcctagagatattaaggataatgacataaaacggacagaaaattcagaagtggcagagagctcaaccagctgcctggaagtgatagagagaatccctgtgtggggggctgtgggggtgcttttcttaaggtctatgagcattatttcctagtcttgtctgccggagttgtggagtggctatcttaagaaaacacacatgaagagggaaaattattatttgattctggtgttgaccattaggttatctcatggtaatcagctctgtggtatgttgcatttctgggtcagtgggatgagaaacaagtgtactctgtaacaaacaactacacaaggaagggaagtttcacaaagccaaaagtgacaggctatgacttgctcttaaacaactcaagttaagtctaaaaatggatgtggaatcaataactatattcaacaaatgtatgacaagaaggtagaaaagggatggatccagcaggacccaggagacagcccaaagactgtgagtgcccaaactgtgaaagtgggaaaggagatcatctgcctttgaacacacacccttaccaggaaacctaaagtttcagaccacagaagttgacctgacctggarctgagtcaattagagagcagagtgaaatacaggggtacaggaagcagcgggaaaagccctgtggattctctgggtttccagggaagccatttctgtcttgtctcacaggggtccttggggagggctgccagaggaactgggaaaagaccacagggagaaggaaacctccagctgaactttgcaacaattccaatagaatgcaaaatctcctggtcagaactccagagagtatgtgaattggtgtgtagactcaacaggtggggaggtgtgaacaccctgcttgctttctcagctgggaggctggtagcctggagcaagctctcagccctgctcacccattgactagaaataaagttggtgctgttggtaagcgcatggtggaagtgagaccggtctattgggttgcatgggtgctgggtgaggcctgtaactgtcagctttcccccactttcctgacaacctgcatgacatagcagaggaagccataatccttctgggattataactctattgacctgggaaccacacccccaacacccacagcagctactacatcaagggaacaccctatgagacaaaagaatctgaacagcagccttgagccctagatcttccatctgacatagtctacccaaaagagaagaaaccagaaaaacaattctggtaatatgacaaaacaaggttctttaccaccctcaaaaatcacactagctcaccagcaatggatataaaccaaaaagaaatcctacctgttgtattagtgtggcctggaaatgggacatgga

SEQ ID NO: 93893 - DNA, 77349 bp, Homo sapiens
  misc_feature (1)...(77349): n = A,T,C or G
tatttatggcaaagatcaatcaaaccacccactttcatcatcatgaatcaggaaaatatatatatataaataaataaaaataaagacattttaatttttaaaacttttttcataataatacaataattgtttgtttcataagtttgagggatattaattgctcatacttattcataacaatctcaagattactaattattgtcaatcttattttagatatatcctggcatacttggttagttggggtaggggcagagaccatgatagtaaatgcaaaattcagggcaaatagttgctagggaaccaacagaaggttacacctttgacaaaaggttaatctgcttcacagtgtagtgggtggaaaatgttaagagtataaacaactttacataatcttttttccatttaagatcatattactcattatattatgcttatccacctaggatttatttacattcggcttcttcctaatgtcaaatgagtgctgttaaagttcctccaggaaacttcaggtaagaaactagaaaacttcatgataatcaatataaaatgtatattttaatttattttccattctcttcttaaagaaatatcaatctttaaaacgctggtttaccttttggtttgtttcattgcttacccatgaaagcattattagttctactttataatttsatggatttttctcccagattttatacttcaaaataattttacagatatcgagggaactgtgtggacagagcagtaagttgagagttttgtctaagtgtgaactcaaagtcctctttagggattcttctcatgccttttgttcctaccagtggagagttgtttgttccttcattagatgacacataaagtgacaaataagaaactttatactgatatatggtgaagacaagaataatgtacacaagtgaccactgtggtccttaagacaacacatgaatgagaggatgtgagatgtcatctttagtgggtattttattttcttaatattgtttaatggatttttaaatatttattttaaaatctatttactttaaatataagtcaaatgttttatgctataaatcaaataagttttatgcaaaatcaattttatttattaaaaaaagaaaataatggccaggcgcggtggctcacccctgtaatcccagcactttgggaggccgaggagggtggatcacctctggtcagaagttcaagaccaggtgaaaccccgtctctactaaatatacaaaaattagacaggtgtggtggtggtcgcctataatcccagctactcgggaggctgaggcaggagaatagcttgaacccgggaaatggaggttgcagtgacccgagattatgcccttgcactccagcttggacaacaagagcaaaacttggtctcaaaaaaaaaaaaaaaaaaggacataaagtttttctaaagaaaatgctgttgtaaaagcaataaccaattgtgttaatgtgaatgccatgctaactccttttgtatgcagttgttaaccagtagaaggcatctgagttatcagtggcgaatccttacaggtctgaagcaacttcaattcttgcctcctcagaagtaagaatttgactggggggcatcaggcagatgagactgacgggagtttcagagcaggagcggaagtttattttaaaggctttagaacaggaaagaaaggaaaacttacttggaagagactcaagtgggcacctgaagtgccccgtttaacctcgatcctaggactttataggctcgcctcttttccatgattcttcccttagggtgggctgcccacatgtgcagtgcccttcttacccttgggaaatgagcatgcacagtctgtttaggaagttgtatatatgctcatctgaggctttcttcccttttttggtaaagtgtccttggatggtcacacttcaacattttgtctcttaatgcacgtgcccaggcagtcgctcctctctggcatctgcattcaattaacactttaatgttaacagctgtggatcataaagagcttgtctctccctggcactactggctgcaaaattctcatttttagagaggcagtgtgataatcatggaactgtcacctgacattcctaatgcctatctaattacctgtaacacaattaagcaaagtatatattttattatcattctctaagatgaaaatatttgagtatgctagcttcttctgaaatacgttagtttttttctctgaattcatgagctttcacaaatatagtaatcatattacacagtttatttttatttttaattttatgtgcacataatatatataggtatatatttatgacatatttgtgatgttttgatacaggcatacaatgtgtttctttcaaaatttttctggcaagggcagattagcttttcagtgattttaagatcagagtaattacaaacacaaattcagacccacattttaggccaaatctttttacttaacaacctctttaagccttttgttgtgaatataacttcatttagttttctattaaattcgaaaatacaaatcaatctaaaatttaacctcactagtgtgagaaattttttaatactgatcatatttctgaggtatttatgctgtatcagcacatcacatgtatcacatgaatttatgcgtctattatgtactccacaaaaattaaaatagaaaacatttaaaaacactaaagttcattagtggcataacagcaattgcctttttgcgcactgcttgtcatgcacatccaggtagcctatacttcagcatgaatatcaaatatcatacctttcatgaagactttcctatcctccaccctaccgttaatccccccaaaaagctggaagtaatctctacagatctctgaaaacactttacttatgtcatttcgtctgaaggcccttgttaatttctctagggaagagaaagagaagggattacatgaaaaagatagtatatttttaaacatcacttttactccaggtaatatacttgttgcttaataaatacaattgtatctatttaaatatatagttttcttatatgtggtatgtattattacataataatttatggtattttttgtatattcatttttaatttattaacagatatgttgtttattttattttattactttatattctcaaactcaagttgtttttaattttcattttatatatgagaaaattgagtctaataaatattaagcagcataatgtgaagctaggattctttggcctaatttattctaaaatctaaattatgtttttaatatcttgctgactataatgtactacagtgatttttgtcacagatatgtatgtatttttcttatcttccactgatagactataaaattaatatgagaaagatctcctggattcctcttctacctagtaggtactgctgtgtgtgaatagtaggtacccaataaacacatagtgaagcagcccagggtcactggagcagtctccctatctgaggtattactcaagagttctttgtcttaggaccaagaaaattaatgagcgtggacatcaaaggtgaggttggagtgaaagtttaataagtgaaaggggaaagttttccacagcagagagggggcccaagaggattgccatttctcagttgaatacaaaggcttttataaacaagccagtggggtggggtgtttaattttcatatggcacacaaaaaaagatttttatttgcaaaggtgtgaatttctcacaactccacccactccctctcatgcacatgcaggcccttaacctgagttactccttattaccctgtttccttactgcgcatgtgtcaggagatggacttttccattacagacatgtctggttctgtgtaactaatcttatctgtgcacctccaggcatgttgtaggcaagccccactgtgtaagttattttatctgattatgtccaaaaaaggaaagaaacatgctcactgaagcccacagcgtgtatatgtatatgtatatgtcttttgctggttacaaaagacaagggtgttttagggtcgaccttgcctgtttatctgtgcttgaaggttgtgcagcttcaggctgcccttttgttaaaaagaattttaccaacggaccttgttctaactatctgcctaactggtttcttgctttctcctctctcaatagcacctgaataaaatactatattttagttgtctaaaactggacctgattccctgccaataaataaatagaagaaaataacatcagtgaatcatgacatcctagtgaatcatgacaattattttaaagtttcttgccaagtcactatgaaccagactgacaccagaaaggcaaaaattttgtgcacaccataacatcttctgcagagaaacttcaatggaaatacactcaaggaattttatgattactctgttaaactttgaacagtactttataaaagtaattgttttaatgaaacagttgatgtttccatacagattatctttggtgatgggagagcttagaagagacatttttatgatattactaaaaatatagaatttataatttcagaagatttattaacttgaaaaggatcactctgcttattcacagacatatgcatacaaacataatattttcacagagatcgctttacttgaattacttgatccgatattatccaatgtgcgttacacaattttgtattgtgttagcatgcttttggcaggctgctattcatatggattccttagttggtaaggggacgtgatacattttgatgtggcaatctatcccagtggttaatacaataggctgtgggagtcagagatccttaagactgctaccagcagttcctatcttttatttattcttatttttatagatttaggggttcaagtgcagttgtcctgtttgggtacattgtgtagtggtgaaatctgaggttttagtatacccatcactcaagtagtgtacactgtatttccattgtacccaataagtaatattttcttattttgctgtaggaacatggcaaattattcaatctctttggacagtggtttctttttctttgatgtgggagtaattataaaagatccataattggataatttttaaaataaggaagaaatgaaattaacgtgttaaagagtttgcgtaatgtctgacataacaaggacttaataaacgctagcagttgttgaaggctgaatctagatgtcaagtagctgtttttcatgcaggctagatagtttttgaacagcacttttggtagatgtatgcttgacttagtaattctcttaaatagctcctattcactactagcattacctataatctcttgcacatattttattttattcatttatttataatattttcttgatgattaacataaactatttttgtaaacatattactaaagtagtaatataatactatatgtgttatacatattatttataagtattatttgaatttataaatatttgaatttataaatatttatagtaatatatttatacatattatttgacaatcttatatattgtaactgttattataatgtttaattgtgataaatggaattatattcatgcattaaaaatttaaaaacttacagcattaacatctttaaatttctgaatgagttttggtcctatctgaggtttcaatacctaggcctgaatgtagagttgagatatacagaagctttatccaatttaatagtaaaaatgtaacaattatgaaacacacaaaaaagggttggagtatcaagttcaaaaggaggattagacagcaggaatcataactaaaacactaaaattaaaacaacagatttgagaagtaagacacattacctataaatctgtaaatatcctaaaatatggagctactatgactagtatcactttctagaaagaaggcttttaaggatattaatggtttgcctcaaaattgagaaataattttgtctttcctttttttctttaaaagcagagaaaaacatttgcttcacatctcatcaaatcttctgcatcaagccacatcatgttaaacaaccttctgctgttctcccttcagataagtctcataggaaccactcttggtgggaatgttttgatttggccaatggaaggtagtcattggctaaatgttaagataattatagatgagctcattaaaaaggagcataatgtgactgtcctagttgcctctggtgcacttttcatcacaccaacctctaacccatctctgacatttgaaatatatarggtgccctttggcaaagaaagaatagaaggagtaattaaggacttcgttttgacatggctggaaaatagaccatctccttcaaccatttggagattctatcaggagatggccaaagtaatcaaggacttccacatggtgtctcaggagatctgtgatggcgttcttaaaaaccaacagctgatggcaaagctaaagaaaagcaagtttgaagtcctggtgtctgatccagtatttccttgtggcgatatagtagctttaaaacttggaattccatttatgtactccttgaggttttctccagcctcaacagtggaaaagcactgtgggaaggtaccataccctccttcctatgttcctgctgttttatcagaactcaccgaccaaatgtctttcactgacagaataagaaatttcatctcctaccacctacaggactacatgtttgaaactctttggaaatcatgggattcatactatagtaaagctttaggtatgtaacaaattttgtttttattacttgaatttgaacaaacagacctttgtagagcctcttctttatttccctatgtctattcttttttaattccaagtattgatgtactatatattactatcacttgatagcagaaaagaagataaaagacattgtacttcagaagtacagtgtgttgttttctaattgcatggacttaaatatatcaattcagttcttttatggataaaatatagtgacaaatacttcaatttaaaagttgggctggatctcatgtagataattatgctcaaaatagaaattgcctagaaactgcagtgatgtgtggagaaagccggaaaatgttaaactttccacaagcttattattaatacagacattaatatgcacgtttaagaacatacatatatgtggataatctctgatcatcacttaataaatattaaggctcataaagaaacaaaatacattaaggctttatcacctttaattgtaaggtgtgaactacaaccattgatcagggtgatttatccatgctaagcttatttaatttgcttaagtgtgatatggtgtttacctgatgaatacaatataatcaatggtactagaataaaagcctatattgatcatgttgatacatttatacacatatttgtctaaaaatcaaacaggccttgcccattttttatgcttttgaattttatcatttattcttcattaattatagatttcttactctttactaagcactcttttagataggaagactaaaataaagtccatggattcaaggatttcacaaacagataaatcagacattaaaaggaatatttattatgtgaattatgtaaatatggaaatatatacaaaatacaaaatgtagaggagttaggtattatgcgacagacagagtgagttattctgaaaaacttcagagttcagataatgcataaggatattttaaaatactgaatgtgagtttttctgcaaggtaagaatggggaaggaaaagtgtgctcaaagttgaagacaaaacagcacaggtgcgatggatatttctgataatttagtatttctgaaggttcaagtgtaaggtagggagacatggaggaagatgctaatgacgtcggaaccgcaagaatgagtgaattaattcaatgaatatttcaaagtctcctgtatgtcattctaaaaacattttaatctaataagcaattsaggaccatctaaagggaaatattatgacctgattttcattttacgtaaaacacttggacagatgtggcagtagagttgagaggtgtgagactagactaatgtatcactctaggaaagatgtggtaggagcctgccctacagaagtagctgataaatggaggaaaataatgcagtatgagactacctagcaacacaattgggagagcaggtgcttacaggcaacatccacatagcagtctgtggctgggaaaagtaattcagtctccttgcacctgaacttcatttatctcatctctgacagggctactaaaaggactaaattagtttacatctgaaaggattttagaatagtgtggcccaatcaaccctgatagcgaatatgggagagtaaaaattaatattgcattgaattttggacatgctgtgtatgtgatacttttgggaatatttggcgaaatccagtaagcagctggatatacgggatgagatctcagaggtaatctcatgggttattaacattgacacattaatttgtgtgcattcgttactgataacaaagtaataatgcacagactgcagagactgtaatgtttgctaagcagagcttgtaaggcctagagatgtttactagctaatgaatgaacatcctaaatgctattaaaaataatttaaagatgacgaagtgcactgtgtaaaacagtgggttgcgtgaatgttggcaaaagaaaaagtgagatttctgtgtagtgatacctactgacacattagcttcttttctacagatctctgttctaaaacaactgtaaagttgatatgtatcaatcaaaataaatatgcataggttagtatgtgaatgaggatgtgagatactacagccatgtgaatgattattatcaaaagctggtaaaccaattataattagcactgatagcaaaagtcatcacctcctctgggtatgttaagtaattggcccaaaattcaaaaacagatctttaaatcttgggatgtaaaagaagagctagctattctgtcattcagagaatacaagccttgctacaatgattatagataaaccttcaagtgtcctataaagataaaagtgaatgggaaacatcttatggttgaaactagatcttaaaagaaagcagagaaaaaaaattgaagttttgtgaagcaatgaaactgtcaagatggcaaaatctccttcatatcctcaggtgtatggtaaactaaaagggactctgaatatgtgcagcatctccgttcatataagagcggaatgtacatagaccgtctcttggtcacaatttgtatttacattttcaatcctaccacttcagttttgtcaactgctcatcatcaaccttggaattctaattttcatgattactatgctctttatttgtgaagttatccactagtttactttacctaggctggcagtctcagaatcacatgttccattttattttgcctgtaagttaatgctggtaataaaagcacactattctttcagtcttaagacatgaggctaatctttcttaacaatttgttcagaggaacataataaagatttctaaagatgttcttatcctctgattttgatatatcatgtttctgatcaaattaccctcttctgacttagaatgactacttaagtttgtctttattaaaacacaatattcttactgatgccaggaacatgaacagtcatatttaaaagaccaggtaagaagtaaagtattgacatgacagagtgacttatttttgtgcaagtctttgtggatgtagaatgataaaggagaatgataaatggaactgacttgtaaaaataactcctttccaatttgtaatttgaattgatcttctatatttacttaaaattctttaatgaaatcattgcaacaaatttatatccactcaggcctcgaacagcctcacctgagtaaataaatagaacaactccctaagtttacttctctgcagtggaatgcaataagaaggtcagagtgagtccttaatctctgctaattggtagaaattgggtatttataatgtaaaattactcattttatttcagatcatgggcatttagctcaaactcatggatatcataataatgatagcagtatatattaatatcttcctatgcactagccactgtgataagtgatttacatatattttctatcaatccttgaactgttgcagttcattgcaagaaaaaagttgtaacacagaaaagaatattgagacttggaaatatcaaacatgttaaaattatgagaaaatagtattcaaatgaaaatctttctcatatcaaagctttgatgtcatatttccttgttctaggaattgtttttccttctttttaaatttcaggtgcaaatctattaactgttcagaatattttaggttaaatttttcttgaacgcttttcttcttttcaatgtgtttagcttttaaaatctgctattctatttcttgcctatttttgatttgtcaaatgaatataattgggccattgtatcaccagataatttactattcattaaggagtaggtcatcatgtgattctgttgtctggggaggattgtctagggatatatttttggcattaggagagctttctaagtcacctctaactgaaaggaagtaaagggttccacagtttcgaatgtataccttcaaaaaatttttgaatttttatgcatttcaaaaaatggaaccaggtatttcatttttacttttatttaaaaaaaaacaccaaaactgggcacatttaaggggagaaaaatgtaacatttttatcattaaaaatacttataatccataagcattacatattgttaccaacagcactttaccctttaaccactgtaaaaacaaggtttttttgtgaataatctctatatattagaggtatataatatgtaaaaatacataacattatatatgaataattaggtgaataatctctaagatgaatgccatctataataacatactttagcaagtctagtaaataagaaatctagattttcaaaaagaatgatcataatatctagatctttgcatgaactgtgggctcactaagcatgagtaattaatgtaaaataaagtgctagaaatgaaacacattcaagtgtatatccttccatgattcttgattttcagtagtaattttaaagaagaaaaaatgcactggaatcttttcctgtagaataatacattactacttaggtcttcctttttttctttttctctttcttactaatcattcctttgctttcctctctccttccttccttcttctttttctgttttaatttacattgatcttgattggttagaatctttgaaaaatcttctagtatcattcccttttctgcaatgagccataagctgaatgacagccaccggcattacattggagatgtaattgacattgggacattggaaattctcagagatagtgatcactctatctttttcgctcccactcatgagagagtatcagaacaaaaggaaatggaagttacaatttgtgtggatataatcttgagttttatatgcatatatttcttaaaataaataatttgtaaattttggtactctgtgcattgttaatarcctatcacttgtggtctgcctaaagactgagagtgactgccttatggggagactctcagtgtttgagaaattctgcaccaaaccctagattccccagtctgtcagtgtaggaggagggaaagagtagagaagggtcaaggtaatgagatcggattaatttgatcatttaaaaaataagattctctccctaaaatatcatagctagctattacttatggagcccaggtgctgttctgaatcatttacctgcattatgtcacaccatacccagaactataggaaataggtgccattgttctcatcatttgttaaatgaggaggctaagtaacttgcctagttacaattcagaaagtggtgaatcatttaatatcagactccactctgaggtaaaaagcaaagtgctagaatatactgtttctgtttagcaaaacaaagaaaaactaaaagtacatctaaatttaagcttttagagaattaggtaaatacaaatcaagaaactcaaataaaactgaatcactcatccccaaaacagtatgaaagctggtttccaggctttttttggccttggggagacaatgaaaaaagagccagcagagttgaatcctagccatcacgtgcaatattcagggagcacttcggaagagaagactttcaggcaagggcatgtcttcagtggaaaagaaaatctttcataccaaaatgttgctatgaggattatcaattcagactaataggattgtatacattttactaaacaaaatgttgttttaaggataatcaactcaaattaaaagcgttatatacattttattgttcttcactaaattaggtaaatattttattgccctgcagatattacgtaaaagtggaagttgactaatatcatcattttttcccttactctgggtaatttagggatatctatatgtattgagattttggagcatattttgataagcttttaygtgctattgcagctacatttgtgagtaatccctaattaattattatatttttcttacatgtaactcaatatttgaacaaatctaagtattttatagatagacttttgttcatgttttctataatgttttgctttctttactttttattgaaagtttgacagcaacagatttctttatgaagatttttaaaccccttttactgggcttattttgaagaccattaagattatttacactcttctctggctgccttgtttcaaaaatctaattaatttttaaggtactgccactatattcaaattgaggcttrttcttgagaggacacaaatgcaaaaattctaaaaccatcacttctctctcttgtctttcctgttctctgtcctcccagttcttttgttactcaagggcctgaaattacataatttaagggcaattgagtataaayttaaaatctgtcacttattttctaatcttaatttttgatttttatccttttaatcactctatttgttcttatttctctttttaatggtagcctgtaatgatttcaaaacagcattgttacataattgctattgctcagtttgggattcactaagaattgcaacactatatccatatctgatctcactatatccaagtctagccagtcattctgtagctggcctactgatttcctaatcaatctttggacaaatttattaaacygctaacattactacgctcttactctgtaccaagaagattgaaaagtagctttacagatactattgttaatccacaaagtaatataacaaattaatgtcatcacctctcatttttctttgagaaaactgagaatgggagggtctgaataattacccggtgtcagaaatcttataaaaggacaatatttgaatctgggtctattgaactccagtgtctacctaacttctctgaataacaaagtctgtgattctttggagttccaggccatatcttcttgatctgtgtcatatggaagaaactgaaaaattccctgtaacaaaggcataggagacaacaatcagttggctttatggagaagaaagctattctatatcaaatgcatagtattttaccctataatccatataatctaaaacaccttgaaatgtttgagcaaacttcctctgaaagttgtttattcaatttagtgaaaaatatattaaagatgtattttataaatcatagttattatcacagaatatgtagatggtaggtttataaccccgtgcttccttttctttaaaaagaaccagattttatttctgttactgaaataatgatgttagtgcatataggaatttgaattatattatttaccttttaatctaaagatcaattgacctacgactgagtgtaaccatcgcactaaatattactttatttaaaaattgacctaaatatactttgaagatttttttttcatcttgaaggatctacagtaggatggtttccataagggattttaccatgcctaagaagtttgtccagatgctggtttttaatttgactctgactgaagttgttctaagtgggaatgtgttaatttggcctacagatggtagccattggttaaatattaagattattctagaagagttgattcaaagaaatcacaatgtgactgtactggcttcatcagcaactctattcatcaactccaatcccgattctcctgtgaattttgaagtgatacctgtttcctacaagaagagcaatatagattccttaattgagcatatgataatgctgtggattgaccatagaccaactcctctcacaatatgggctttctacaaagaactaggaaaacttctagacactttctttcaaattaacatacaactctgtgatggtgtactaaagaacccaaagttgatggcaagacttcagaaaggtggttttgatgtgttggtagcagacccagtaacaatctgtggtgatcttgttgctctgaaattaggaattccatttatgtacacattgaggttctctccagcatcaacagtggagagacactgtgggaaaatcccagcaccagtctcctatgtaccggcagccttatcagagctcactgaccagatgacctttggtgaaaggattaaaaataccatatcttattctctgcaagactatatatttcagtcctactggggagaatggaattcatactatagcaaaattttaggtaagtctaaaattttctctttttaatgactccacatcccttatttattcttattgtcatatggcaaacgatttccattccactgcatatgctgagctgaagataatggacttcttatatctctgtacaaacaattccctgattattctctttgaataaatccttaacaatgaaatggtggtattaatatgtatgctattgtctcttaatgcaaacaactttgtgtccatttaggtaatagcttttcaatgtataaatcaatttcaaaatataaatgaaagtgcccatattaggatacattatgacactactgaaaaataccctggcaaatattttcgaggtgatacatgatttaccatgcctcctttgtccttcattattttctttgtctgcagaaagctttgaaaagcatagaatcaggcaatagaaaactggagtttacactctaccctggttctcactgtctctctatctttacacatctctgggtagttggacaccatctctcaaattaatttctctctatcctgtggccagcctcatgtttccttgcatgaaacattccttatgagaatcaaacacaataatgttaaccatcaaggccagtcctgattggttgtttatattacttatttttcctggcttttatgagcctccctttatatttttatttccttctctcttgatgattttgcctccagatctcttagtactcgggacactaatcaatagcaggaattaacagatgatgctaccactggtactttctcacagaggtaatgtgaaagacttttttacataccttttgactttctttcctttctccctcactccccttggtcgttccttttttccttcctttttttccttccttctttccttccttccttccttccttcctgcctgccttccttcttgccttccttttttccttcctttttttccttccttctttccttccttccttcctgcctgcctgcctgcctgccttccttcttgccttccttccttttttacttttcttccttcattctctcttgtttactttgtgtaaaaaaaagtatttgttgaatgccaacctagttcctacaacttgtctaagtggtaggaatacaacaataagcaaaacagatcaaattctctatctcatggaacttacattctcatgagaggagacaaccaataaataaaataaatatataaatttagcctgtgatatatgctatgtaataataaagtaagaagaacagatagttcttagagtgagtttgcatatttaaatagagcaggcagagaaagtatcaaatgaaagaatgacatcaggccaaagacctgagggaagtgaaagtcagaatccataagatccctggaggaaaagccttttaggagtaggtaagaacaagtacaaagacctgtggcaagccatacacataaactaacttgaatactcataaactaacttgatcttactcttacctttcacaaggggtatttgaatatatcttttttcttctcttgatattgcaaaactcttgcaataattttttttatcaaaaagttttcaactttttcttagaatttgtctagaggaaagatattaaatataccacatataaaacatatgcaaggtaaataaaatttgagtttatttttgaagatgctataactaaaattttacaagtatagttctgtatttttaaaattcctttaaggcataatttaaccgtagtttctttttttctggctttcaaattttatatgccttcaaaccacatttttcttttaatttgggtataattcacatgagtatgtctcaagacatttgaaatgtgttctacaataattgtaactacccagctatgtattggatagtgattattgcagctactgaatgagttaacaatctatacaccttaaataagagacatacaaaaagtaacaaggtgaagggtcctgaaaaatgcatgtggcttcaggttccactggctaactgggatctcagacaagtaactgaaactttagagtcacagtgctttctcttctttaaaatagggttaaaaatttcactatattcgttaggaggatcatatgatatcatatgtggctattccatgtcaactataaagaattatacttatattaaatgttatttacaccaaactacttaggaaatctgcaatgataaaaccctttttatattaccacagggctctgtaaatggaaagtagccaaaaaaatctacaaaaaataaatggtttctggtatgtactaaaccttccttctcaaaggaagccataacaaattagataagtgtgaaaaaggctttgtaaaacagcaagttctcaacttctcacctttacaaaataataatctaggttcagaaattctatcatttaagaaattaaatatcctatttacttaaaacctttatgcttctcatgttactgaacataatttgaacaacaaataactgccttgaatattttatttcaaattaaggtatactgtgaagaactggtaaaaccccattttgtattttgtttgccatcacaaacaaaaggattaagaacacctgctaactgtaaactgatattgaaagagggcagatacacaattttacgtaattatgtttgaccgcaggagagctaacaacatgtcaaatttttgtggcgtttccattacaatagttgttcttcagttctgtgtaggaaaaacagacttgagaaatgatatgttaaattgtgacaaagaagaactccaaatgtcttgaaggacatcagaataagtacaaggacatatttgattgcaccagttaaaaaacttgttttctatatcagtgaggaactcttaaatcttacagatgaaatgagtaaaacaattaacattttaaaaatacctttaatagctaagggaacagggatatcaggaattatgaaaatcactgctactcatatccagaagtgaatctattaataaattttggtcaggccaagtgttctgcatggcaccatcaaatttaactgaaccttatttctctctctctctctcttttttttttttttttttttttggtgaggtggactcttactctgttgcccaggctggagtgcagtggcggatcttggctcactgcaacctctgcttcccgggttcaagcgattctcccgcctcagcctccattgtagttgggattacaggctgccagcaggtcaggctaatttttgtatttttaatagagacgaggtttcaccatgttggcgaggctggtctcaagttcctgacctcaagttatccacccgccttggcctcacaaattgctgggattacaggcttgagccacatcacccagcctctgaactttatttcttcctcaacttctaagagatctgctgtacagcaaatagatagttctcactgtagaatttgagactagcctttgctgcagcaatagaaaggttaagcccttgaacactgtagtgaaaatggttagacaggtaaggccactggaaactggatggctccattttgcatgtgtcttttgggtttccagtctgtctctatccatcccagcgcactgtagatcgggagagcagaaagcccagtaataagctatgtgacacttggctggtaaaatttagttttaactgtcagtaccatgttgggccctctttccctgctgatatattttatttattcatttttattttttgacatttaatatttaatttaaatctgaactttaatccttactcctctttttaaatttatttttatttttatttttaaactttcttgtgggtacatagtagtatatatttagggggtagataggatgttttgatacagacatgcaatgtaaaataagcacatcctggagtacggggtatccatcccctcaagcatttcctgctgataaattttagatggattcttagaactaatgttaccttatcccagcccatgaagaaaacaaatctcttaacagttaatgagacactccagcacaatataagataaaaatgagggtaatgggcattttgtctcattctagatgtcagtggaaaatcatgcattgtttaccattaagggtgatgtttgctgtaggctaattttagatatctcttattagattgaggaatctccctttttctttttaattcaaataaattttcatcataaaaggatgatgaattttatcaaatgtttttctgcatctattcaaattattatattattcttctctttgttccgccaatatggtaaaatatataaagtgattatcagttgttaaatcaactttttatttttggaataaaccccaattaacttaagaaaaaaacagcctcttaaccttccccctctatccaacttgtctgcaactaaactagattaatcacaataatgtattatttgtatttcaactatagtttcttttctgggcccagtgttgtatttattgcttctctccgtttcctatccccactctaattctcataccctgcttcccaccctttccctggaaaacttggagtttctgttaatctttcgtcacctaagccttccaattccttcttatatgtagctttcctgtgatcagtgttgtgggtttttgttgttgttgttgttttgttttgttttgttttgtttgatttttgagatggagtctcgctctgtcgctcaggctggagtgcagtggcgcgatctcggctcactgcaagctccgcctcccgggttcacgccattctcctgcctcagcctccggagtagctgggactacaggcgccggtcaccaagcccggctaattttttgtatttttagtagagacggggtttcaccatgttagccaggatggtctcgatctcctgagctcctgatccgcccgcctcggcctcccaaagtgctgagattacaggcgtgagccaccgcgcgcggccgggtttttaaaattttgtatattctttctgcaaaacataaatcctaaactttatagctcattgaagtttcacgaagtaaccccacccttgcaaccagcactcaaattaataaacaaaacatgaatgcaatccataactcctctttcatccgcttatcagtccccacaactcctatttaatggtaaacactttcttggcttctgaaaccatggatcaattttccttgactttaaacgttatatagttgaatcacacattatgtactcctttgtatcttgcttattttgattaatattatgtttttgaaattcgtacaagttgttgcatgtagatatgctgtgctcattcttatagctatatggagtctattgaattaatgtatcacattttatttatccattctactgctgatggaaatttaggctattttggttttgccaccttatgrtgaacactgctttgaacattcttgtacctaatattggtgaatacatgtatgccatactgttggatatattcgtgagagtggaattgacaggtcatagatatcattaaaatttagtttcccaaaaggttgtgcaaactagtaaacctactagccatatactagggttccagctcttctccattgtcatcaacacttggtattgttctttttggtatttattttcattgtaaccattctgttgatctctattgtttttattaaggtataatttttatgtgataaaaagtgcataaagtgtacagtatgatttctttcatcaaatgtgtatgtgtgtaactaacacatcaatcattctctgggattcctctctaacaaggccactacccagaccttttcagatacttaggctgagtaactcctacctcttacttctcattcttcattcttactcacttttagttttctttggtggactttttactacatcctcttatcatttcaactttaacatcatgattaaattgtcacccacgtccggtttgtaagccatcaagaatctctagtgcataacgtattccttgattaaaaataaaagttgtcttaaatgtagttacttttttttttttttttgaccgagtcttgcactgtcgctcaggctggattgcaatggcgcaatctcggctcactgcaacccccgcctcctgggttcaagcgattttcctgcctctgcgtccagagtagctgggattacaggagcccttcaccatgtctggctaatttttgtatttttaatagagacagggtttcattctgttggccaggcaggtctcaaactcttgactttgtgatctgcccgcctctgcctcccaaagtgctgggattacaggcctgagtcattgtgcctggccagttacttctttataaaaatatattcactaaggatgatttccatatttactattgtcgtgcataagaagtttgccaccctcctgtttttagttggtcataaatagaaattatcctccgtgagattatgctcttttggcctaaatgatgaagccattggatgtttcaaagaaatcataacgtgggtgtactggcatcatcagcaactcaacttcaattctgaaaggtgctgtgtgtaaactaaaaaagaatttccctacttgtggaaaaaaaatttaccttatctttaatgcagaccccttattaaccccaaaacctagtccttttgagctttgtaacattacatgttatgccttccctcttccttcatggtagcaaatcaaattattttgtaatttctgttatatttatatcaaaacaccttgaaccttttaaaaattgctgtgaatgtaattatctttgaattcatagacaattttgttattgaaaataaacacataggaatagatctttcattttcgtgaatctctttcaaaaataaagttaatatacatcacataagtgaacaattttaggaataaagaaaaactaataactataatgtggtatttattggatttatacaaactgtggtgcttatattgtcattttaatgatattattttggaatccatgtttctagatattttctgtcttttcttgacaaaagtgccaactaaaagtagtgtgaagtggtagccttgtgttagaatagaaattgaattcaaccaatctttgtttttagctcaattgtgatttcattaaagttggtatcccagcatcagtggagcctagtaatatgtccgtagtcttcaaattcccaaaataccctgatgtagtggctacagttgttctctttttcaggttgtcagctgggataattagtggacacacccagaaatgcccatgtacacactcctctccttgcttggcaggtttagatacacaaatatctgactacattgaagttatggcttctcatctcaaatagtattcttcattctgttatatttttgtatattctgttatataccttggaaagataactaaactatttctcattattggtggttaggcagtaaatctgttgacagcctactttcttgtgctataatcttcagtttagttttaaaatttatgatgatgtaactctccactgaagcatttttctaaacatttggattattattactaattttcacaatatatttacaaaatattatcattttaattttatgataaaataaaaacagataaaaattaagtaactctctctttgacaaacatcattttgaaaaaatatgggaagatagatctatttacctccaaagcccacttaactaatttcactaaaacagtataggtatctttgtgattctaggattcactcaagccctagctctctgcttttctaaagaaaagacgttaataggaagtcaaaaataaagcatttgatattgagatagctatcactgattctctttttcaaatgagaaagtagtgttatagtttaagaaagagaacaatagaaagcttatgtcgatgatttcatatctagagagctgggacatcctatcacagagatcacattcaagttattaataacatttaagtagtattgttaactctgccacttagtcgtgtattctttagcacacaccacagtgtaattcttacatgtatgtatatatataatatatgtataattgatatatagtatatttgtgtgttgtgtgtatgtgggtgtgctggagacttggtaaatcaggaattcctccagcggtagaattgcattcacggtttcacctttagggtctgtataccagttcgctaacataataaaacatatataatttttatacatccttggcatcttggctataataaatggtttttattttgtgaccagtttgttgaaagtacatgtctcattttaacttgcattcctctggggttttcttagaggcctattttataattccctgtttatgacccttttctacttggaggagtattgatattcacagtgatttgtagtagcttagagtacaatgtgtaaatatcattgaatctgcaaaattcaaatgaaggtggttaaaaggagagggaatagtgatggttgataaaaactatggcttgtggtgctggggaaatgacaaaggtagctttaacatagtcaggataagagtgtaaccgggaagaggtgggaatggggagttataaagagtaaagacgctgcatggcacatctgggaagaaggaaatggcttaaagaccctgttgcatatggcctcactccaactacgtcaaaaattgcaggagaaaaaaatgaatcgtagccaactgcagatggagctattactattggtatatcctcattaaatcaaagagaaagacaaatgtctacaagaatggaaacttagagccctgatccatatggctgtattttagttatatattttaatataatcttttaatataatcttaattacactataatggtgtaatttaaagtcacgtttaaatatgagaaataaattccagtaaattatttttcatgtggtattttggaattttaagtatacttgtacattcaagattaaggaaaaaatattttacaaagaaatttctattgcaatgataatatacattttgttttaccaaaatattcataacttcttactgattattcttatggatctactctgagactcgatgattcactagaaagactcacaggactcagaagctgctaggctcatggttatggttcattataacaaaataatacagattacagattaaaataaggagagagaaaagacctatgaagggtagcccagaaaagatcagttgcaagcttgcaggggtcctcttccagtagagttgtacaggatttatttaatattcctagaaatgatatgtggtgacgggatgcagttttatcaactaactcacctgaaccttgatgtcttgggttattgctaaggctcaatcacatagatgtctagagcctgtttgactaacctcagctacccagactccagaccctcagagcaaaaactggtgatcatggtaaatcacattgataacataaactatctagtcaaactaatgtggaccaagacctcagatatacaaaaacactcttattaggcactgtattccaaaagattggaactcagctcttaggagccaggtatgagcccctcttgaatataagaacatgagtcttttttgggaatgtacaagttgagaaatccagacctgcaaagtaaacactttgcagtacacctcctgaatgaacgctattcatagtgctaggaagctacttttattgactgtattacctggctccctttctacctggaggagtattaatattcccatcatttgtagtagctcagagtagcatgtgtgaatatcactgaatctgcaaaattcaagtgaaggtggttaaaaggagagggaatagcaatgtttgaaaaaagctatggcttgtggtactggggaaatgacaaaggtagctttaacatagttcaggagaagagtataaccatgtatcacctgatatcacctggctccctttctctttggtatcaatttgggttcaacaatgaatcccctttgagactaatagctgagggaaattgaaagattatctctctcagtgtagactataacttaatagtggctgtagattcctttgaatttcaatatagaccataatagtatgtaaaagttgtggcggtcttttttctttttttcagtttttaggcatttcacgtattttattttgtaagctgaaactttacatttagtattaagtagaagtaggcattctagatcattcatatatttgcttttaaagaaaatgcttttatttttttctcccatttaagcttatgttaaatatataaccattgtattaattcaaaaaagttctgttttctaagttttaagaatttttttcatcaaatttgaagagtgatggcttcagataaggctccaatttccttcttttgcttgtggatatttagtgtttctggcatcatttattgaagagactactctttgttcatcgtatattcttgatatcttgttgaaagaccagctgaccatatatgggtaggtttctttctagactctccattttgttcccttggtctatacgtgtgctttaatactgtttggattcttgtcactttgtagtgtattttgaaactagggagtgtgatgtctgcagcttttctcttcttgcacaaagttgctttgaatatttgtttttttgtggctccatataaattttggttttgttttttctatttctttaaaaaaatgccagtgggattttaatatggattcattgaatctggattgttttgggtaacatggacattttgatgccctgagacaaattaaatattcaacctaagacctaaaaccacaaaaaccctggaagaaagcatagggaaatgcttcttgacattgaccttggcaataatttcttggatataacaccaaaagcaaaaacagacaagtgagattatatcaacctaaaatagcttctggccagcaaaagagmcaatcaacaaacttaaaakgcaatctgtggaatggaagtgaatattcgtaagacatatatatgataaagggtcagtatgcaaaaattaataatattttagtattttttatctccattctcttttaacmtgtaatattgtctatgacatttataaattttctatttatccctccttccatcttgagttaatttcaatgtgatattaatattttatattttcttgttcatcattaattccagtttgctcataatttgatacagggacacttgcctttgtattcatgagtgtttatgaaccttaaatatatttgttcttcagtccttttctgaacagtttgaattggccttaggagattttcttttttctttcttctctttctttctttcttttctttcttctttttttctttctctctttctttctctctctctctctctctttctctctctctctttctttctttcttctttctttcttttccttccttccttcctgcatgcctgcctgcctgcctgcctgcctgcttgcctgtctgcctatggaacaaaaaatatttcttatttggaattttgttataatctatgcataaaatcatatgaatctattatgtagtaatgtagtatgtgatatgagtctagtagtactgttttaatgctgttaagagactcatttataagacaaatatttttccataagcagtggatttgattttttttataaatctctgagtaattccaaaacaaatttcacatatttattaagacttatcaaataggtaaacattgtgttattgtggcaaaggatttttactgttaaaaattatttagaaatagataatagaaaatgtttatgtgtgtgtcagtatgtgcaaatatattttctctctttgtccattgaaaacacatgaaactccagtaacaatgaatatacctataatatacatcttgagttttatatgccattatctaataaaataaaataccgttcactggagaagtgtttaattttaagtttgaggcagcgaaaacagaagtcgagtctaaaccatctagtaataccaaaaagtgaaaagtgctcagaaatgatggagccatttcaaaagaatacaggaactactgtgaagaagtttccaaaatctgggacaatttgagaagcaaaataaataattagtatgaatgaatagaacacataaaataaaattcattaatattttagtttatactgtataaacagttcaatgaacaagcaatctcttaattccaattaatgaatataaaatgaataatgaaaattttttaaatgaccagctttctttagtagtaacattgtattttattttttatcttctgctttcattttagtttccaagggtatatgtgcaaatttgttatctgagtatactgcgtgtcactaaggcttgatggatgaataatcccatcacccagtagtgagcataatacccaataaatatcctcaagtctgttttgttttttggaatactgatctgcacacgaatgtaaggaaaatactgaaacaggtcataaaacaactagaaatagtaggtggtccaataatagttacttcatgtatacatacgtatataaaaatcatacatatgtatatagttttttttttgccatggttaaaggtctccaaacatcatccaaatagagtctttagatgtgtatggcctctttggtggaataaaatttactccgaaataaaatgttagaatgtgatctaataaacttaaacgcaagcttctaatggatgaaattacaaakatctctctaccagatcaaagcgtccaaatayttaacagaattaaaaaaaaatagcccagtatccaacaaggtaaaatcagaaaaaaaagttatgaagtagttaacaaagcataaatatatgactgagagcaacaaatagcatattattaaacagacaagttcacagtcatgacatacatgatagaattagtagacaagtactctaaaacagctattataaatagcttgtggttattgagtatctttaagataactcttcgatgatagtttgtgttgcaattctaaacatcttattttgttacattttatacttgtatctgggttaaagaatgctattgaattttgtaatttgatattatgttggacaacttacaagactaattaattttaatatttgtttattgattttttaagtcttcctgcctggggcttttgaaaagatacatctttagactttttagcagttgctctgtatttctgtatgtaaattttaaatttacataagtgctatagtgtagacctaaaaacaaaaatagggtatggccaaaagaacataaaagtaagcatataatgagaaaaataaaatttctataaacaagcccacattaaactaccagagatgaaacacacaatatctaaaattaaaaatacattggatagtattaatagattggacacagcatagaamaaaagaatttaaagatatagtaatagaaactatacaaaatgaaaaataaagagaaataatcacttctcccttccccacaaaataaacaaaacatcctaacatatactatttcaatatcctaaaggaaggagcatcagcagaaaaaaatattaaaataaataatggccccaaatttttcaaatttggtgaattccatatacaaatagatccaagaagttcaattaaccaagtaaaaagaaaaataaaatgcctctatcacatcataatcaatatattgaagagtaataaaaagaaaatctgaaaaatggaaggaaaattaaaaaatacttcatctagcaaagaaaaaaaaagaatgaaaacagacttctcattgaaagcaatgcaagctacaaaacagcaattacacctaaaaagtactaaaataaattaaaattatcataattaatacatatattcccagcaaatttaatacccagccaatttaattttaaaaataaaggctgattttttttgttgctacaagaaccaagaaaattaatcttctatagaccaccacttcttgaagaaatgttgaaggcagaagaaaaatgatctctagtaaaaatttcgatctagacgaatggagagacaaaaattgtaaataagtcaatgaataaaaaagacttaaaaaatgttatttaatattactaaaggttaaatgactgcttaaaaccaaaatgataactacagatatttattgtattgtgaagttgtaatacatagaagtaaactgtatggcaacaataacacaaaatctgggaagagatacaggaagtatactgtcgtaaagttgttatgctaaaaatgatactaattgcaaattttacacacaaccacaacaaaggtagagcaaaaaaagaatatttaataagctaaaaaaaatcaactaggatcataaaatgtgttcaactaataaacatgaagataggaaagaaaaaaagaacaaaaaagagatgaggtaacttaaaaaaagtagcaaaatgataaatcccaactcaaacatgtagataatcacattaaatgtaaagttctcacaaccctcaccaatagttagacattgtcaaattggatttttttaaaaaaagcaagactaaactctgtgctatcttaagaaactcataaagaaaaaggtgaaaaataaaatgagaatatacctatgatactaacagtaaagtaaaggtggagtggctgcattaatattagataaattagaccttcagagaaatgattattatgagaataaaggtcattttataagtaaaggtgttaaattcatcaagaagacataataatcacaaatatgtgtgtacctaagaggatcaacgtaaagaaagtaaattgatgaaaattaaaggagaaatagacagattcccatttatacttggagattatgatggtcctctctcagtaattgataatacaagcacacagaaaataaatgaggaaataacagagttcatatttttcatggaaaaataatttgtgaaaattacatgtttttgttacatttcacaatctataagatgcttttttaaggtgcttgtcctgggcattctggccagcattaattttgtaaaatctttatctttcttgtttgtattttctgaaatgcttttgctcaagtctttatttttatttaatttactttcaaatgaatctgttttaaaaagcattaagctcaattttctacctttatctcaaaggttttatttaaattatttttataatgtattacatataattttacactaacttgagatgaatcctaatatatttgatagccatctgaagaaattaaatattactatagaattttttataccttggctgctcatttgctctttaaaactgtgacttcaattctttgcatctgttgtatgtctttgtacattttgtatctatcattaaataatgtaaaatattattttatattttaaaaatatttatataaactattctgttaaatattatgctatttttttacatgtatgcacagtttcctgcagtggcaagtgacttggtaatgcattcatattggcttttgtcttttccctatcccattttatccactgcctttgtggtgttacttcgagatgattctcacaaaaattacttgtattcaaattcttttctcagcgtctgtttcttggggaactcaaaacagagtgttacattgtagtaatcctaggctagatagctgtagagactacattackggtagaaatggggtagtggtatcacttggcatgcagtacaatcacaattactacgattttcatttttgatgaattgtcatgaggaacagatggaagaggatggactagcttgtgccaaatcaacaattgagaagtgtggaagcaataataattgtaagaattatgtagctgttakctgtgtttattgccttcagtaacagaaggtagaaaatttcaattaattcagacatgtataactcaggacacaatataaagtagaacacacccatgacaatttttaaagagacctttatgacccatagcaagtgggtggactgtgttgaaaattatagccaagacctaattgttggcttagcagaattataaatgaggctgaatttttagcaatttttgtcaggaaatgtcctacaccgaagccaagacataggatgtggaccgctggatgaatgtgtttgaggaccttgaacgtctatattcctgttgaccctatgggtcatgtgaagatttccttctctttgctagacaatagcagcatcacattgcctagacatcaagtatagaattgaagttcataacacatgaaatcctcaatgcatgcccccctcacctttgagcctcgagaccaagaactggcagtacaatatccaatgcatatataatattaagatataatatattattcattcagtatattgtatccattatatagattccctgagtctattatatagataacacataaaaacaattgttttcaaatctatttatttagtgagtttgtaattggttttcttacacataaaaatacagttctcttttactttctatgtagttaagaattgtttcagataattaattaaataattcgtattttttcccatttctcagttgtatgaaatacactggcatattagctataaatatgttttgatctctaactttttgtatgccaatttcccatctttgtggtgttatacattatattattactttgttatgtattttgacatatgttttggtaagtattcataacttttttctttcaatttctcttggctattttaagctcatatgttaaattttttatttaaaaaaataaaaaccttttggttcaggagtacatgtgcaggtttgttacacaggtaatgtggtacacaggggttggttgtactgactattccatgacccaggtattaagcctagtactcaatagttatattttctcttcctcttcctccttccaccatccaccctcaagtaggccttactgtctcttgttcccctgtttgtgtccatgagttctcatcatttagctctaacttgtaagtgagagaatgtggtatttggtgttctgtgtctgcattagtttgctaagaataatgaccctccccccagctccatctatgttcctgcaaaaaacatgttctctttcctttttatggctgtgtagttttctatgatgcatatataccacacattctttatccaatctgtcgttgataggcatttaggttgacttcatgtttttgctattgtgaatcatgctgaaatgaacattcacatgcatgtgtctttatgatagaatgatttatattcctttcggtgtatacccaggaatgggattgctgggtttaatggtwgttctgtttttaaggctttgaggaatcaccacactgctttccacaatgggtgaactaatttacccttctaccaaccatttatagctgtttccttttctctgcaacctcgccagcatctgttattttttttactttttaataaaagctaatctgactgacataaaatggtatctcactgtggttttgattttcatttctccaataatcagtggtatttarcttttagctttttaatatacttgatggttgcatgtatgtcttcttttgcaaactgtctgttaatgtcctttgcccactttttaatgaggttgtttctttcttgtaagtttgtttaaattccctgtaaatactggatattagatctttgtcagatgcatactttgcaaatattttctctcattctgtagattgtctgtttactgttgatagtttattttgctgtgcagaagctcttaagtttaattagatatgatttgtcaaattttgcttttgttgtgattgctttcggcatctttgtcataaaatatttcctttttctatgtccaggatagtattgactaagttgtcttctaggtttctatagttttgggttttacatttatgtttttaatccatcttgagttgatatttgtatatggtgtaagaaaggggtccagttttggtattctgtatatggctagccatttatgccagcaccatttattgaatagggaatccttttcttattgcttggttttgtcggttttgtcagttttgtagaagatctgatggttgttaggtgtgtagccttatttatgagctctctattctgtttcctttgtctatgtttctgtttttgtaccagtgccatactgttttggttactgtagccctgtagtatagtttaaagttggattgtgtgatgactccatcttcgttctttttgtttagcattgccttggcttttgtggctcttttttttttttggttccatatatatattttaaaatagttttttatttctaattctgtgaagaatggtattaatagtttaatatgaatagccttgaatctctaaattgctttgaactatatggccattttaatgatatcgattattcctatctatgagcatgaaatgttttttcatttgtttgtgtcatctctgatttctttgagcagtgttttgtaattttcattgtagagatctttcacctccctggttagctgtattcctaggcattttattcttttttagcaattgtgaatgggattgccttcctgatttggttctctgcttcgctgttggtgtataggaatggcagtgatttttgtagatagattttttttcctgaaactttactgtagttttttattagtgcaggcagctttggggctgagactatggggttttctacatatagaatcatgttgtgtgtgaaccaggaaagtttgactttctctcttcctatttggatgccttttatttctttctcttgcctgattgctctggaaggacttccagtactatgttgaataggagtagtgagagagggcatacttgtctttgccagtttataaggaaaatgcttacagcttttccccattcagtatggtgttggctgggggtttgtcatatatgtctcttattattttgaggtatgtttcttcaatgcttagtttattgagtttttgcataaaggtatcaaaagccttttgtgtgcctattgaggtaatcttgtggtttttgtgtttctgtttacatgatgaaccacatgtattgatttgtgtatgttgaaccaatcttgccttctgcagataaagcctatttgattgtcatggattagcttttagatatgctgctgcatttggtttgaaagtattttgttgaggatttttgcatcaatattcatcaaggttgttggcctgaattttattttattttttgttgtgtttctgccagattttggtaacaggatgattctgagttcattattttttatcacaggttttagaatgtgtttaagtttcacacaaatggaataattcacctgaaaaagattatattccttttatgttagatttatttctgggtatatcattatttttagagtcttctttaacgttattttaaaatttcacttttgtttgtatggggtatgtaagactgcaatttacttttgtatattggctttatttattttattttattttattttatgtatttatgtatgtatgcattaagacaagattttgctctgtcacccaggctgaagtacagtgccactgatgttggctcactgtagtctcaacctcccaggctcaagcaattctcccacctcagttccaaagtagctggactacacgcatgcaccaccacacttggctaattttttatttttwtttttatagagatatgtctccctgtgttgctcaggctgatctcaaactcctgggctcaagcaatcctcctgtattggcttaccaaagtactgggattgtaggcatgaagcacatcaggtggcctgtatattaaaattgtatctatcaatattgataaacttttttctgatataaataaattcctacatttacaaatgtatatacatatattgtataatatataacttttttccatatattattgcataattaaattataaaattcaacattaatttaaagtatgttaaacaacatctttgtcttgatcctgagtttttaaaaaatttcttctaacctttcaatgttgagtagaaaattttccgaagtttggtttcttgctggtcttattttgtttgtttttttgtcatttaatagttgtttcataattttcatctgtctaagaaagttcacttctattttttaaccaataaaggtattggagtatacttaaggcttttctacattgattgatataatcatagaattgattgaacttagaattacacttttaaagaaattttaaccaaagttgaatctgaaaagcataaagattttactgtatcgagggtttcaggaattaatggtcaatatacaatctttgtgtacttacacatgaaaacttatttcaaaatattattaatatggtctgtttaaattctcattcaacggccacatggttaaaataaatttatttttggcagcagaaatagacaaagaccctttcaataaacaaagttagaaatgtgttagaattcaccaagacatttttgtgctttttaaatctcttctcttgtgacaaagccttttgccaacctgtagtggaatctcccaattagattgattagtatgagttcctggggttactggttggacttaatttaatgccccaaaaacatttttaagagaactgtaaccagacttaccaaatgtaatacattcttcccccttcaacacacacayacacacacacacacacaaacatacacacacacacacacacacacacacacatgcttactggcctatttatctgtgaaataatattttctcatagaattatgatgattacgtacacggatactaaatatctatataaaaacatgtaatctaatttttatttaatttgaatctatttagactcataattaaatgatgtcaaacaaataaattcttaaggcctggaaaattttctctcattaaatcccaaatgtgaatgatttccgaaagacatatttgaacacaataatgttaggattgtaaagtcttgtttttcatttttgttgttactgttactgtgtcggttttgtttcttcctcaggaaactaagtattgaagatttttacataagacaattattgccctgttttattttgaaacctagttatattttatttcaactatcttgaaaattacatcagaaaatcctagatagtaagtgtattataatggcaatatttttagaaatgttaactcccaataatgaataataatttatattattttagtattttaaagaacgtcttaatggaccctgtatgttgctaatgaaatctacttaaacttttaatgtatttatatcattattttaacttatagatagcactagccctaatttgaaacagtctttcttcctgaatatgaaggaaactagtgcttagagaatggctacaatatttcctattaaatatgttgtgtgtgttcatcttggttttgtacgtctacgtatatacgtacacataatttgttttataatatacatttcttacatgttataaacatatatattatatctttgtataaacataagtagatctaaatgaactttatttttacgccgtcaacaaaattattaaactcctaataatttggactcaccatacttattcagcactatcaaccatcatccataggagggcagcagatcctaaagcttgataaactgcttgaagaaaaagaaagtctcaagtgagatttaactttaacctaaggactacatttagcaactgccaaaggatgcacatttttgttttatagttttgaaagtgcttttacacatagtttattgttgaatactaacaatagttctgtaattctaactttattttacagatgaagaaatcaagatcagagaagttgagaatttcctggcaattggaaactgaaattatatcctatttccaccagctacatatttctcattcacctacattttaactacaaaacagtagtggaaaaagcatgggcagaaacttatgcagatatttctttcctccattgtcattgattatagatgccacatacacagaggcaatttcaagtgggaaaatgaaacttagaaaccactattcaaaaaaaaaaaaaaaaaaaagaaaagaaaatggcagagaaatttagaaagtgtcattagcttttgatttttattataatgagaagctacagttccaactaaatggaggatttatagcttatacttttccatttcttatctccctaaatgaactatygcaaatcctagttagaagataaaattatcaattttttctggcttcatttctctcaaattaattgaatgggtaagccagtggctttacaggaaatggtaaactggaagttgcaaacacttcagttcctttttgttggtggggtacatgttataattgtttaagttttcatttttaattattatgtatacataatagttgtatcgatttacaggaaatgtgacattttgatgaaagcttaaaatgtgtaatgatcaaatcaggataattgggatatccataacctcaaacatttatcttttctatgttaggaaaattccaattccactcttagtcattttaaaacacacaaattattattaactatagtcatcctattgtgctatcaaacactagattttttcattcyaactatatttttgtagctattaatcatgccctctttataccctccccaccccccaagacctttcccagcctctggtaaccatctctctactctatatcttctctatatcttcattcgttaattattgttyttagcttccacatgtgagtgaaaacacggcatatttgtctttccgcgcctggcttatttcatttgacttaactggaggaaactctagattcatccaagttattgcaaatgacgggattttcacttgtccgttgattcacccattgatgcacatataggttgattccatatcttgrctattgggaacagtactgcaataaacatgggtgtacagatatttctttgatatactgattcctttatttggatatatacccagcagtgtgattgtcggatcatatggtagttttatttttagttttttgagaaatatccacactcttctccatagtggmtgcaccaattttatattcccaccaacagtgcacaagggttccctttttccatatcctcaccagcatttgttattgcctgtttttttgtctgtctgtttgtttgyttgtttgtttttgcggcggggtcagggtggtaaaagccatttgaactgggctcagatgatatctcattatagtttttacttgcatttctttgatgaatagtgatgttgaccatttcttcacttgcctgttggttgttcttttgagaaacgtctattcagatcttttatccatttctttttgattactcattcttttctttttgaattgtttgagctgctgatatattctacttatcaatcccttgtcagatgggtacatggaaaatattttctcccattttgtagactgtttcttcagtttgttgattgttttctttaatgtgcagaagctttttcggttgaggttgatgtgatcccatctgtccatttttgctttggatggctgtgcttctgaggtcttattaatcaaatctgcccagaacattgtcttagtgtttcctcaaagtttcgggttttaaatcagtgagatttaacttaaagattagaaagattagatttaaattagagtgatttaayttttcagggtgatttgatttttgtgtatggtgagagatagagattgatatggtttgtctcctgtgtcctcatccaaatctcatgttgaattgtaattcaaaatgttgggggagggatctgttgaaaggtgattggatcatgaggtctggttttccacttgctcttcttgtgatagtgagttctcatgagatatagctgtttaaaagtgtgtagcaatttccccttatctctttctctctcctgccaccatgtgaagatgtgcttgcttccccattgcccttccaccacaattgtaagttgtctgaggcctcccaaccatgcctcctgtacagcctgtggaactgtgggtcaattaaacctcttttctttataaactacagtgtcagatagttctttatagtaatgtgagaacagactactcagaggtccactttcattgttctacatatagatacctagcttcccagcaccattaagagtccattcctttcccaatgtatgtatttggcagctttgttgaaaggtagtttactgtagatgtacagatttatttctgtgtccattattctattccattggtctatatgtctttttttataatagtgccatgctgttatggctactagctttgaagtataatttgaagtcaagtaatgtagttcctccaactttgttctttttgctcagaatagctttggctattctggtcttttgtggttccatacaaagtttagatatatatatattttttaatttgtgaagaattttattggtcttttgatagggattgcawtgaatctgtaacttgttttgggtgctatagacgttttaatgctttcgattcctctattctatgaacagaaaacattttcatttttttctgtcctgttcaatctttttcatccatattttgtagttttcattgtagatatatttctcgtatttgattcagtttattcttaggtattttattttatttgtagctgttgcaaatgggattacttccttttttaacatatggttcactgttggcatatagaaatgccactgatatttgtatgttgattttgtgtcctggaactactgaatgggtttatcagcttaaaacagtttttggtgaggttgttaggtttttctagatayaagatcatattttttgtaaataagaataattgactttattttctttataatttgaatgccctttacttctttcactcgtctaattgctctggctaggactactactatgatgttaagtaaaagttgtgaaagcacatatcctactcttcttccagatcttagaagaaaggctttcaatttgtactcattcaatatgatgctacctgtaggtttgcggtttatggcttttataatgttgagctatgttccttctatactcagttgttttgagagtttttaatcatgaagagatgttaatgttctcaaatatttttctcatcatcaaataaaataatcatatggattttgtcctggtactgttgataagatgtatcacatttattgatttgcatatgttgaaaaatttttgcatccatgagataaatcacatgtaataatgatgaatgatctttttaatatgttgttgaattcagattgctaaatttttgttaagatgtttgtgtctatgttcatcacagatattggcctgtagttgttgttgttgttactgttgttgtgtctttggttttggtattccaaacatagttggaatactatgttttggaacatatttcaaccatgttttgaatagtttcagtagaattgacattagttattcaaatgtttggtagaattcaacagtgaaagtcttcaggtcctgggctttacttggataggagaatttttatcactgctttacctcattatttgataatgcctcgttcaggttttggatttcttcacacttcagtcttatgggctatatatgtctaggtatctgtttacttctagttattctattccattggtctatatgtctgttatatgtctatatgtctgttttatatatcattatgattttgattcacatttctctgatgattagtgataatgcacattttttcgtatgcaggttgattgtatgtcttcytttgtgaagtgtctattcatgtcttttgyctgtcttttttagtgaggttatttgttttttgcttgttgacctgtttaaatttttcatataatctggatattagacctttattaaatgaatagtttgtaaatatwttctcccattmtgtaggttgtctttgtactctctggatagtttttttttttttctgcagaggttctttatttaattatgccccacatgtcaatttttgtttcagttgcaattgcttttgaggacttagccaaaagttctttgccatggctgatgtcaatacataatatcctaggttttcttcaaagatttttatactttgaggtcttccatttaaatctttgatccacattccattaatgtttttatagggtaaattgtgacaatccggtttctttcttctgcatatggctagccagttatcccagcaccatttattgaatagggagtggtttccctatttcttgtttttgtccatattgtgaaaaatcaaatggttttgtgtggctttattaatgagttttgttttctgctccattcgtctatctgtctcttttcaaactggtaccatgctttttaaattactgtagtcttatagtttgaagttgggtagtatggtgctttcggcttarttctttactttggctattctcactttattttggttccatataaattttagaatagtttttatctaattatgtgatgattttggtagtttgacatgaatgtcattgaatgtgtaaattactttgggcaatttggccattttaacgatactgatttttccaactcatgagctatcttccaactcacratagtatatggaataattttatattctatttcaaataattctaatatttgaaataattatattaatatttctagtctctgttacttttgctgattttcatacatgaagtcttgtttctyggtaaacaggagctgcctattaaccttggaatttgatctgtgggaaggctttgaggctagtgtcagtttcttccaagatgcttttctagcttgaattttaactggaacttcacatgagtgctgactatgttaattctgagagaatatatttttcttccacacagggacaagtcaacagaggaaatttttcttgctatacatttccatgtaatggaatttatttgtaagagtgagggtagatttggggagttgaacttatgtgaatgcgtatgtgtaatgagggaaactagggcaatccattaggctttcctactttcccaccctaaaacatactgtgtatcttcagaatgaaccattcaagttttactaaattgtgtatttcagaattcatgtttttactttgttttggcagtgtgctgatttttattttcttgcttactcaaaagtgatttgtaaagggaacaattttatatttaacccagcctaatgaaaaataatcccatagttttaaatttatgcaatccctgttagaccttcgttttctcaaataaaataatttagaagtatttctatgctaacacacagatttggagaaaaaaactctgagctatatcatgtagcattactcttcatttaaagtatttcataatatattatgaaccttgtcatagtgtgtgcatacatttattagtttttttttcttatnnnnnnnnnnnnnnnnnnnnnnnnnnnnnnnnnnnnnnnnnnnnnnnnnnnnnnnnnnnnnnnnnnnnnnnnnnnnnnnnnnnnnnnnnnnnnnnnnnnnnnnnnnnnnnnnnnnnnnnnnnnnnnnnnnnnnnnnnnnnnnnnnnnnnnnnnnnnnnnnnnnnnnnnnnnnnnnnnnnnnnnnnnnnnnnnnnnnnnnnnnnnnnnnnnnnnnnnnnnnnnnnnnnnnnnnnnnnnnnnnnnnnnnnnnnnnnnnnnnnnnnnnnnnnnnnnnnnnnnnnnnnnnnnnnnnnnnnnnnnnnnnnnnnnnnnnnnnnnnnnnnnnnnnnnnnnnnnnnnnnnnnnnnnnnnnnnnnnnnnnnnnnnnnnnnnnnnnnnnnnnnnnnnnnnnnnnnnnnnnnnnnnnnnnnnnnnnnnnnnnnnnnnnnnnnnnnnnnnnnnnnnnnnnnnnnnnnnnnnnnnnnnnnnnnnnnnnnnnnnnnnnnnnnnnnnnnnnnnnnnnnnnnnnnnnnnnnnnnnnnnnnnnnnnnnnnnnnnnnnnnnnnnnnnnnnnnnnnnnnnnnnnnnnnnnnnnnnnnnnnnnnnnnnnnnnnnnnnnnnnnnnnnnnnnnnnnnnnnnnnnnnnnnnnnnnnnnnnnnnnnnnnnnnnnnnnnnnnnnnnnnnnnnnnnnnnnnnnnnnnnnnnnnnnnnnnnnnnnnnnnnnnnnnnnnnnnnnnnnnnnnnnnnnnnnnnnnnnnnnnnnnnnnnnnnnnnnnnnnnnnnnnnnnnnnnnnnnnnnnnnnnnnnnnnnnnnnnnnnnnnnnnnnnnnnnnnnnnnnnnnnnnnnnnnnnnnnnnnnnnnnnnnnnnnnnnnnnnnnnnnnnnnnnnnnnnnnnnnnnnnnnnnnnnnnnnnnnnnnnnnnnnnnnnnnnnnnnnnnnnnnnnnnnnnnnnnnnnnnnnnnnnnnnnnnnnnnnnnnnnnnnnnnnnnnnnnnnnnnnnnnnnnnnnnnnnnnnnnnnnnnnnnnnnnnnnnnnnnnnnnnnnnnnnnnnnnnnnnnnnnnnnnnnnnnnnnnnnnnnnnnnnnnnnnnnnnnnnnnnnnnnnnnnnnnnnnnnnnnnnnnnnnnnnnnnnnnnnnnnnnnnnnnnnnnnnnnnnnnnnnnnnnnnnnnnnnnnnnnnnnnnnnnnnnnnnnnnnnnnnnnnnnnnnnnnnnnnnnnnnnnnnnnnnnnnnnnnnnnnnnnnnnnnnnnnnnnnnnnnnnnnnnnnnnnnnnnnnnnnnnnnnnnnnnnnnnnnnnnnnnnnnnnnnnnnnnnnnnnnnnnnnnnnnnnnnnnnnnnnnnnnnnnnnnnnnnnnnnnnnnnnnnnnnnnnnnnnnnnnnnnnnnnnnnnnnnnnnnnnnnnnnnnnnnnnnnnnnnnnnnnnnnnnnnnnnnnnnnnnnnnnnnnnnnnnnnnnnnnnnnnnnnnnnnnnnnnnnnnnnnnnnnnnnnnnnnnnnnnnnnnnnnnnnnnnnnnnnnnnnnnnnnnnnnnnnnnnnnnnnnnnnnnnnnnnnnnnnnnnnnnnnnnnnnnnnnnnnnnnnnnnnnnnnnnnnnnnnnnnnnnnnnnnnnnnnnnnnnnnnnnnnnnnnnnnnnnnnnnnnnnnnnnnnnnnnnnnnnnnnnnnnnnnnnnnnnnnnnnnnnnnnnnnnnnnnnnnnnnnnnnnnnnnnnnnnnnnnnnnnnnnnnnnnnnnnnnnnnnnnnnnnnnnnnnnnnnnnnnnnnnnnnnnnnnnnnnnnnnnnnnnnnnnnnnnnnnnnnnnnnnnnnnnnnnnnnnnnnnnnnnnnnnnnnnnnnnnnnnnnnnnnnnnnnnnnnnnnnnnnnnnnnnnnnnnnnnnnnnnnnnnnnnnnnnnnnnnnnnnnnnnnnnnnnnnnnnnnnnnnnnnnnnnnnnnnnnnnnnnnnnnnnnnnnnnnnnnnnnnnnnnnnnnnnnnnnnnnnnnnnnnnnnnnnnnnnnnnnnnnnnnnnnnnnnnnnnnnnnnnnnnnnnnnnnnnnnnnnnnnnnnnnnnnnnnnnnnnnnnnnnnnnnnnnnnnnnnnnnnnnnnnnnnnnnnnnnnnnnnnnnnnnnnnnnnnnnnnnnnnnnnnnnnnnnnnnnnnnnnnnnnnnnnnnnnnnnnnnnnnnnnnnnnnnnnnnnnnnnnnnnnnnnnnnnnnnnnnnnnnnnnnnnnnnnnnnnnnnnnnnnnnnnnnnnnnnnnnnnnnnnnnnnnnnnnnnnnnnnnnnnnnnnnnnnnnnnnnnnnnnnnnnnnnnnnnnnnnnnnnnnnnnnnnnnnnnnnnnnnnnnnnnnnnnnnnnnnnnnnnnnnnnnnnnnnnnnnnnnnnnnnnnnnnnnnnnnnnnnnnnnnnnnnnnnnnnnnnnnnnnnnnnnnnnnnnnnnnnnnnnnnnnnnnnnnnnnnnnnnnnnnnnnnnnnnnnnnnnnnnnnnnnnnnnnnnnnnnnnnnnnnnnnnnnnnnnnnnnnnnnnnnnnnnnnnnnnnnnnnnnnnnnnnnnnnnnnnnnnnnnnnnnnnnnnnnnnnnnnnnnnnnnnnnnnnnnnnnnnnnnnnnnnnnnnnnnnnnnnnnnnnnnnnnnnnnnnnnnnnnnnnnnnnnnnnnnnnnnnnnnnnnnnnnnnnnnnnnnnnnnnnnnnnnnnnnnnnnnnnnnnnnnnnnnnnnnnnnnnnnnnnnnnnnnnnnnnnnnnnnnnnnnnnnnnnnnnnnnnnnnnnnnnnnnnnnnnnnnnnnnnnnnnnnnnnnnnnnnnnnnnnnnnnnnnnnnnnnnnnnnnnnnnnnnnnnnnnnnnnnnnnnnnnnnnnnnnnnnnnnnnnnnnnnnnnnnnnnnnnnnnnnnnnnnnnnnnnnnnnnnnnnnnnnnnnnnnnnnnnnnnnnnnnnnnnnnnnnnnnnnnnnnnnnnnnnnnnnnnnnnnnnnnnnnnnnnnnnnnnnnnnnnnnnnnnnnnnnnnnnnnnnnnnnnnnnnnnnnnnnnnnnnnnnnnnnnnnnnnnnnnnnnnnnnnnnnnnnnnnnnnnnnnnnnnnnnnnnnnnnnnnnnnnnnnnnnnnnnnnnnnnnnnnnnnnnnnnnnnnnnnnnnnnnnnnnnnnnnnnnnnnnnnnnnnnnnnnnnnnnnnnnnnnnnnnnnnnnnnnnnnnnnnnnnnnnnnnnnnnnnnnnnnnnnnnnnnnnnnnnnnnnnnnnnnnnnnnnnnnnnnnnnnnnnnnnnnnnnnnnnnnnnnnnnnnnnnnnnnnnnnnnnnnnnnnnnnnnnnnnnnnnnnnnnnnnnnnnnnnnnnnnnnnnnnnnnnnnnnnnnnnnnnnnnnnnnnnnnnnnnnnnnnnnnnnnnnnnnnnnnnnnnnnnnnnnnnnnnnnnnnnnnnnnnnnnnnnnnnnnnnnnnnnnnnnnnnnnnnnnnnnnnnnnnnnnnnnnnnnnnnnnnnnnnnnnnnnnnnnnnnnnnnnnnnnnnnnnnnnnnnnnnnnnnnnnnnnnnnnnnnnnnnnnnnnnnnnnnnnnnnnnnnnnnnnnnnnnnnnnnnnnnnnnnnnnnnnnnnnnnnnnnnnnnnnnnnnnnnnnnnnnnnnnnnnnnnnnnnnnnnnnnnnnnnnnnnnnnnnnnnnnnnnnnnnnnnnnnnnnnnnnnnnnnnnnnnnnnnnnnnnnnnnnnnnnnnnnnnnnnnnnnnnnnnnnnnnnnnnnnnnnnnnnnnnnnnnnnnnnnnnnnnnnnnnnnnnnnnnnnnnnnnnnnnnnnnnnnnnnnnnnnnnnnnnnnnnnnnnnnnnnnnnnnnnnnnnnnnnnnnnnnnnnnnnnnnnnnnnnnnnnnnnnnnnnnnnnnnnnnnnnnnnnnnnnnnnnnnnnnnnnnnnnnnnnnnnnnnnnnnnnnnnnnnnnnnnnnnnnnnnnnnnnnnnnnnnnnnnnnnnnnnnnnnnnnnnnnnnnnnnnnnnnnnnnnnnnnnnnnnnnnnnnnnnnnnnnnnnnnnnnnnnnnnnnnnnnnnnnnnnnnnnnnnnnnnnnnnnnnnnnnnnnnnnnnnnnnnnnnnnnnnnnnnnnnnnnnnnnnnnnnnnnnnnnnnnnnnnnnnnnnnnnnnnnnnnnnnnnnnnnnnnnnnnnnnnnnnnnnnnnnnnnnnnnnnnnnnnnnnnnnnnnnnnnnnnnnnnnnnnnnnnnnnnnnnnnnnnnnnnnnnnnnnnnnnnnnnnnnnnnnnnnnnnnnnnnnnnnnnnnnnnnnnnnnnnnnnnnnnnnnnnnnnnnnnnnnnnnnnnnnnnnnnnnnnnnnnnnnnnacgtttgttgatttgcgtatgttgacccagccttgcgtcccagggatgaagcccacttgatcatggtgggtaagctttttgatgtgccgctggatttggtttgccagtattttattgaggatttttgcctcgatgttcatcagggatattggtctaaaattctctttttttgttgtgtctctgccaggctttgatatcaggatgatgctggactcataaaatgatttaaggaggattccctctttttctattgcttggaatagtttcagaaggaatggtaccagctcctccttgtacttctggtagaattcagctgtgaatccatctggtcctggactttttttggttgctaagctattaattattgcctcaatttcagagcctgttattggtctattcagagattcaatgtcttcctgatttagtcttgggagggtgtacgtgtcaaggaatttattcatttcttttagattttctagtttatttgtgtagaggtgtttatagtattctctgatggtactttgtatttctgtgggatcggtggtgatatcccctttatcattttttattgcatctatttgattcttctctcttttcttctttattagtcttgctagtggtctatcagtttggttgatcttttcaaaaaaccagctcctggattcattgattttttaaagggttttttgtgtctctatttccttcagttctgctctgatcttagttttttcttgccttctgctaggtcttgaatgtgttatgctcttgcttctctagttctttcaattgtgatgttggggtgtcaattttagatctttcctgctctgttctgtgggcatttagtgctataaatttccctctacacactgctttgaatgtgtcccagagattctggtatgttgtgtctttgttgtcgttagtttcaaagaacatctttatttctgccttcatttcgttatgtacccagtagtcattcaggagcaggttgttcagtttccatgtagttgagcggttttgagtgaatttcttaatcctgagttctaatttgattgctctgtggtctgagagacagtttgttataatttctgttcttttacatttgctgaggagtgctttacttccaactatgtggtcaattttggaataagtgcggtgtggtgctgagaagaatgtatattctgttgatttggggtggataattctgtagatgtgtattaggtctacttggtgcagagctgagttcaattcctggatatacttgttatctttctgtctcattgatctgtctaacgttgacagtggggtgtcaaagtctctcattattattgtgtgggagtctaagtctctttctaggtctctaaggacttgctttatgaatctgggtgctcctgtattgggtgcatatatatttaggacagctagctcttcttgttgaattgatccttttaccattatgtaatggccttctttgtctcttttgatctttggtgctttaaggtctgttttatcagagactaggattgcaacccctgcctttttttgttttccatttgcttggtagatcttcctccatcactttattttgagcctatgtgtgtctcttcacgtgagatgggtttcctgaatacagcacactgatgggtcttggctctttatccaatttgccagtctgtgtcttttaattggagcatttagcccatttatgtttaaggttaatattcttatgtgtgaacttgatcctgtcattatgatgttagctagttattttgctcattagttgatgcagtttcttcctagcctcgatggtctgtacaatgtggcatgtttttgcagtggctggtactggttgttcctttctatgtttagtgcttccttcaggagctcttttagggcgggcctggtggtgacaaaatctctcagcatttgcttgtctctaaagtattttatttctccttctcctcttatgaagcttagtttggctagatatgaaattctgggttgaaaattcttttctttaagaatggtgaatattggtccccactgtcttctggcttgtagagtttctgccaagagatcagctgttagtctgatgggcttccctttgtgggtaacccgacctttctctctggctgcccttaacattttttccttcatttctactttggtgagtctgacaattatgtgtcttggagttgctcttctcgaggagtatctttgtggcgttctctgtatttcctgagtttgaacgttggccttccttgctagactggggaggttctactggataatatcctgcagagtgttttccaacttggttccattctccccatcactttcaggtacaccaatcagacgtagatttggtcttttcacatagtcccatatttcttggaggctttgttcgtttctttttattcttttttctctaaacttctcttctcgcttcatttcattcatttgatcttccatcactgataccctttcttccagttgattgaatcggctactgaggcttgtgcatttgtcacgtagttcttgtgccttggttttcagctccatcaggtcctttaagggcttttcttcattggtgattctagttagccattcgtctaattttttttcaaggtttttaacctctttgccatgggtttgaacttcttcctgtagctcggagcagtttgatcgtttgaagccttcttctctcagctcgtcaaagtcattctccgtccagttttgttctgttgcgtgtgaggagctgctttcctttggaggaggagaggcactctgatttttagagtttccagtttttctgctctgttttttccctattctttgtggttttatctacctttggtctttgatgatggtgatgtagagatggggttttgggtaaggagctgtcccatcactatttattgaaaacatttttttcctgcatgcctgcatactttgtcattcatgaatttcattacataannnnnnnnnnnnnnnnnnnnaggaaatttttcttgctatacatttccatgtaatggaatttatttgtaagagtgagggtagatttggggagttgaacttatgtgaatgcgtatgtgtaatgagggaaactagggaaatccattaggctttcctactttcccaccctaaaacatactgtgtatcttcagaatgaaccattcaagttttactaaattgtgtatttcagaattcatgtttttactttgttttggcagtgtgctgatttttattttcttgcttactcaaaagtgatttgtaaagggaacaattttatatttaacccagcctaatgaaaaataatcccatagttttaaatttatgcaatccctgttagaccttcgttttctcaaataaaataatttagaagtatttctatgctaacacacagatttggagaaaaaaactctgagctatatcatgtagcattactcttcatttaaagtatttcataatatattatgaaccttgtcatagtgtgtgcatacatttattagtttttttttcttatcatttctgggttatcttgtagaaaaggacttccattctctgagactataatgttacctctattttcttagagtacttttatgaccctgctgtattttgttgtttctgactttttaaaaatttggcagaaattaatagcattaagaatagctggacttggaggtgacctactgggagattgaggtaggaggattgcttgaagccaggaggtcgagactgcagtgagctgtgttggtgccactgcactccagcttgagtgacagagcaagattctgtctcaaaaaataaaacaaaaacaaaaacccaaaaaacagtagatttctttttttacttcactgataacatttattctacctattttaaaattatttgcctattctgctaaataatggttttgctttctaatttttatgtacacagctttcatctaaatccatgaactgaggtagacttccactccaactattatctttaagaatcataaggaaatgtgaactaacaaaccaaaggttatactgggtatgaaaaagattagctaatttaacttcctaaccagtggtgtgtarctgtagcagtgctagcaaactaatacaagaactaataataacaaaggtttattttcttacagttctgatggctagacgtccaaaatcagggtttgccaggtctgttttttcttgaagtttttatggccaccatcttatattctcatatagctttttctctgcatatgggcattcctggtgtcacttcctcttcttggaaggacactagtcataatggattagagacccacccttgaactctttaagcttaattatctctaaaggccttatcttcaaatacagtcaggcttcatatacaaattttaggggagtacaattcaattcataacactgatttttaaaacagattatttaaagtttgtgtttaaagttttaaagggtgcataatattaattggttcataagtcaactgaaaaaaatatttgtratacataacacaggaaaaaggcttaaattacytaaaatgccctaacagttacaagtcaagaagataaatggccagatagaaaatgaaatgatttgtaccctgccccagaaaatgtctgagggtaaatgctaaatgattaagcaattttagggtgcttcatactagagacataaggacaatgaattcaatgcaactttttttttgtaatggcagaattagaacaatgcaagattgactcatgaactttaatttttgcacatttaaaaatattttatatatcttttaaaatatgcatgtatttkccacttttagaaactatatcaactttgctaatacatgagtgtaaagttttgctgccagtattagaaacatgattcttccaatggaaaccagaagcctgactggttttaacattctctttaaaaactttataggtctgctagttatatgttatttcctcaacattctattatttagttttttgaaatgtatacaaacacatatgtagaatttctacttatgctcaacattagtgtagagatacaatcatgtatttcctttttatttttccccaagttctatgacagttttccatcaggtgactatagcatgacattctgtcaattgacaattgactgtaatttttttgtggaatgcagtgaacatttgctatgtgtctcctgttccagaagaacaattktatttacaggatataaaccatttattttcacccaataagtataggtataggtataggtataggtgtgggtataggtatagaaatatgtatagstataaataatctcatctcagagacattatactagtttatactttcacgagtagggtgttatatttcccattgttctgcaaactattcaattcatttactgacttttattaacagttgtattgagatataatttacatgctttaaaatttacagtttcagtctacaactcaatgattgctacacctgtaatcccagctctttaggaggccaaggtatatcacttgagcccaggagtttgaggccagccagggaaacagagagagacatcatctctacaacacaaacaaacaaaaaattaaaactgaaaaataaaaaatagtagaaaagaaaagaaaaaaatagctaggtttggtgttgtgcacctctggtcccagctactgagaggctgaggtaggaggatttcttgggctcataaggtcaaggctgcagtgagctgtgttggcaccactgcattccagcctggaagacagagaaaaacgctgtgtcaaaaaaaaaaaaaaatcttatatattctagatgagcctgagccagttttatatattgcagatatcttcctacagtttatgatggttttctyattatcttttaatatcagataatgaatygtagattttaaatttaatggaagtgaatatattaatcatactctttataatttttctttatgttcctgaggaaatccttttctactatgaaattaaaaaaaggatttttatgctgtcttaatagaagctatggttttgcttttactttaaacatataaatttgtttaaaattatttattttttacaaaaattactggacatggtggcatgtgcctgtggtcccagctactcaggaggctgaggtgggagaatggcttgaacccaggaggcagaggttgcagtgagctgagatggcgccactgcactccagcctgggcaacaagagtgaagctctgtctctaaaaataatgataataaaataaattattttttgtgtgtattttgcagagttgagtccatttctttgcatttttttcattttttccctccttccttcttccctgactccctctcagcctacctattttctttttttctttttctttttattatactttaagttttagggtacatgtacacaacgtgcaggttagttacatacatgtgccaggttggtgtgctgcatccattaactcatcatttaacattaggtatatttccyaacgctatccttcccccctycccccaccccacaacaggcccyggtgtgtgatgttccccttcctgtgtccayatgttctcattgttcaattccctcctatgagtgagaacatgcagtgtttgtttttttgtccttgagatagtttgctgagaatgatggtttccagcttcatccatgtccctgcaaaggacatgaactcatcattttttatggctgcatagtattccatggtgtatacgtgccacattttcttaatccagtctatcattgttggacatttgggttggttccaagtctttgctattgtgaatagcgctgcaataaacatacgtgtgcatgggtctttatagcagaatgatttatgatcctttgggtatataygcagtaatgggatggctggatcaaatggtatttctaattctagatccctgagaaattgccacactgacttccacaatgattgaactagtttacagtcccaccaacagtgtaaaagtgttcctatttctcgacatcctctccagcacctgttgtttcctgactttttaatgatcgccattctaactggtgtgagatggtatctcattgtggttttgttttgcatttctctgatggmcagtgatgataagcattttttcatgtgtcttttggctgcataaatgtcttcttttgagaagtgtctgttcatatccttcacccacttgttgatgggtttgtttgtttgtttcttgtaaatttgtttgagttcattgtagattctggatattagccctttgtcagatgagtagattgcaaaaattttctcctattctgtaggttgcctgttcactctgatggtagtttcttttcctgtgcagaagctctttagtttaattagatcccatttgtcaattttggcttttgttgccattgcttttggtgttttagacatgaagtccttgcccatgcctatgtcctgaatggtattgcctaggttttcttctagggtttttatggttttaggtctaacatgtaagtctttaatccagcttgaattaatttttgtataaggtgtaaggaagggatccaggttcagctttctacatatggctagccagttttcccagcaccatttattaaatagggaatcatttccccatttcttgtttttgtcaggtttgtcaaagatcagatggttgtagatatgcagcattatttctgagggctctgttctgttccattggtctttatctctgttttggtaccagtaccatgctgttttggttactgtagccttgcagtatagtttgaagtcaggtagtgtgatgcctccagctttgttcttttggcttaggattgacttggcaatgcgggctcttttttggttccatatgaactttaaagtagttttttccarttctgtgaagaaagtcattggtagtttgatggggatggcattgaatctataaatgaccttgggcagtatggccattttctcgatattgattcttcctacccatgagcatggaatgttcttccatttgtttgtatcctcttttatttcattgagcagtggtttgtagttcttgaagaggtccttacgtcccttgtaagttggattcctaggtattttattctctttgaagcaattgtgaatgggagctcactcgtgatttggctctctgtttgtctgttattggtgtataagaatgcttgtgatttttgcacattgattttgtatcctgagactttgctgaagttgcttatcagcttaaggagattttgggctgagacgatggtgttttctagatatacaatcatgtcaactgcaaacagggacaatttgacttcctctttcctaattgaatacsctttatttccttctcctgcctgattgcmctggccagaacttccaacactatgttgaataggagtggtgagagagggcatccctgtcttgtgccagttttcraagggaatacttccagtttttgtccattcagtatgatattggctgtgggtctgtcatagatagctcttattattttgaratacrtcccatcaatacctaatttattgagagtttttagcatgaagcgttgttgaattttttcaaggccttttctgcatctattgagataatcatgtggtttttgtctttggttctgtttatatgctggattacgtttgttgatttgcgtatgttgacccagccttgcgtcccagggatgaagcccacttgatcatggtgggtaagctttttgatgtgccgctggatttggtttgccagtattttattgaggatttttgcctcgatgttcatcagggatattggtctaaaattctctttttttgttgtgtctctgccaggctttgatatcaggatgatgctggactcataaaatgatttaaggaggattccctctttttctattgcttggaatagtttcagaaggaatggtaccagctcctccttgtacttctggtagaattcagctgtgaatccatctggtcctggactttttttnnnnnnnnnnnnnnnnnnnnnnnnnnnnnnnnnnnnnnnnnnnnnnnnnnnnnnnnnnnnnnnnnnnnnnnnnnnnnnnnnnnnnnnnnnnnnnnnnnnnnnnnnnnnnnnnnnnnnnnnnnnnnnnnnnnnnnnnnnnnnnnnnnnnnnnnnnnnnnnnnnnnnnnnnnnnnnnnnnnnnnnnnnnnnnnnnnnnnnnnnnnnnnnnnnnnnnnnnnnnnnnnnnnnnnnnnnnnnnnnnnnnnnnnnnnnnnnnnnnnnnnnnnnnnnnnnnnnnnnnnnnnnnnnnnnnnnnnnnnnnnnnnnnnnnnnnnnnnnnnnnnnnnnnnnnnnnnnnnnnnnnnnnnnnnnnnnnnnnnnnnnnnnnnnnnnnnnnnnnnnnnnnnnnnnnnnnnnnnnnnnnnnnnnnnnnnnnnnnnnnnnnnnnnnnnnnnnnnnnnnnnnnnnnnnnnnnnnnnnnnnnnnnnnnnnnnnnnnnnnnnnnnnnnnnnnnnnnnnnnnnnnnnnnnnnnnnnnnnnnnnnnnnnnnnnnnnnnnnnnnnnnnnnnnnnnnnnnnnnnnnnnnnnnnnnnnnnnnnnnnnnnnnnnnnnnnnnnnnnnnnnnnnnnnnnnnnnnnnnnnnnnnnnnnnnnnnnnnnnnnnnnnnnnnnnnnnnnnnnnnnnnnnnnnnnnnnnnnnnnnnnnnnnnnnnnnnnnnnnnnnnnnnnnnnnnnnnnnnnnnnnnnnnnnnnnnnnnnnnnnnnnnnnnnnnnnnnnnnnnnnnnnnnnnnnnnnnnnnnnnnnnnnnnnnnnnnnnnnnnnnnnnnnnnnnnnnnnnnnnnnnnnnnnnnnnnnnnnnnnnnnnnnnnnnnnnnnnnnnnnnnnnnnnnnnnnnnnnnnnnnnnnnnnnnnnnnnnnnnnnnnnnnnnnnnnnnnnnnnnnnnnnnnnnnnnnnnnnnnnnnnnnnnnnnnnnnnnnnnnnnnnnnnnnnnnnnnnnnnnnnnnnnnnnnnnnnnnnnnnnnnnnnnnnnnnnnnnnnnnnnnnnnnnnnnnnnnnnnnnnnnnnnnnnnnnnnnnnnnnnnnnnnnnnnnnnnnnnnnnnnnnnnnnnnnnnnnnnnnnnnnnnnnnnnnnnnnnnnnnnnnnnnnnnnnnnnnnnnnnnnnnnnnnnnnnnnnnnnnnnnnnnnnnnnnnnnnnnnnnnnnnnnnnnnnnnnnnnnnnnnnnnnnnnnnnnnnnnnnnnnnnnnnnnnnnnnnnnnnnnnnnnnnnnnnnnnnnnnnnnnnnnnnnnnnnnnnnnnnnnnnnnnnnnnnnnnnnnnnnnnnnnnnncagctcccatcaggtcctttaagggcttttcttccattggtgattctagttagccattcgtctaattttttttcaaggtttttaccctctttgccatgggtttgaacttccttccctgtagctcggagcagtttgaatcgtttgaagccttcttctctcagctcgtcaaagtcattctccgtccagttttgttctgttgcgtgtgaggagctgctttcctttggaggaggagaggcactctgatttttagagtttccagtttttctgctctgttttttccctatctttgtggttttatctacctttggtctttgatgatggtgatgtagagatggggttttgggtaaggagctgtcccatcactatttattgaaaacattttttcctgcatgcctgcatctttgtcattcatgaatttcattacataagtggttttgttttttttcactatcttaactgctttcctttatattagttcttgatatctggtaaaataatattccttcctcttgtatctcttcatctggagttccttgattatttttggctctttgcttttccgtatggattttagaatcacatataaagttctacaacaattgtaaaggtttatgaaacttgtgattttgaaattttaataagatttatttatttattcatttattttttattttttttagatggagtctctctctgtcacccagggtggattgcagtggcgtgatcttggctcactgcaacctcctcctcccgggttcaagcaattctctgcctcagcctctagagtatctgggattacaggcacctgccaccacgcccggctaatttttttgtatttttagtagagacggggtttcaccatcttggccacactggtcttgaactcctgacccttaataagattcataattaatctataaattgattttagagaatggacatctttatgaattttgatcttcttatctgtgaacaagttagctctatttacttttctattgtgggttttaatacaattttgcaattataagcatgaatagattatgtaacttttgtaaaaactattccaagtttttcagtggaaatttagtttttaaattaaatcttcgtttacttgtgcacagaaatttcagttgctatgttatagttttgcattcagcaaaattaaaacttctcttcctcattctgaagatttatctgtatattgttttggatttgttacataacatgatatcagatagatagatagatagatagatagatagatagatagatagataaactcctaaatctttgttattctaaaaattgtttttcttgtttaactgcagtaaagtattgttgaattaaagttgtcattagtacataccactgactttttttcgtcttgataagaatgctcttactattttaacataaaggttacatttgatgaaacttttttgtttggagtgcctttgttggtgtaaagaaattcttttctatttgtagtttactaatagaatttcaagattatgaacaactgtttttattgcttgagatgataggattttcctctttttaccttctaataaggtgaacttatctacttttcagttttaagctatcatttcattactataatgagtccaactttttcatatcttttgttaaaatattactagatttagtcagataatcattttaactgtaacagcatctatttttgagtatgattgacttttaatttgatttctatttcaataatatactttttcttgattatattaattattcaagttgtcttagttttactctaccctttaatttctcaagttgcatggttgtggtacagccctcctttgcccaagagtaagagtctctgagggccagactactatgagtgctgctgctcctctagacctggccacccagtagggctgtcacaccccagactggtgctagggaatgtctgcaagggatccagtgatatgacctgtcctctagtctcccatcagtggataccagcaccagctctgacaggggtggcaggggagttacatagactttgtgagattccttggttattggccttagcaatgttgactttctcaaatgccagctgtggtagtaacgtactggcatgtggacaaactcaggacctcctggttacccaaagtgatgcaggtaatagtgatagctgaggtcatgcagaagtgttttccttcttggggttgtgttattatgcctgcagatgctgtaatggactgtcagttggcctctagccaagaggtggcacttgcaaaagagctccaattgtagtggtagaagtgagttttgtgcttgccttatgttacccaggagtagtactccrgggggcggggaagggcatggagctccccaaattctctgtcctttctgttaagccaccagggcaggtgcaggagcaagaacacgaggctgggtcagtcaagtctgtgctctggctccccctatgtaggcatgagtagtggtcacagtgaggatcagagggaagctctctggctgttggggtaatgttccagggagaagtgcagccgcctctgctgcacagaagaatccacatggggagtatgtgtagcagcaggaagtaaacctcacctggctcctacatgcttggcaaggcagttctcmcatttgcagtattccactagcatcaggtaactggattccaggcacactcctctcaaaactcaaaaatgccccaggtcataagccttccccactgatatggtttagatctgtgtctctgcccaagtcttatgtcaaattgtgatccccaatgttggaagtggggcctgattggagaggattggatcatgggggtagagtattcatgaaaggtttagcrccatcctcccttggtactcttcttgtgatagtgagtgagttatcacgagatctgtttttttttttaagtgtatagcacctttgccctcactctctctcttgctcctgctcccatcatgcaaaacaacctgctgctctgttgccttctgccatgattagatgcttcctgaggcctccccagaagcagaaaccactatgcttcctgtacagcctatggraccataagmcaattaaacctctttttaaaaaaataaattactcagtttcaagtatttctttatgggaataagagaaaggcctaacacacycactgrgatggaaactgtggctttcaggccatgctcctctaaagtagggatgtccatctcttgtgcctgtggccatagcacacttcctactcattcctcaattctggccaaagggagtttgtccccactcaaaattgtactgtgattctcagttgggagctctctcaacctgtgaccacaacctgagttagttgacagacttccgcaaggtcccttgtgatataggattaggagtgacttttctctgtccctgctggagtctgggagtgcacacaaaccatgtccagatgctgctctttctcatgtrtttcccactgctcactaaagcagctccagtactgggtagggttaaggcatttccccgtggtctggattgccaggtttcccagtgggtgtatatatcccagaggcagtttctccccactcacactctggggactcatggtttttcacctggctcacaggataggctgctgcccaccacttttttcaaagggtttatggttacttttatttttctgttaagtttctgtgttgcttcttgtaaacaaattcacagtgtgtctctctattcactatattgtcttttcaagtgggagaggcatgctagcaatgcctctgatttgctgtcctggggaagaaacttatctggcatttaactgaagagagaaaatgaatgtttaatttgtcagtagttgtagytatagtttaattttggttgatttattattgtgaaattacacttacacattacttctttttcactaacaaaaaatcctccctccttccttcctttcccaggccccactctactccctctcttcttccctttctccttttctccrtctctctctcttcctctctctctctctytctttatttctacctctttcttccctttttctcacttttccttgctttcctctctctccctccctgcttgcctgccttcctcccttcctcccttccttccttcttttcttccttcctccttcctttcttccatcctctttaatttctccttcttcttaatatataaacatgataagtattctagaagacctaattcagttttttcttaacagcttatcaggaaattactggtagcttttttttctcctcagcaaacatawaagctaatttcctccatccaacttgttacattttctccaggaagacccactacgttatgtgagactatggggaaagctgaaatttggttaatccgaacatattgggattttgaatttcctcgtccatacttacctaattttgagtttgttggaggattgcactgcaaacctgccaaacctttacctaaggtaggtctacaacagtggaggattttatgctcttcataataaaatacttaattttcttttaaagtttatagcctcaataacaaataaatgctgctggacatttcagtttgctactccacatctattttccttgtgatagaggtctcctacaagtgatattaggtgttttgaactttacattgacaatttaaactgaagaataaaatgattaaagctgtgtgttacaaatatcagtgtgtctacaccttgatactggacttggygggacagaaaaccagatcatagaaattacgaaggatactgccctagtcttaccaagccacatagcattatgaacagtaatatttaccaaatttcttgagagataaagatgtcttcatgaaaactgttgggtgaattccatttaacttggtgagtaagaggtcattattgaagaaagacaatgaaataagscagggctcttaggttttaatcttgagaatttattagacagttgtgccatctactgttaggaaacaattggttaaaaaaaaaactcttttgagttgacaatggtgagtttagtttctgacctatttactgtaaggaacaaaaaggagttttggtaatttctagaaatcatttaggtagtacaaagtgtaaattcaagcaggaagcattagaaatagattcagattcatcagcataaagtagctattataaaactgagagatacaaatgttgtattggttctttataaatatagtgtcaggttttatggcatgagaaggaaattgtatgctacaatatgaagtcttcagaaaagaaatgtggaatataagaaatgttatacagaaaaagtgttgagaagcaaaatagagtacaggtacacatggtaggaacaatgtatttaactatcaataaggagtgaggaaacaggctattatttacttggtttatacacaagcaaatgtaatctttttagaaagttgcaggttcctataagagtactaaatttctgtttatagtaacagacatatttaagtttaaaattttatttcaggattctaaaaattttatttcaggattttctggccagtcaagttatggctgcaggcaagctctagtgawtgtttattataggaaataatgtaccaatatctaaataaagacacagaaatattcatgacgtatccataggtcactggataatgacccatgacaccctattatgtttttcctcccaaacccactttttacacaaacacacacatatacacatattctcacaatttcacaaagacaaatcagccatgttttayratagcagacattatgccattatgtattcaatcaatataaatatcgatataggctttgggaamtatgaataccaaccatgggttatattgctgatgaaataattacgccaatcactgggtacacagaatacaaaaacaacaagagactgtcaaatgaaaaatccatatcagtatgatagatgtgtacgtttgtgtgtatgtgtatgtttgtgtgtgtgtgtgtgtgtkttattttaatgaattaatatctgtttggaaaataaatcaaaatggcaaagcaccaattcctgggacttcagaaatattctcctgacattaactaagccaaaaatagcaatctattttcacttaagatatcaccctcccctagttatttggctagtcataaagtgatacatcagtgattccagtgtgatcccaacaaatatttgcacagggaatgcaggatacatctgtagaaagtagcattcatatagatatgatgtgaaaggccttaatctcagattttgcagtgtcaaatttgcaaaactataagtaattacctaaggaattttattggcagacaaatttatattttaattttgctttaaggctcaaattaagggcacatagctaacatcacactcatggcagcttatacatcaagaagaaagagatgcactgtctcatacgcatcattgtgattacagttggagatgcactttgttatcctgttctaaaatatgttacaattagatgccattttaaacaaattttttcttagacctatkaatcaaaggaggcatacagttgagaaaatgatcttgaatgcttaacaggaaccgataaatttattaataattttattagatataactggmatgctaacaattttaaaagcctagctcagtatcctttgttgggcttccctccaaaaactgtttttatgagtttgcaaacaaccctgttgattggttaaattaagccttgggggtaacaatttcagttagcatgmgaagagttgtcccttatttagtgttcatttctgtaatggttttgcttycatgcttggacttgtaatcactgattatatatttaagttatacatttcagagacgtgtttcctcttaaggagactatttctgactgggcacagtggctcatgcctgtaattccagcactttgggagaccaaggcaggtggatcactggaggccaggaggtggagaccagcctggccaacatggtgaaacaccatctctactaaaaatacaaaactcagccagacacgatggcatgagactataatcccagttactcaggaggctgaggtgtgagaatcacttgaaccggggaggtgaggttgcagtgagcagagatcatgccaytgcgctccagcctgggcgacagagcgagactctgccaaaaaaaaatrtagaaactagatctttctacatgtcagaagacagacagttcaacagtttctctgacatatatcttaattttacctacttaaatgtgtaagtaaacttattttttcttatgatgctacacctttgtaatagaaaatatattatgtatgcaggaaatggaagaatttatccagagctcaggtaaaaatggtgttgtggtgttttctctgngatcaatggtcaaaaaccttacagaagaaaaggccaatcttattgcctcagcccttgcccagattccacagaaggtcagtacagcctggaatcctggtacacagctttttactaatgggagagacaatgcagctagtaatgttctttccatatgaaaatcaaaactcattatacactgagtatcactagtaacagttgtaagtaacgttgtgtaatatattaaaattgtgtacattagcacattgaatcatttgcctactgagccttggcattattttagaaacacatacttttttgaagtcatttatttttaatggaatagaaatgaaaactttaagcccctactgaccttttactatttgaaattttttgttctccactgactactttcaaaagttttgaagtttgttagctccatggtccaggaaaagagagtgtaaacacaaagcagggagaaattatgctaaaaatataattcgaatgtctaggttttattacaactctatcaaagtgtagttggtttagaagtagaagcctcaattcacttagcctttctaagttgaatattctctagctaaaaacaattaaaattcaaatattatagtccaacaacatgcaatttctgacttatgttattcaattaaccttaatttttatctctacaattttgcatttctattctttttatacttctattcatgacacaycctaggactctttatatttatgtattgtttaaagcacataacactcttcatgatttttcccctccatgttgtgattgattaaactggtactgtttacgttctatttcttcacttaaaatctaacttccaaaagcttttaagtgataaataycaaaacaataatactatacttggtagactattagtacaagactttacaaaaaggtacatataaacagtcctactacgtatctcaacgtttgtaaactactgcttatgtaattcccgtcttccaagtagctggctaaatgatttctaaataattctcccaacttaaaatgtcctcattgtgtttttccttgcaaaattaaagcaccattttccacaggttttatggagatacaaaggaaagaaaccagccacattaggaaacaatactcagctctttgattggataccccagaatgatcttcttggtaagactgtggggaaagaaaagctgtacagtgggacaatagacaagttaagtaactgtttaatagcaaataaattcaatacatttttaataatttaaaatgttatttgacactcaattttaaagcagatataattacataattggccattaattttatagactcaggcttcctctggttcacaaaagagcattttcagttaacattaatcacacttcaagtttcattttcagttcagatatcatctcctcagtaatatattcccagaaaatgcaaatgctgttaattactgcttttcctgggatcacagttttctgacattccaatgccctatgtgatctgcttttgtagaaaacgtatccttctttagagagttacattacagctttttgaccccttctgtctctcaaattctgctaatgtgttattattacacacccacttctcactccatcctcaaattaggacatcccaaaaccaaagcttttatcactcatggtggaactaatgggatctacgaagctatttaccacggagtccctatggtgggarttcccatgtttgctgatcagcctgataacattgctcacatgaaggccaaaggagcagctgtggaagtgaacctaaacacaatgacaagtgtggatttgcttagcgctttgagaacagtcattaatgaaccttcgtaagtactaaggctcctaaaaacttgcctaactttaattacattattcataataccagaaaatgtacattcttttatacttttgtaattattttccaataacaaccataacctgaccaatataaaaactattttatttgccaaactgctaaagtgatttgctgaaatcagaaaaataagaaaatcctaagacttcaaatattggccgggcgcagtggctcaagcttgtaatcctagcactttgggaggctgagggtggcagatcacaaggtccggagatcgagaccatcctggctaacacggtgaaaccctgtctctactaaaaatacaaaaatttagccgggtatgatagtgggcgcctgtagtcccagctactcaggaggctgaggcaggagaatggcgtgaacccrggaggtggaggttgcagtgagccaagattgtgccactgcactccagcctgggcaaaagagcaagactcagtctcaaaaaaaaaaacaaamaaaaaaaaagacttcaaatattatttcaatatttttcaaaataaagaatgctatgattatataaattctcattttttctggataatctgcttaatattataaactaattagtaagtatgtacatattataaactaatcagtaaatacaaaattgaaatgataatacgctcagtaataagcattcagaaataactattcacactgagtatataccattcgatacctttaattagtatatgtatacacacagagagaaaagatatagggtagtggataattttttaaatattgatttgtactatgtgatattttaaataaaatttaagtataattttatctgattcagcttttagattgaaatgaatctataaaatatattgagttatgtatacatagcttagtatattatatatataagtctatatatatagcttagtagatagtgtgtgtgtatatatattgtgtcttatttttttctctgaaagatctcaccaaagtaatatgatatatgtatatgtaattttgagtctttatttttgatgatgtgttttaattttagctacttatagttgaactcctgctttgaaatgtatctctatttcattccaaatttatattacttatgttgtaattttactttaccaatatttatgtcatttttttctcacatttactctgtttcctatattttaagggactcagtgttcaccgttgaattagagattatttattccaaaatatttaggatttatttcttgactgattatctcacatggaattttctttcaataaagacttggatattgaattctctgagataatgtttagcaatattcactcactgctttgttatgagaatgacttttatctgaatacaatatatttagctcttgctttctttccttcagacctgtggaaatattacttatggccttccagtttaaattgtgctatatgatttctgagtcctgcctgactgttgtatctttttgctttcttttcaacttggaaaaagaaatagttactttttaaaattcagaaactcrattatggtgtattcttacaaattattttatatatttttcttcaattatactgtgtctttacaacaatgttaatctaagataaaaaattatccagtttttcttttcagaaattaattttttttgtattatttctttgaatgccttttatttccattttttatctttacttctggagcaccagtttagtcttccctatgataaagtattttggtatgttttcctctcttatttcctgtctaattgttctaatcaatttttactattattaattcattgagattgcctccaatagttcacaaattagtaaatttattatttttaccatgagcattgcttgctgtttctaatttctttattaattctttcaactgtcatttttaacaacttgtatcatcagctcacctatstccttatcacttcctcttgctttgtaagtcaattttgatatcatattcattaccctccckctattattgtattttgaatctcctcttctttggactatatgcaatacctaaatgcatttttagtttctcatttatttttcaatatgtgtaagtggttatcaggctgttattttttctcggtcttggtgtttgctctgaatttgtgtgggtgctttaaacttgctttatgttgtattggacttaattgttttcatgtagagtccaagcttgaagaatagctttaatatttcattcacttttcctgaaggctgagattcaggagaggagaaggtaaactcggatggaatttagtgctttttcttaayggaagtaacctgcttaaaaacatctattcagtgacctttgccaggcattttagacacgagggctaatgtattcatttcaaaaaagaaagacactcaacagttggtttagattcataccaagactcagccctggttgtccacttttgctccccatccacattccaattaattgacttttattaatacrtacatgttgtataagtcataattttagaaatcataattcatgagctaagtggtgggttaggagcttcagcaaggctcagtatgatctttttttgactttaatgactagtcaattagactattacaaagttgttagttgctgacaattttgttcattttattaattatcagtgtaggtacagtctgtgattctctttaactctaatgcttaaaatgatggttamattttattattgacttgaaaactgtaaaccaaaaataaaaattctaagcttctcacccaaccatccaaatggacttcctcctcagccagaggaagttaaaatttaacctgagagtctgtttcaggccatgatgggaaatgagggtcaaatatgccttagtatacctctctggcattagcatcaacacagactttcagtctgataagaaacgtttcacaacctattctctctgaagcctactacctgaaggcttcctctgcaaataaggacttggatctccacaatcctttatcttaacccaggcattccttccctttgatcccaggtctttagagaaactcaaccaattgtcaaccagaatatgtttaaatttacctatagcctggatgcacccccacttcaagttgtcccacctttctaaaccaaaccaatgtatttcttaaacatatttgattaatgtcttatgccttcctaaaatgtaaaaaccaagctgcaccccagccaccttgggcacatatactcaggacttcctgagggctttatcatgggccatggtcactcatattttgctacaaataaatatcttcaaatattttagattttgattcatttcattgacaaaactattgatgcaaaaaaatgagaactataaatactgttagaaatttctaaataaatgcctaaaaattatttaatttaaagtaacttcactttaaccctaaaccaaataccacctctgggaacacaaggtatagtgtagagtatatatatggatgtgtttgtactccattctgttattcattaaagcaattaataaacattaacaattacatttgaatagaccattgtaatttaattattcagaatattttaacatatcagtcataaaacattagtgtataataaaacatgaaataataaatttatgagcatggtctttgtcccacatcatttataggaaaacatgctttcttcttcttattttttgattcacatgtacaaatttatttattgcctaaagtatattcggatgatccatgtgaaattacttacttatattctttttcactagacagacagacacacaaacacacacacacacacacacactcaacacatgtaaactactcctgctgctgaatctagttgtaccatgttctcttgtaaatgatgaccatgttccccattccccagtcctaacaatgtcctgccaacaccgggacatctctgcacaaaccatttaccttcgctcatcttcatgaatccaggctggaacttttcttccagacacaaaccaaaatgaaacctactaattttggtttaacaactagggaaactgcaagtgaagacacagtttgccttttaaatatgtagatatccacccaatattgtttgagaagccattagaactgttatctctgttactatctctattgtgatggcaagttgatttagagctctaattctagggagatgtttcaattgaaacatcaaagttcatgtacttggatatgccacttcttaaatcaccagagtatttttgttcagtcttcatgttacagatacagacactgtccttttcgtcacaaacatacagatgtgtgccacagagtaattatcacaatgcctacatcttagaactgtaaaatgactcactaatgctgactgccaatttcctttgtctgtcatatgaactagccagacactagaggatatgtttatgtatgtcttaaatgatttttatcccacagtattaggttatgtaccatcttggtattggaaccatcctacagtatagctcacacagtatcaaaatyatttttggaaaaattatgctaaacatctatatttacaactggcttactctacttttttatgtctacatttsatcatactgtgttaagcatatatttcatccatatcttcctttttgtaactcttaaaatcctatacaactaacaaagttcatgcaagaattatattttctcmacgtaactatggccttaaacttgtagagcaaaagtgtatcacatatttatcttcaatgaaaataaaaacaaaaattgtctaatttctgcctatttatttgtcttctagttataaagagaatgctatgaggttatcaagaattcaccatgatcaacctgtaaagcccctggatcgagcagtcttctggatcgagtttgtcatgcgccacaaaggagccaagcaccttcgggttgcagcccatgacctcacctggttccagtaccactctttggatgtaattgggttcttgctggtctgtgtgacaacggctatatttttggtcatacaatgttgtttgttttcctgtcaaaaatttggtaagataggaaagaagaaaaaaagagaataggtcaagaaaaagaggaaatatatatatttttaagtttggcaaaatcctgagtagtgtagtcctattaattccagacaaaaggagtttaacaaaaacacgtctcccatcctgtttccaaattttctatttctctacctgcgataagcctactgataaagcctagattttggcatgattattattaacttgtgagttatagtcttctatttttcctttgtctctccctgctgactataccctcttcctgtcacttttctgacacaaggatactacctaattttaaatatgttctattcatagtatcaaattattttatcgttaaccttaattaatgattaacaatatgctgaatcctggtaatgcatacagtgtagatggaatttgataggtgtaaggaagagtcaaattcacaaatttccatataccaaacaaatcagggagccaccgtaggagagtagtgtgttatgagaaaggtaatgatttccttttttaataaaaacaaactcttctgcttgctcaatgtttcaggagttagagaatgaattttaagtgtgacgtgcgtccctattaaatgtctacaaaattttcattaagcatatctagaaaatcacggcataacttgcctgcctttcttcaacatatattcttatataacctgtagtggaagatttgggtactgtctttaataaatcaatcaatcgactcttttatttcaaggagaaagttctatgttatatgttgaaggtgaacagatcatatttagaggatataacaattagaaatctagaaaataattatcacttttataaaatttttagtcaactgtacaaataattacataaaacatcaattaattatgcttaaaaatcactaatgttcataatatataatcactatttgtaatcaaaagtttaattttatgccaaaaaataaaaaatgcttacttggaatttgatatcattgcattatttttgtctttatcttccacaaattttaatttatcaattaattgttatgctatgtatataaaagactaagagcttcaccaaggatatggcataataaatgtttatcaacggaaagcatagttgaaggcaaatacttttacttgattcagccttgcattaatttaataaatatattaaagattttgctttctttaccctttataaatttaatgacatttctagctaaagtgttaatttcaatatttgaaattgagaagataaattacattcgttgccttagtgatatttttgaaattcttctttctttcactgtttcttttttcaattttatgttattttaagttccaggatacatgtgcaggtttgttacatagtaaacgtgtgccatggtggtttgctgcacctatctgcccatcacctaggtattaagcttagcatgcattagctataggcatatagctaggcatatactcaattttaataatttgtaaaatctagaaatatagccaaacatagagtcaattgatatttgacaagaatgcaaaactatacaatggagaaaaaacaatatctttaacaaataccagtggacaaactgattatcartattcaaaagaataaaattgaaccccttacctcaagtcatatataaaaatggactcaaaatagattaaaaaaaaactaaatgtaagatcaagaactataaaactctcagcaggaagaatatgggtatagctttctttctaaccctgaattttgcaaggtttttagatatgacaccaaaagcagaagcaatcaaattaaaattgataaattggacttcactgaaatcaaaatttttgtacatccaaacaccagcactaaagtctgaagagaaaccagactttggaggatatagttgcaaattacatacatggtaaatgacttgtgtaagaaatttataaagaaagcttacagctcaatgataaaaaaaaaatgacccaatccaaaaatgtgcataagatctgaacaggcatttctctaaggaatatgtaaatgtccaatgaggacaaatgagcaaatgtaatgtccaataagaacaaatgaaaaaatgctctgcatcattaagttcaacattattacaggaaaatttaagtaaaaaccacaatgagataccacttcaccctcactaacatggctattatcaaaaagataagtaattaaaagtgttggcaaggatatggagaatttggaatcttcatactttgcttgtgtgtatcaaaaattattcaggcactttgaaacaatctgccagtttattaaagtttaaacagagttacaatatgacccagcaattctacctctagtaatataccagacacaaatggcaataggtctatacaaaattaatacatgcatgttgataacatcttaaccaaaactggagagaaaactacagttcatcactgataaatgaataaacaatatgttttagaatattatttggcaataaaaataataaagtcttgatgcatgctataccattaatgagactttttaaaacattatactaagtatagatgccaaacaacaaagatccttcatataacaatatgtcccttcatatgaaatgctcttaataggaaaattgatagagataaaaaataagttagtgtttgcctaaaatgcaggataaggaatggctaagggtacagtgtttcttttggtgggtgataaaatactctaaatcttgttgttgcagttgttgaaaaattctatgaatatacgatgaaccactgaattgtatattaaaaactttttttttggaagacaggattgcaatctccaccctttgcagcctcaacctcctggactcatgccatcctcccacctcagcttcccaagtagctgggactgcatgtgcacactaccacagccagctaattgttcgttttgtttttgttttttttttgtagagacaaggattcactgtgttgcccatgttgatatcaaacctctgggtttaagtgacccaccttcctgggtttcacaaagtactgggattacagacatgagccattgcacccagccattgaattgtacactttaaattgataaatatgtgaattgtatgtgtacaaattttttacacacaaaagtatcttgaaccgtgacatctaagaaatggtaattcagctgtataattactttatctccagttctgtgtcaaggggactgcagaccaagaagtctccatttctcactgtacttgacacttcacaaacctcttatatgacttaggtgtctagaacacacaagttcaactcttactggggagtaaaacacttgtaattttaaaagacacagtaacacacacttgtaagcatgaggccttctaccttttcttgatccatttgtcatccagaaactgtgattgttcatataatgtatttactttgacattgctatggttggaatgtgtcctttccaaaattcaggtgttgccaatgtgacagattatgaggaggggcctctaagaggtgatattgccttcttcgtgaatgggatgaaggtctttttagcttcattcagcaggcttgcttttctgctacatgaagatacagaactggtcacttttgccattccacttctaccatgtgagaatgcagcaagaaggctttccctagataccagcatcttgatctttaacttgccagcctccagaactgtgagaaaacaatttctgttcttggtaaattgtccagtctcaggtgtcttgttataacagcaaggctgggtaagccagatgtgttggagttttattttaaattcttgatgatttctccttagttagaagcaacagatgcatagagaaataagcattgcatttaactagactgtctatgaaatgaacttcagttttgcttcccctacagttgagttgttactttaggtagaggagttgtggaaaggtgctggtaaaatatagacactggatcaatatgaagtgaattgagaactggatgaactcacttcatatgaagtgagtattgaataaacttgtctagagaggtcatgaggtgactgttctagacctttgtcttccattttccttgatctcagtagtctatctagtattaaatttgaacttttttatacatattgcgctaaagatggattgtagaattttttgacaggatagatcaatgcataaaagatgtacccaaagatacattttggacagatattgcaccactgcaaaacaattacagggatattgtgattgttatgaaaatctttgtaaaaatttggttttgaacaataaacttgaaaacctacaaaagttgaggtttgatgtcattctttcacatgccagtggtctcagtggtgagctgctgactgagctactaaagcatccttttttttcacagtttctgcttgtttcctgactacatactggagaagcatagtggaggacttcaattacctccttcctacatgcgtgttgttctgtcataatttttataatcaaataacataaatggagaactgcgtgtgtgtgtgtgtgtgtgtgtgtgtgtgtgtgtgtgtgtgtgttttgacttttggtttcaaacaatcaataagaaatgagatcagttttaaaatgtgccatcagaacctggtgtggtggcccacgcctgtggtctcagcactttaggaggctgaggtgggtggatcttttcaggtcaagagtttgagaccagcctggccagcaaccttgtctcaactaaaaatgcaaaattggctgggcgtggtggcacatgcctgtagttccagctactcgggagggctgcctcctcttgaacctggggggcagaggttgcagtgggccaggatcgcgccactacactccatgtnnnnnnnnnnnnnnnnnnnnnnnnnnnnnnnnnnnnnnnnnnnnnnnnnnnnnnnnnnnnnnnnnnnnnnnnnnnnnnnnnnnnnnnnnnnnnnnnnnnnnnnnnnnnnnnnnnnnnnnnnnnnnnnnnnnnnnnnnnnnnnnnnnnnnnnnnnnnnnnnnnnnnnnnnnnnnnnnnnnnnnnnnnnnnnnnnnnnnnnnnnnnnnnnnnnnnnnnnnnnnnnnnnnnnnnnnnnnnnnnnnnnnnnnnnnnnnnnnnnnnnnnnnnnnnnnnnnnnnnnnnnnnnnnnnnnnnnnnnnnnnnnnngtagggggaatctacctttgttgccaggtagttcttgaactcctgggctcaaccgatttgcccaccttggtgcccaaagtgctggggttacaggtgtgagctttttttttttttttaagagacagtcttacttcattctgtcacacaggctggaatgactttctaaaactgcagaaagcagaacatattccttgctgtttataatactgtggtcataccaaagggaaagagtattcctccttaaataaaattacaaataaaaaatttatgttttactcttactcgtaaaaggtattgtagaatacaaaacatttttcacactggttttgtctttggcttttataatccacacttcacaagaaaaaatgcatttaacttttaagagtaacttagtcaaaaagtataaccttgctttgccttgcataacctctagctattgcacatgatgttttgttcttcccctttgtccagtattttccacatggtcaacagtttaaatatttaagcttgcactgagaaaccttgccacatttcagaagttttgttttgcttttggtggagagcacctgatctcgactttatagccaatgtatttactctaaattacacttttatagatacaaggtaaagtgtagctgggtgaaggcactcaggaaccataaaatgtggtcaactacaataaatgaaaatataagccaaacaaagtattcacactttcatttttytaataaggaatttaagatacatagtaaaagtttaatgcttggaagagacacaaattcacggtgataaaaatattaattagaagacacataacatgcctcaagtatatcgacacttgactccacaaacaaggcataaccatgaaaacaacactctctttattttgggctcccaaaatcaaaagtaagattagaactaatatatttaatctatcacagatatttagtatactccatgaact

SEQ ID NO: 93894 - DNA, 28258 bp, Homo sapiens
tcaggctgtaattccaacactttgggagcctgaggcaagaggatcacttgagtccaggagttccagacaagtctgggcaacatagcaagactcttgtctcaaaaaaaaaaaaagaataaattaaaaaaaaataaacaagtaagataattatttacccaattatttcagttcagggtcattggaagttggagctagctcagagcacaaggtaggaaccaatcctggacaggacaccattccatcccaagggaacactctctctctgtctctctctctctccctgtcacacacacacacacacacacacacacacacacacttactcacactggaaccatttagacatctaatcctcctaacacgcacatcttttggatgtgggaggaaaccagagtacccagagaaaacccacgcagacatggggagaacatgcaaacttcacatacagagtggcctcagccaggaattgattgtttaaatcaaagttacaatgaaacagtgttaagccaaacgatgttattcaagggcttgctgtactgtaagtgaaaaatacacactagaatttaaagattgagtatgaaaaatgaatgtgaaatatctaataatttttatgttaatttcatattgaaataatagtttggttatattgggttaaatatattattaaaactaatttcatttgtgtctttttactttttttaatgtagctactagaaaatttaacattatccgcatggctagctttataattacattgggtagcactgttctaacacattttatttatttttattttttaaaattagagacagggtcttactgtgttgcccaggctgatcttgaactcctggggtcaagcaatcctcctgccttggcctaccagagtgttgggattgtaggcgtgagccaccgcacctggcctaggtaagattttacatggaaatacttattcatcacacaactgatttaagaagttatttgggaccagtcgtgatggctcacgcctgtaatcctagcactttgggaggctgaggcaggtggatcacttgcggtcaggagttcgagaccagcttggccaacatggtgaaaccccatctctacccaaaatacaaaaattaaccggacatggtggcacacacctgtaatcccagctactcaggaggctgagacaggagaatcacttgaacctgggaggcggagtttgcagtgagctgagattgcgccactgcactctggctctgaatgacagtgagactttacagagtgaggctctgtctcaaaaaaaaaaaaaaaaaaaagaaaagaaaagaaaaagaaaaaaagaaattattacgaactttcaccatgccgctcctatttaaggtgaggtgtgggaccattttgagaaatgaatcaggtttcctctgaactgtccctgttgtttgtcataagctgcagtgaaaactctatatatgggacactgctaccgctgatgagcttggaacactcctccaggtgccttcttaaaccacatccggtcttcctgtgcctcccaagccccatgccaaacagcatcagtgacagtgaaggatctctctggtagaggctgccgtttttggaggcatgtagagccagcaaacctcacctcacctggaactatgttaaatgtcatcagtctttaagagcaggggatcatttgcagatcatcactcacagcattttcttagtcaataacaacatcacagaagaaaccacagtattgttttattagcccttatgagttcccttggatccttatttacatgttggatatagtcaggtcaaataaagtaccccagactcaagccttgtgatggtccatatcctcaactgaattcttagaatataattctaggggaaagaatatgcctccttttttcctgtccactttcagataagtttccctgttgaatctggctggtgatttcttatttattaatcagtgggaaggcagaataggaagtctagttacattattgggctgcatctctgaaatcctagattttcttggtaataatgaatagtaaagagaaaaatgcctctctctctctctctctctttctctatctctccattagagacagggtcttactctgtcacccaggctagagtgcagtgtagctcactaactgcagtcttgaactcctgggatcaagtgatcctcctgcctcagcctcctgagtagttgagactacaggcatgagccaccacaccaggctaattaaaaaaaaaaaaagttttggttttttttttatagggatgggggtctcactatattgcccaggctggccttgaactcctggcttcaagttatcctcccaccttggcctccaaagtgctgggattacaggtgtgagccaccatgcccagcctgttgtctctgaactctaggatctaactctgactcaacactctcattatttgttaaatttgaaagtggaaataaattatatgtaagagtcagtagatctacctctgaggtttgtcaaatattgcagctgctgctattttacctcagatagagcttgtttctgttgttgctttttaacttctgagcccctcacattttcttaatccataaaattatttctggcccttcccactgatactgtattagtgatataccttatggtcaaaaggattgaaagttttccactcttccgagtgactactgcctaatttgtttcagggtccatttcattccttttagctcttggcattgtaatttgcctttctaggtgttgtatacactttccacaataggaaaggctgcagcacaggtgagaggtcaggttttctcaaaagcatgttcagagcaggatagtgatggaggagccagcatgttcctgggtgtgctgcggtaggcagcctaggcaaacctacccccaaaagtctgaggaagctgaaaggctgaaaaagaggctgataaatctgcctaagggaaagattaatggtcaagggtcttttgtcctaaggacaggattcacagttaacaaggaacagtggtgagcaggtctatgcaaacttgcccccaaaggctgaagagagagactgacaaatccagtttctcaggaagaaacatttaaaagggacttaggaacagaaacaatctctctgttggctgagggatggtagatccccgcatctgtgctccagaaaatatcctctatatagcaagcttttttggtaaaacatgcagctggtcatgcctcagactttctagcaaaacttgtgaccactggggaggttagataaacatctttatgagggtttatccatgccatggaaacaccttggtatgcagtagtcaaacatcggtcatcatggcagtttttcttcaagacggcatcactcttgccatgcaaccagctgtttccctaccctggaccccacttccccctaagtttgtatttaaaaagtggcatcttatcaacacattttaaggtaacatgctgacctggtgattgtcaaggccagaatggagagatatagtgggaacaagactgttggtatgcctctttaccaattaagggatccttgtctcccccaagtggatgtgtctctggttgaggatgaccttgaaagggactgatttctagccatggggaatacttaactgacatctaactcccagtatcttccacccatccatcctactttattccttagggctatgcagaacaagcctagtctttccactgaggcatcttttagtttagtgaagaccatgggcttgtttcatgggttgtttcatcaacctttcaatataaaaagatacctcttcacacagactttctttacccctactctgttgtttccattccacttacctccttcagatatattttttatttttgttggttttttcctcgaagcccactagaatgaaagcttcatgaggcttttcatgccattttgtcatgtgctgtgcttggcacattataggcacacagtaccctctggctttatactctcacagatctgcaagacccctactgcaacccaatgcaaactcctctctctataaaaagatatcttttcccccagtagtttcaacagaagtcatagaattgagtttcactggcctggccagaatcctgtgcccatcctcaacaaattactgtggccaaggggatgggctacattgcttggctactcttgggtcatctgctcaactggaataatgttttttctttttctttttaaagacagggtctcactctgtctggctggagtacagtggtgcagtcatagctcactacagcctgcaactcttgggctcaagtgatcctccagcctcagcctcctgagtagctgggactataggcataaatcacactatgcccggctaagttttaaagttttttatggagatggtggtctatgttgctcaggttggtctccaacacctgggctcaagtaatctgccttccttggcctcccaaagtgctgggattacaggtgtgagccaccacacccagtctggaataagatttgactgttgtagaatcacatggctagaagtgatgaaggattgattaagcactgctactaaaagaaagattgaaggaatgcaggacaggcaaaagaacacagggaggaatgcatattcagaatgtctgtttgtcaagcactgtataggttgaacacccttaatctgaaaatccaaaatccaaaacgctccaaaatccaaaactttttgagcactgatgtgatgctcaaggaaatgctcagtggagcattttggatttcagattttcagattgggatgctcaactggcatgtattctgcaaatactcaaaaatctgaaaaaatccaaaatctgaaacacttctggtctcaaatatttcagataagggatactcaagctgcatatacattatcccatttaatttacatcacaacccaacaaaatgggtactatttttagaggagaaagcagacttagaaagatgaagaaatttgccgctacaagttgatgagctgggactcaaatccaggtctgttcggctctagaacagaacctatatgtaacatgtctctcttcatctatcgctcaggttttattcacgtgtcaccctcagtcattcactatggttcactggatagctagggaagcacagaacaaacactcagtatttcactcaggtcaggctctgtgccctgagtgtgcctgtctttgccatgttctcccagccaatgttttctctccaatttctccagttttccaggctttccattagactgaaactcagctctgcttccatctcttccacgtattgtctgaagctttccctgatggtttcacatacactaatccctgtgaactcttaagttcaccacttcttctctgggggtggggatggaaagagagtagaaacaaattactctctggacaaattccatgcaaagattttcagctgggtagacccttgataagaggcctgaaaaacgttggtaaagtccaaacctacttttgaacctcaattgagcacctttctttgtggccaggtttcaccctccagagtgttggttaataggttgaggacaaagactccctgatcagaatgagactccccgaagatctgtcctcttgtttagcagaatctggcacatagtaggtactcagtgtatatatcgactcaatatcatgcatctgttgtgtcccagctaccttccacagggcttgatgggttgacttaaataatgcttttaaaattcaggttatttcaatacaaacagcctggcatcattaaggcacaagagcctcacccttctacaccactttccacgaacttccagttgccttccttcaaaatccttgttttcttaagaaacccacaaaaataccgcccctctatcaaaacgtcctcagctttgccaggtagagaattgcttctgcagtagctgggccacgtctctgtggtagtgcccactgcatgggatcggtattaatctgtttgtctttttcatcttctgggctgtgagctcctagaagtcagctttttcacttttacccaagccaaacggttattcgcgtaaggttggttataattaaaatgtcggtttgtgcacatggtttgggactctgtgtatgagtacgactaatatcttcaatttactaagaagataaagaggtcgataaataaggaggtcaagcccgttttgcaaggtcacacaggaaagaagcagaccacgaaatgaacttcggctgtcacctgcggtgggcgcactagaggtcttttgaactccttcggctaccgtcgccgcgttytcgctgtgcactcttattctgcgcctgcgcgcggctacagcacggttcgtttttcctttagtcaggaaggacgttggtgttgaggtgagtccggtcccttttgcatccctaccccgacactgcgggttgtcacaacggcaccctcccgctttctctctgcctcggatttagtcgtgactgtgtgtctccgccgtggtgcagcttcaggcctctcccgcatctactctctcacgcttccgctgcggcctgagggagggcggcgggcggaccacggaccggggtgggttgcgacggccccaccgaagccgggtgggctgcgggaccctcgagaacccagctggcttcggagtgagctggcccggggctggtacccgctgcgctttttcacagccattgtgaccttggtgaggtcatttgacctatctggccccggtgtttctcccgtgagaaaaggggtggtggtttctaatgcagctggtcgtgaggcgcaagggttagtgtaggcgaagcagctggcagcgtcgctcgctgtgtggcagcgttttaaattagagctggaaarctggaggagggtcaccgtacctgycgcaggaggggaaggatgggcttcctgcaacctcccttgccccacggcttcccatcctacccccggccgcgttagctgaaggccagcagggacgcaaaagtttttaggccccttaggtctttaggtgaggctgggcaaaggagcagttagggaatttgggccctcatggtatttgccgcgttcccgtccaggttttaatggtataccgtgtgaccgtggaaaacacctgcctcatgatctgacagggttgtcgcgaaggtttaacgagtggacagaaaatttttagaagagaaagtgttgcataaatgggtttgcaatcgttaattaccaatgcggagctactgcttatttttcttgttgttggaaagatttttgttgcctttgctcgtccattactagtgtgccgcagtttgtcgcgtttatttagggtggtcgctcagtatatggggggcggggggaagatgaaacaggctaagccaagagacagcttaggctttgtgggaggaatccatccactgtcgtgctgtgcctctctaggtagtaaaatgtactatgcatgagaattccttttgatatcttttctgagtttttcttttattattttacccgagaaagggaaaaaaagctcagagtagtgagagctacatgaggtatgcaggacgcagagacctgagtattggacttcagtgccgcccctcacccrtgtctcaasmcaaatcttattcctgaatttgtgatataaaggacagcgtttagtcagtcaatagcttatgttattttaatgtaaatttttgataaacagtttaggaattgcctctcattttttcttaactcacttgtaggccggaatcccagcactttgggaggacgaggtaggatgatcacttgagggcaggagtttaagaccagcctggggagcatagctagaccctgtttctgccaaaaaagaaaaacattcatttgtaactgctgctaatcggagtgtatattcagggcagctccaatcaatgcttccaggtggccattctcaagtttgtggcttaaataaactctgtacttaatcatattttctgaatctcttaaggttrgcatacgtatcaaggacagtaactaccatggctcccgaagttttgccaaaacctcggatgcgtggccttctggccaggcgtctgcgaaatcatatggctgtagcattcgtgctatccctgggggttgcagctttgtataaggtatgtatgttttttactttgtgccgaaggtcataaartatgtgtttttggttgaaaaatcttttaaagaaactcccccttgtaatgtgtttctttctaaccctttctgcactcacctcagtgtgacaggaactatagcttgtcctccatctttaaatgaagcttgttagtttgctggaatgccgtaacaaagaaccacagactgggtgccttaaatttgctcgcagttctggaggctagaaatcygttggcagggttgatatcttctgaggcctctgttggcttgtagatggctccctttgtcttcacagggtcctctgtgggcatatatctgtagctgaacttctttccctttcttttcctttacctttccttcctttcctttttctgcccttcttttcattttctttccttctttcctttttctttctttgaaacagggtcttactctgtctcccggtacctgggactgcaggtacacaccaccggaactggctaatttttatattttttgtagagatgaggtttcagagatggccacgttgttcaggctggtcttgaactcctgggctcaagggattcacctgccttggcctgctaaagtgctgggattacaggcatgagccaccacacctggcctgctgaatttcttaaaagaacatcactcatattggattagggcccaccctaaaggcctcattttaacttagttataaagcccttatttccaaaaaacgtttagattctgaggtactgagagttaggacttaaacacatgagttttggtcaaacacaattcaacccattacagaagctagtatgcagaggggctgggaaggcagcatagctgcccctctatccatggggaattggttcaggagccctgacgataytttaaatcatctctggactacttataatgcctaatgcaatgtaaatgctatgtcaatagtttatattgtatttttaattttgtagcattttttattattttgaatccatgagtgtggaacgtgcaggaatggtgggccgattatagttctgtttgacaccttgagtaattgtcacagaattgcgttttaacactctgcctaatgtggattttgttatgccctttatttttaatcaaaggctgcacatttacaacttttccgtaaaaatgtttttgataatatgtatatgtttatcatgcttgtcataataccccatgaaagaattcagagctttgcttttataactctttgtatttaatttttgtttagtgtttatgttctttactgggctgtgagcctcattaaggcaggtaccatgtcttttgtttactgtggcaccctgttgttgggtgcctgacacacaaataggttattaaaaggacctgttgaataagaggcagtgtataaaattcagtacagtgttgggtaatgtagagtttcaagtgctttggaggacacaaaaggcatgtagctaaatctctgttcttaaagaacttagagtcaagttggggaggtgaaaaaaattagaagacattgcaagatagaacataactgaaagaatggttttgggggatgttgtggttcacagttattgtgggtcatagctatttgatagaggaggtggaatttgagccttgcaagttagggagaggggctgggtctggtgtctcatgcctgtaatcctggcactttgggaagctgaggtgggcggattgcttgagctcacgagttcaagaccagcctgggcratatggagaaactacgtctctactaaaatacaaaaattagctgggcctttcttctttttttttttgtttttttgagatggagtctcactctgttgcccatgctggagtgcagtggcgtgaactcagctcagtgcaagctccgcctcccgggttcacgccattctcctgcctcagcctcctgagtagctgggactacaggcgtccgccaccacacccggctaattttttgtgtattttttagtagagacggggtttcaccgtgttagccaggatggtctcccatctcctgacctcatgatccgcccgcctcggcctcccaaagtgctgggattataggcgtgagccaccgcacccggtcgcatttcttctaaaaatacaaaaatacatgatgtgcctgtggccctagctactcaggaagttgaggtgggaggttggctttagcctgggaggcagaggtgtcagccaagattgggaggcgaggccaggtacagtggctcatgccagttatcccagcactttgggaggctgaggcgggcagatcacctgaggtcaggagttcgagaccagcctggcctacatggtgaaaccccatctctactaaaaatacaaaaaaattagccgggcgtggtgtcgggcacctgtaatcccagctgctcggcaggctgaggcaggagaattgcttgaacccaggaaggggaggttacagtgagccgagttcgcaccattacactccagcctgggcaacaagagcgagactctgtctcaaaaaaaaaaaaaaaaattgggaggtggaggttgcagtgagccgagatcgtgccgctgcactccaggctgggcgatagagccagactttgtctcaaaaaaaaaagttagggagaactgggagagcaaagaggagatggaacactgagtgggagcactaagtggacctatgctttgggactctttggagagacaagcacacaaagtcttttggtccttgagattcctgctgcctggcatatatagtgggcatgaagtaaatgtttgtagaagggatggatgtgatgcagaatttttgctccttagtttagctaaatttgggttcttgtgtcatgaccaggaggaattaggcacatggaaacattgaagggtgaggagggctgaatttattgggtgaaaaggaaaaaagaaaacagactctcagcaaagcaagagggsgtcctgctaacaggcccccacctcacagattgaatactaggctaccacacaggagctgaagagactaggctcctccccactgcacaaggtgcagcttctcctggttccaccctgttcccccagtgtgcctgtggccattactcaaaaagaatcagtcctgaaagggtgggcaaatgtgcagctctccctcagggtcgtgggatctgggtccaacagtctggcctttcagccttcaggctgttttaggcttgaaggtgggtttttgctaggacccttggctgtctctctgtcagatggatgactaagtgaggtagggagagtccaaattaaccgtacatgtaatgatggcccccagcacttgtgcttctgcctctttttattttaattttttcaagacggagtcttgctctgtcacccaggctagagtgcagcgtcaccatctcggctcactgtaccctccgaggcctcccaggttcaagcaattctcctgcctcagcctcccaagtagctgggattacaggtgcccaccaccatgcctggctaatttttgtatttttagtagagatggggtttcatcatgttggccaggctggtctccaattcctgaccttgtgattcgccccccttggcctcccaaagtgctgggattgtaggcatgagccaccacgcccgacctctgcctcttgattttattactgggaagaaattgggaattcaaatagaagtgaagcagtaaaactggtcaggtaaaggattcttactgcgttactccatcaagtagcatgatttctgtgtatttctgcagagggagaccccatcttttttattttttattttwtttttattttttatttttttttattttttatttttttgagacagagtctcgctctgtcccccaggctggagtgcagtggtgagatctcggctcactgcaacctccgtctcccgggttcacgccattctcctgcctcagcctcccgagtagctgggactacaggcgagaccccatctttaaaaaaaataataagtcacttaaactttccatttttgtcttgaatcttcattttttctttctctgttgaaccccacccaccctttgtgtacggaaacctcgaacaaaacaaaatagacaccttattccccattcttttctttgcaaatttagcagtttcttagactttgtcttcctttttatctgtcaccacctccaccccttaggaaatgtagggtttaaattaaagggtgaacaaaaacatgtgttctaccttgtctttatatattataatctggaatctaatttccagtaatctgaaaaataaactctaatggatggttgctttttagtttcgtgtggctgatcaaagaaagaaggcatacgcagatttctacagaaactaygatgtcatgaaagattttgaggagatgaggaaggctggtatctttcagagtgtaaagtaatcttggaatataaaggtaatatggttatttgaagttacttaaaaaaaaatttctaattgtggtaaaatgcaaatacaggtgactgtccctcacaatgtttagacttaagattttttgactttacgatggtgtggaagtgatacacatttggtagaaaccatactttgaattttgatctttgtccacatgagcaataagtggcacaatacttttgtgatgtgggggagcaccaatgaccacatcccccagtcagaaacataatcacaagggtaaacagctgatgctgtactctgtagtgttgtgtgagatactcagtgttttattataagctaggctttgtgttagatgattttcttcagctgtaggctaacataagtgttctgagcacatttaaggtagggaaggctaagctatgatgtaagttaggtgtattaaatgcattttcaacttaagatattttaaacttatgatggttttatcagaatgtaacctgatggtaagttaaggagcatctataatataaaatttgccatcttaaccatttttaattrtacagtttagtagtgttaagttcattcacattgttgtgcaaccagtctccagaactcgtcatcttacagaattgaaaccctatatccattaagcaacccattcacacctccactcagaccctggcagccactgtgttactttctaagaatttggctaccccaggcatctcataagtagaatcacacagtatttgttttcttgtgactggcttatttcacttagcgtagtgtactcaaggttcatccatgttacagcatgtgtcagaatttcctttctttttaaagctgaatgatctattttagttgtgtcacattgttatccattcatccatcagtagatgcttgggttgcttccactttttgattgttgtgagtgatgctgtgaacctaggcatgcaaatattccttcaaggccttgctatcaattcttttggggtatattcaaaagtggaattcctggatcatatgatttttaatttcttaagaaactgccatacccttttccatagtggctgcaccattttacactctttccatcctccccaacacttgttaattttttttttaacagggtctccctctgtcacccaggccgtagtgctgtagtgcgatcatggctcactgcagcctcaacctcccaggctcaagggatcttcctgcctcagcctcccaagaagctggcactataggcatgtgccaccacacctggctaacttctttatttttagtagagacagggtttcaccatattacctgggctgtgcttgaattcctgggctcaggcgatccgtccaccttggcctcccaaagtgttgggattacaggcgtgagccactgtgcctggcataattttggtattttttgatagtagccatcctaataggtatgaggtggtatcattgtggttttgatttgcatttccctgattatttgtgttcttgagcatcttttcatgtacttattggccatttgtatgttatctttggagaaatgtttattcagttctgctcattttcaaatttggttttttgtttattggttgagttgttctgtatatattctggatattaaccccttatcagatatgatttgtaaatattttctcccatttcataggttgccttttcactctgttgtgtcccttgatgcacagaaattttgatgtcgaatttatttttatttttgttctgtgtgcttttagtgtcatattcaataaatcattgccaaatccaatgtcatgaagtcttttttatgtgttcttctaagacttttatagttttagctcttatgtttagatctttgattcacttgaatttttgtgtagggtgtaaagatccaactgtattcttttacatgtggtatccagttttcccraaatcatttaagattgtcctcttccatggagtggtcttggtaccttggtgaaatcatttgactctaaatgcgagagttyatttctgggctatttctttagtctgtatgtctgtcttcggggcagtactacactgttttgattacagtagtccgttttatctaagatatgtttcaagacccctctagtggattcttgaaaccacagatagtaccaaaccctgtatatattatgttgtttttcgtgtacgtacatacctatgatgacgtttaactcataaattagacatagtaagagatgagcaacaataacaaaatagaacaattgtagtgtatagtaataaaaggtgaatgtgatctctcaatatcttgctgtactgtactcacctgtttttgaaccacagttgactgtgggtagaactaaagcggtggaaggttaaaccacaaataagggatgactgctacactgtagctttgtagtatgctttaaaatcagtaagtgtgagtccyctagctttgttctttctttcaccccacccggagggtgctctagctatttgtggttccttaagagtctgtgaattttaggatggatttttctatttctgtaaaaatgccattgggattttgatagggattgcattaaatctgtagattactttggtagtatggacatcgtaacaatattaagtattccaatccatgaacacaggatgtctttcctcttatttgtatctttaatttcttttagcagtagtttgcatctttaatttcttttagtgttgctactctcttactatgcctaatttatgagttaagctttattataggtatgtgtatatataggaaaaaacgtagctgtatagggtttggtaccatccatagtttcagtaattcactggaagggtcttgaaacatatcaccttggataaaaggagactactataatcaaaacaatgtgtccaaggacacacatttctttccgtacttttcctttattttatagtgacatgtttcagtttccttcttacttccttatgtgtatattctgtattttctttgtggttaccatggggattgcatgaatgagatttgctaatttttttagcagtatacaggtatatatctgtttcatctaggtcagtgtttaagtctttcatattcctgattaaatacattcctaagtattatttttggtgctattataaatagaattattttcttaatttcctttattaggcattcctttatttccttcattgttggtgtgtagaaagagctgatttttgtatcctccaacttagtagaattcatgtattctgacacttgtgtgttagaaatctttagggtttgctggaggtaagattatatgatctgtaaacagatagttttacttactcctttcctttttggatgttgcttattccttcttgcctcattgctctggctaggacttccagtactacaatgaatagaagtggcaagagygggcatccttgtctggttctaggtattagaggaaaagctttcacgttttccatgttcagtatactagacttgtcctttttggccattgttgggttgaagtacattccttctgttgatagttttgatcatgaaaggatgttgaattttgtcaagtactttttctgcattttttgagatgtgttttttatccttcattctgtcagtgtggtatgtcacatctattgatttgcatatgttgaactatccttgcatcctagggataaatcccacttaatcatagtacatgattcttttaatgcgatgtcaaatctggtttgctagtgttttgttgacgatttttgcatctgtgttaaaggatttggcctatagttttctcgtgtgtttgtctttgatatcaggataatgctggccttatagaatgaatgtggaaatgttcccttttcctcactgtttttggaaaaacttgaggaggattggtgctggtttcatagagggctgggcatggtggctcatgcctgtaatcccagcactttgggaggctgagaaaggaggatcactataatccagaagttagagatcagcctgtgcaacatggcaagaccccatctctaccaaaaaaaaaawatatatatatatatatwcacacacacacacacacacayacmtatatacacacacacacatatatatacacacacacagatatatatatagttagctgggtgtggtggtacatgcctgtagtctcagttacttgggaggctgaggcaggaggttcacttgagcacaggagtttaaggctgcataagctatgatcacaccactgcactccatcctggataacagaatatgagaccctgtctcaaaaaagtttggtaggattcaccatatggtcttggactcttgttttttgaagtttttggctactgattaaaaattcctactagttatagacgttcagattattgttttcctgatccagtcttggttagattgtgtttctagagtgggtgtggtagctcataaggcctgtaatcccagcactttgggagaccaaagcaggtgaattgcttgagcccaggagtttgaaaccagcctgggcaacatggcgaaaccccgtctctacaaaaaaaatacaaaaaataatgtgggtgtgatggcacacgcctgcagtcccagctacctgggaagattacctgagcctgggaggtcaaggctgcagtgagcagtgattgtaccactgcactccagcctaggcatcagagggagatgctgtccccactcccccacaaaatttttttttgagttatgtatttctatttcattaggtcatccagtttgtttacatataattgttcatagcattctcactcctttttagatctgtaaaatcagttgtaatgttccctctgttagttggtggttctctttttttattagtctgactaaaggtttgttgatttgatcttttcaaagaactaactgttggctttgatttttctctattgtagtcattttgtttaatattattcagctacatttgggtttaattcctctttttctagttcttaggttgatacagttttttaaaaatttccttgtaatttcttttttaatttattgattgttaagagtctgtttaatttaaacacatttgtggattttcctcttttcctttggcttttgatttctagtttcatgccattgtgatcagaaaagatactttgtatgatttccagtcttttaaaattgaagacttattttgtgacctaacatatggtttgtcttggagaatgttccatgttctcttgggaaaaatgtgtattctgttgttagctggagtgttttgttaagtccagttgatttgtagtgttgttcaagtcatatgttttcttattaatccttctatctagttgttctgtcaattattgaaagtggagtattgaagtcctctactgctattgtagagctgtctgcttctcccttcaattctgtcagtgtttgcttcatatatttagagctctgatgtttggtgcatatgtatttataattgctagatcttattggtgaattaatctttttaaattatagaatgttcttttttgtctcttgaaacattttagacttggtctattttgtctgatttagtgtagctacccctgttctcctggttgctgtatgtgtgggacatctttttctacccgttcactttcaacttgtgtgtccttagatctacagtgagtctcttgtagacagcatataattggatccaggtttttaatccattctgtcattgtcttttggttggggaatttaatccatttacatttaagataattactgataaagacacagtattgccattttgttttctatgtgtcttacagcttctttgtccctcatttctttcctcactcttttattttatagtgacatgtttcagtctttccttttatattcagtattttctttgtggttaccatggggattacatgaaatatgctaaagttagaacgatttattttaaacttaaaacaacctcaattgcatataaaaactcaactcctttacagcaccaccctcttttcctgtgttactgatatcacacattatgtgtttatatattatgtatccattaacatggacctatatagttacttcttatgcttttgtcttttaaatcctataaaagaattaaaaatgaatttacaaaccaattttttttttttttttaagagatggagtcttactctgtcacccaggctggaatgtagtgatgcaatctcggctcactgcaacttccgcctcgtgggttcaagcaattctcatgcctcagcctcccgagtagcttgaattacagatgcaccccactgtgctcagctaatttttatatttttagtagagatgggatttcaccgtgttggccagactggtcttgaactcctgacctcaagtgatttgcctgcctgggcctcccaaagtcctgggataacaggcatgagccactgtacctggcacaaaccaaattttaatataagcttctatgttctttgccagagaactttatattttcacatggctttgagttactgactagtgtcctttttgtttcaacttgaaggattccctttagcatttctgtagggcaaatctaattggtaaaactcctttgacttttttatctgggaatttctccttcatttttgaaggactgttttgtgggatgtattattctcaattgacaggtgttttgtttgtttttttaagctctctgccctttttctcttctgggactcggtaatacctatattggtctgcttggtatagtcagatatcttaagctagttacttttttttttctcttcagacttttaaaatttaatttaattttatagagatggggtctcaccatgttgcctgggctggtcttgaactcctaggctcaggtgatcctactgccttggcctcccagattacaggcatgagccaccatgtccggcctgctcttcagacttgataacttcaaatgatctgtcttgaagtttcctgattctttcctctgcctgagtctgctgttaaatccctctagtgattccgaccccttctccccccattcagttactacatttttcagctccacagtgtgtttggtttttagaaataattttctctttgtttatattctcacttgtttatatattgtttatctaattttgcttagttgtccacactctcctttagctcattgagcattttttagatagttgttcttaaggttttatagagtaagtcagcagcctctgtttctttarggttggtttgwggagatttctttctttcaatcgtccgtgtttccctatttctttatgtgccttgtgatcttttgtgaaattcaggcatttgcaaaaccagctacctgtccctttgcagactggctccatgcatggaaaggccttcactgattagcgcaccataaaggcttggtgtcctctcaaacttttcctggggatgccatcttccctgggcctgtgcatatgcattagttttagtttcctcctatacacagctgcctttcagtttttcttagttttcctgagtttgcctccagcttcctcttggagtcttagctgttctgttattcttttgtctctgatctcttgcccacaggtttctgtaggtctgtgttcccctgcagctcactcatgccatggtacccatcattgctttcagctctttccaacctcctatccaaactatgccattgttcccattagcactytgattcaggcaagacagaaagcagtcccttgggcagctccacacaaaccagaacattgtaggtcagtttcattctttaccttatgtcctgagggaagagccagggtagttttcttctgactattgtactgaggagggcatttggcaagagtgagcaaaaatgccatgaaatttcctgctactttgagtgtggctttttcttggataggtggttcctttggttgctgctcaactggtttctagagttctcataaagctaaacatttttaaatttttggtccatatgtttattcattattttttgtgggggtttgggggcctggagcttcacagtctatcttgctgacatgaaactactttttatgttcaaaatcatttttataggttatgctattaattgctagattggcattaygaatgttacacttttagaagtcacttttttaaaaaaaagtatttgggacagtatagtttgttaggtgggtgtccacgagtgactagctgtctttccataggtctggtttggtctgttgtattcacaaggtccttatgcctcatggacagtgtgaattaaagttctattatctagaaaaggactgactggtgtgctgatggaaagtcatctaaactgatttgatagcatgtatgaagtaccttgatgagacttcctactctggaatcttatgtgtatatttaacaaaaaagaacaatgtagtttctttttgccacttcagtctgggtttatgccttgtaaatgagtttgctgtgacacagagaatgtgaaactgctattttgtcaggcagtgttcctaaataagcatttcagttgcactayatatatgtgggttacattccaataaaccttatcatatgttgagaatatcgtaagtcaaaaatgcatttaagaccctggaaaacccattagaaagtcaaaaaaattgtaagtcaaaccatcataagttgggtaccatgtgtattaaggaaaaaaaatcaagaaaatattaatggttgtttataatcttaacatatctgctttaactttgaaattttcaaaatttacagtgagcatgcattttataatcagaagatgttaataggctaatttaaatttgttagatttttaccatttttaagattatgtttaaaaacctrtatgagagaacatatttggagacaggaacaaaaatatggcttggaacagaaacagtatgtggctataagggttaatggcaggggggtgggggcggtgktgggcatagaattgagaaggaaaaaagcagaatttgttcaatgcacacaagcaatgagagtaaggtgtggtatgcccaaaatggaaaagaggctattcagagtggtcagggagcttagaggagcgtaaaggagagtgaaacttggagtccaggtagcctgaactgtgctttttctgtggctgagggtgagtgatcaaggtgtgaagtctactagtaggaatagacctcagttgatcctcaaagatggtgagtrttgagagagtgtttatctctaacttagcctttgtgtttctcttcacagaatttcttcaggttgaattacctagaagtttgtcactgacttgtgttcctgaactatgacacatgaatatgtgggctaagaaatagttcctcttgataaataaacaattaacaaatactttggacagtaagtctttctcagttcttaatgataatgcagggcacttactagcataagaattggtttgggatttaactgtttatgaagctaacttgatttccgtgttttgttaaaatttcattgttctagcacatctttaactgtgatagtttgtccgtttcattgcagttacttggtcttgggctatggattaaaaagtgttcttcatgagcctgtaagactactgtactgtgggctctaagaagagatagaatcctaataaaatctatccttggccttcattgccactatttggtagctgtgccaccaccacatagttgaaataggtaattcaaatgtagggtttcttactcagtattgctttattaataacaagctaacagtatktaatagaatttggatatatatctaatccagaaaaggttacttaactagaattgagtaatgtctcctaatgacaagcagagtatggtactttttcagaggtcttcttaggactttaattcatgtttattgcgagcaaagtgatactggagaactttaaaaaatgacacttattcaaagctaatttaatcagtaactttattataacaaaacctgtatattacccatttaaactcatgtgtaacattcagtgatgtgagctgtattaaacccaggtattagtgaaaatttgcattgtaaaacctggtaacagtagacatctatgggtggtcagtaattcaaggacaccttttattttaaacaattttatataattcatatcaatatgcaaaattaccataaaagatacaaggattaatacatatttacatttttagaaatagttactctgaggttgacagctgtcacttttctaaatatttacagaacaaactgaaagagacatttttcatagtcagaattgttcgttaagtcttgctttccagtaacaattatatagtgacttcttatgcccaacatgtgagagttaaagatcagtgggtgttgggcatggtggctcacacctgtaatcccagcagtttgggaggtggaggtgggaggaatgcgtgaactgaggagtatgagaccagctgggcaacatagtgagacctcatctctagaaaaaattttaaaaatcagccaggtatggtggtgcatacctgtggtggtgtagtcccagctgcttgggaggctggagtaagatcacttgagcccaggcagtgagcttaagctgcagtgagccatgactgttcccactgtactctagcctgggtgacagaatgagaccctctctccaaaacaaataaaaccagtgggcatttaaaattgcattctcttagtatctcaaaattctaggtaacaagctgtagccccaagtttaaatgtaatatcaatcagcaaacatgctctaagctactggactgtaagaaagatatttactgaacatttaagacatcttggtaacccaagatcttgagtcaaacccattcttagatgcaaaatattatcagacagacactgggaatatcttcatgctttgtcaagtcaattccacagaataaacaaaatggactggtataattgttagcattaatattggggttcttgtgtgctctatggcataccagggagttcccactatgtatgttttgtttatggaactagagaaactcacctgaacactttgggactggattcaatataggacaaaggatttactcaaagtttgcttagtaaaacaaactggaagaagaacactttttctaaaatgtacctggacagtaatcaatcaatcatcagactgttgtaaattttagtaaaatgcagacttcagagaaaatacacatagcagctttcaaagaatagcactgcagttaaatgacaaatgtaacaagccacaaagtcctaagcatttcatttaaagaaagaatcctaggcctttgcagacaaaggagcatgaggcaaaggtggtgactcagcccaaaaacagatgcaacttgaagttttaactctggctctccattgtaaggcctggccacattctatgatggaacagagagttaatagacccaaattaattacagtagagatttttgcaagtgtcatagagcaaaaataaatgcatcctctgtatgtggtaagaacatatagggccctgttaatcattgtctctaagtggggaaggaacacgtttttgtcactttgaagtatcttttagaggtaaggatgtaaataaggaaactgttgttggccttgtgtccatatcagatgatgttagagctgcctaggctttttaaaaaaatgcagccctttatggtggcaaaatgcagccctttatggtggcaggtgcttgcagtcgtagctacttgtgggttgaggtgggaggattgcttgaaccccagaatttgaggtcagcaagggcaatgcagtgagaccctgtctcaaagaaacccaaaaactaaatcacacaagcaggaataaacacctcagaggggactcaaggaaaccctttcctcagggctttatttttcaccatggtaaatttactaaggaagacctgagcaaaatgtggatcaaccaggtaatggtatgttttaacagtggaggggggaggttctgcagccaccacagggcatggtatttgcatggaagaacagctgggggccaggtgacaagatgtctttgtgatgtagtccaccagtctgttgtactgttgctctgacagtctctctcggactccatctacctaggatccaaaaataataaagattagttgccagacccttacgagagttccagaacaaaattagttcttttgcctcgatatatttgtacattatgccttttaggtcatctattaaagccattaatccagaatgtttccttttttcctctgagatatggcaacgataacaatgcagttttagcagtataactgaaagttgtgcatgagacttaggacagcctccttagaataagcatttggtgttgcataaaattcccatgtttgaagttgacgatttgataacattctactcaccattaaaacatctgtcattgttctttagcagccagcccaagaaaaaaggagaaaaatctttcctccacataaatcatctattcaacattaaactcagcactgaaataaaagctctgtttgcctagctccccaaacctcttcagatagaacgtcttaaagtggagaacacctctttcaaaccagtggctttggacggagcattaaaaaaccttttgaactgtaacattttctgcttttctaaatcctaggatttaaagccagagaaaatagagaagctgggcagcggaaggggaaatttttatggaaaaaaagaggatgtaaagtacatttattgttcataaaagtctggctcatcttcagtggaacacaaatagaactgagatacactaggttcttcagtgagattttctgagaaagcgctcatcaaaggcagctgaagctataaattcttcctaccctgaagtcctttagctatctagtgtgtagatcaagtggagtgggaagtttgcaattgtaagccactgatttgtgaatctcaggtagccaccaaactttccgtggtttttgcctactgaacattggcaagactactctggaagaagtggtaaagaaagacttgtttctagttctgcgtgtggtccagtaacaatgctatcaaagtgtcttaaaagctggagaaagtccgtgcgatggcagagagatagtaaagaggcttgctagaagaataagtaaggaatcccttagagtttgaatcttgtgtttttaagcttggggaaaaacggtccccaaagattcactaacagacgaaagctctgcaccaccaggcaaaagccagagctctgatatcatttgatggggccagaattcagctggaaagctttgaatacacaaaaagttttaattgctcctcctgaacagcagcacaggaaaacccctgttgtgaaaggaacccagccaaggactaaattgaccttctgactcattttgagccactcataagggatttcaataatgtgccaggcatattaagcagttattacccctaaactggttgcatttaaccaagaaaagcaaatgctgacttaaaaaataaatctcaatcctgccatatttaaatgtactgcatgatgtcatctacaaattaattccttccaaaattcaaaggaactaggcaaaagctaaaaaccagaaaagtcatttatagatcttaaaatactacttttagtcttcactggaagtgttcacggcagacaggcttcctcatgtctgtggattatgttgggatgcactaagagccagacagctcaagaaagctcactgacaaggcagtgctgctggccaccctcccctgcccactcatgttgaaaatactctagattacagcacttgggagggtttagtctcaaagacgctctgcagcttgagttttcttgggggtgagtaggagaggttggggttatagacataggattaaggcagcagttattcctattaatgacttcaggagagagaaagtggaatagagaaagcagaatgtggaggctgaaggcacactggcccatctaccttccagccagtgccgggccttggctgtgcaggcacagtgctcctgctctcagtcatgtcttcccacttctgttttaggcattccttaatcccaaccctctttcagccctggacagcagtggaaaatcagtgctgaaaatggtatctagagcttcagtgttgcttctctgattccacaatcccaaaaatctcagcaacttttaggagtggtgactccagatactatctcaacccctagggaaactgaggtctgtttccttccagctatgatgattctccacagtacctgcctcaaacaaaaatacaagagaaggatcacagttgaagacagttcaacagcaaaagaaatctgcagtcttaatagtttaagatctgaaatatttcccaagcagctaaggaatcatgatggtcacagggccttggaggtttctcattaaggactaaagatttaatcgtaatgatattatcccttgccaaatcctatagccaaatcaccgctgctttactcaactgatcagaagattctggcagatctaataaagtcagcctggacatctgacctctgtttattctcagaaagtcatcaacttgaagcagcaatgtagtcctggtgccaaaccctagcttaaagcctgactatgatcatgatccaagaaactagagaaatcttaagagttgttgtggttggctgctttccatcttctcagataattttacccaaacagtggcgtgaaggagatacacgcccccatcccaggaagagaataatgaaaggagggatcaggcagaacctattggaggtaggtttgctgtcctttgctggggccactcagtccccaggttagggccagcagactccagtttgccactgatccaccactatcttgctgtgtggaaaaagatgtctattatttaggtaaataattaggatctcatggatcaggccatcatccaggaaggaggggcagagagcaattttccagtgggtgcacctgtttttaccctgggctgggctacaggaagctggggtctgtctggttggggctcccccttgactcttgacacccagtatgccttgcctgcgcatctgttccacattaatttatgcaggccaggagccagccatggagctgccccaagagccttaagtatcatccccaggggggattctgtggtactcagggggtgggaaactatcctgtgggaaagagaacacagccacagaatacaaagcagtggatttgagagagagaccacttcacaaaatgttgacccttgaagtctccaggtttgggggtaggggagggagtggagagtcttgtttcatgatgccccttgcttctgcattggtcctttccagcacccacagacctccagcaccctgcagccagttgcaggcctcaggcagccaaggacctgactttaggctttcagaccaggggacctcctttgtggagcagttgcgtggaattgctgccccaatcctggcccttcctgaaccaacccactcgttttgtaactccattttcctgtccatcgagcaccccagccccatgacggccaagccagatcagccttgttcaattggcttggttacttagctttagaccttgagtcctgctggccgcctgctgggttctcctatacagggcttatgtgcatatctggatgggggcttcccagtgccctttcgcagcggccctccggcctctacacttcctcctctgggtagcagctctccttggtctccagcagccactccagaggctgcagctcagaaatgcctaggtaccagtgacca

SEQ ID NO: 93895 - DNA, 58299 bp, Homo sapiens
  misc_feature (1)...(58299): n = A,T,C or G
cgtacagactttttcttttctttttttttttttgagacggagtttcgttcttgttgcccaggctggagtgcaatggcgtgatctcggctcactgcaacctctgcctcccaggttcaagcaattctcctgccttagcctccagagtagctgggattacaggtgcccgctaccacacccggctgatattttttgtatttttagtagagagggggtttcaccagacttttgtgggggggggggtcataattccctaaacaatacagtgtaactatttacatagcatttacattgtattaggtattataaataatctagagcttaaagtatgcaagaggatgagattgtgagttatatgcaaatactaagccattttatataaaggactggagcacccgcaaattttgctatctacaggggtcctggaaccagtacctaccagatatggagggacaactttaagactatgaacagggacctctctcagccttagtttcctattttgtaaaatggaatcataatccaacttgcagtgctatcttaagttttataggtaagtatacataaagcatattgtgacatgtatcacatatggtaggctatcagaaaatggyggctatttttctaataattatttttgtagcaaatagaaaaaatggttataacttagattttaaaattctcaccacccctgattccgttattcccctttttctatgggttcatcaacgtggttgaaaaatatactgagcatctgtttcttagttacaacgaaacaaacatgttccaccttagtctcaagtaattccaatttgcaatttttcaaatcactttgcaatttctcaaacagatctttgcttattttacttataggccacctctttaaatcacttgctttagtctggctcagctttctgaatcttaaggattattgttggcttttgaacacatttgtttccgttgtttttttccccatcttatcatgtttatttgaactagttctctgtttctttatcattgtgttactatttgttttgtgactacagttgattgtgctgattatctgtcctttaaatttgctcttggtgggaaaatgtaagctagtcagctccagtgaaaaagactatcaagaataagatctgggaaaatatttttttaatttgtaaaagctgtatagccctacagattgtctgcgttctaattataaaagctataattaagaaagaaatcccagtatttacattgtaacttagcatcacttcttgccaatcagttcacatgaaaactatacatttctcctggaaaatgtctgaatatactttgacaggcttctggaagcaagataatccttaccaaatcttgattagaaagcataacgttgctacagtacaacgtgacagtgcagtaaaaacacacaagactgccagaaagcaagcagaagaaaatgatatttttatacatgcatctcaagtttaagaacacaaatgagcctaattacagagratggctggcatattttgacagtcttggctattatcacattgtcacattataaacttcactgtgttccttgccataaattgtgtgctgcttttcaaccacaatgcatgataaacttaaaaaaaaaaaaaagcatgtctatgaaatagagaacactgtaacattgcaaacatgaagaaaaactcttcttaaattagaattttaaatatattagtatgctttataaccttaaacatcctgtcatgatttaaaaattaggtgtcatttcgtccctaagcatttttgtgcccacttgacctgtatggcctctatcccatatatccatatacacagggtatgacaggtgcttgcaaagccctagtctatagtagagacatatatgaatgaaaggtgcctaaagtgaagtagagtcttcggctcaaaactcagctttctacatctcaagtcaatatttctaagcataataaattgaaaaatagtaataattctgaaactgggctggacatggtggcttatgactacaatcccagcactttcagaggctaaggtgggaggactgcctgagctcaggagttcaagaccagtccaggcaacagagcgagacctcatctctaatttttaaaagaaaaaaaaaaattctggaactacaaaagacttcctcttatagaaagaaaataaaggttttctatctgagccattttcctgtctttgatgtaattatcatcagtctcaagtctcaaagtttaatctaggaactccacaaattaactgatacccagagatgcctctaaggcattgataaattttaaaacctttgcaaacataacaaaatatactttagaaaatccacaagctataatttttttagtggtatctttcctatactggacatgaactcaataccttggtgtttgttagccaaaaaattacttacttaacacaaaatttcaatgtatgatatcatgtcatctgaacaagaaatatacttaagtattctccagtattattacagatgtgggtggtgttattacaactcagatgtactctttctgctggtatcgtcatggactgaatgtttatgtccccaaaagctgatatgttgaaattctaacccccaatttgatggcatctggagtggggcctttgagaaataattgggttgtaaaggtgaagtcctctaaatgggattagtgccttgtgaagagatccagagatcttgcttcctctctgctctttgccatgagaggatacaatcagaaagcaagccctccccagatacctgatctgctggcaccttcatattaagatttcccagcctccagaactgtgagaaataaatgtttgtttaaaccactcagtctatggtaattcgttacagcaacctgaactaagatatctaatcatatcaaccaaagagaacaatatccccatactttatgatgattgttccttatgatatagcaaaattcccaaatccttcctgtgattattctgattaaagttaagttgaatatagtatggaattccatggggtgtaggtggatatctatatagaaactggctagggtatacctaaagtattgtcatgccagtagcgtcccccaatttattattcaaggctcaaaatcaatgctttcagaaaacaaccagaggctatgcaagccggtagggggaaaagaggtataagagaattaagctttgatatcccaaagaacaggaaaacctctacctcaagtaggtaatttaggctaatttccgatcttccttggtttctgataaaggatttattttgtatgaagtcgtctgatctttcttcttcagtctcataaatgggaagctgttgatcaatgcaagcatatatacaagcacacacacacaattacatgtgtgtatatatgtgcaccccccccagcctcttaaccagtagctaataatttaaaacacaggcactgaaatgcaaattagaaggcattcacaactatgaaacaaccagagaagaagctctctaacctatcttccttcttccttctatcttttttataaactgtgggagaattttgagaacatgattagggaacagcaggatatgtttcgttcacctagcattcatgagaagtcttacttctcataggtaaccataaggaagaatacaatattagcaactaatttacttacataataatttatgggtaaggcaggcctatacacataaagtgattacagttcaatagatgtgtttaccctccatagcctaataattatggtcactgagatttactctgctatagaacacatataaacagacaacgttgacaaataaggattggtttctatggagtaacatgggccttccaaaataattggaacacaattcctgatttcagaactgtcaaaaactcttgaaggcaaaaaaagaaattatgaggctctgagaaatcagaaatcaaaacataaaaataaaacataagtaaaaccatgttgaaagaaatccagaagagaaattatacaawctaaccttttcaccccaaatctgttcctcctttttcttgccactccaacattgatgaaatgtagagtaattgaaatttacttcggagatacagcaagggactccaaaaggccatggagagagaatttcaactaaaattgaaaagccatacagaggtctgcataaaaaacaaacagcacaccacaaatcaaaacctttaagataaaaacttaattagcatctacaggttgaatgagctagtaacttatgccaatcttatcattacattagctgaaaagaaaacgaactgacagattaatcaaagaacaaagcagtagcttcacttcagcaaaagctccataggatcaccaaagaataactggtgtgactaccgttttctcactggtggattagtttttggcaagatttttaatgtctaaatttaagttaaacttcagtttaaagaaattaagattaacttcatttagtcacagcacacttccaaaacggtcaagcttagtactgctgaacagctgtagttgcataaaaacaacgcatagtcctaagtagggaaatgggaaagggctttaaatacaaaaacaaaaaaaacatgcacacccgataagggcacatctgaatcccatccttcttatcctatcataacacaaaacagctacggttttctgggaaacatcctggaccgctaggggaaaataacaccagacatttcaattcactgtaacgaactctcatcaataataataacctttagctgttgtgacaacacgacataaatcaaaattaaattgaatttttaaaattgttagttcctacgtttaaaaaaaagttgttttaaatacattctgttctttcaaaactgaatttcctcagatcacacaatttaagacgcctttatgtcttcttccgcttgtcacacgtctttcgggttctgaccagcacatcaaggggactctaagcaggccacgtggttagtgtttgctagaacttgtttagcttcagatccagtcatcgagcatgctaggcttggctactcgcgctccacacagtttatccaaagatctaaaccccgaatgaacctgaatagttatttgctacaatgtctttctcaaatctcacatgttcctaaaataagggtgcccatgcagtagagacggatccgggcaggatcattagataaaatacgaaggctttaaacgtccttctcccaacgatcagcctgggaccggcgtcggggcagcagcctcaccaagattcggagcgacatcctcgccaggattcgaaacacctaggagaccctcgcccggctgactcccagcccctgggaccccgtgaagacgcaaacctcgggacgcctcccgcagaaccacctgtcagagccaagcaacagtccccgccccggagcctccgagctcctgctcgaaggcaatgacagcaggagaccccgctccctcggggttctcgcggccataggcgccgcagtccactgccctccggctaaagaggtcccgggccatcacctgcccgcctaccgaccacgcccgaccctccactgaactgagtctccgtccggatcagccggcccgccacgaacccagctccagtctccggccgctccttcttatccgccctgtcctgccgcgtcgccgccgtccgagccggcagcctgctacttacctcctgacaactgcatggagtaaaccacaccgccttgttaaatgccgtcgccgccgccgccgtcttcgtcaccgtcacagtcaccgccgccatctttgttgtgtctccgactcccttcccgcccccctgccttgctcaagtctcgcgtgagcaggatggagggcgaaagcgaggaggggcctgtttgtctctcttggggttccgtaggcagcagggggcagggattaagggggggtgtgtgcggggcgggtactgagtgggcggggccttgctcgggtaactcccaggggctggctagagacccagaggcgcagagcggagaggcctgcggcgaggatggagggcctggcagtgcggttgctgcgcggcagcaggctggtgagtgcgttcgaggctggcgtcctgggggcccagggcgaccttggcccctggaatcgcagctggcagagccttctaacgggcctcggggcgccggcctgagccccgctccacgtcctgggtccccagactctttacccgcgggcagtctatgaccccgacccccttcaggcctctggtggaggcagctggtggcaagggggtcggggctgtctagaagckgctttggcggagcaagtaccttgagtggagtcggagggtcgcgtccgcaagatgtcctttgcaggccgttgcgtcctgagagccaccgagtctggatctctggatctctggatgcattttgcacagatgtcacctccctgatgccctaacscacctttcccgagtgattacatttcacaccccctcccccaaaaaagatagttaaaatataggcccagtctcattctgagcaggtgtctccctgtccttccttccgcggccccgctcaaaggtagtaagggacttcggagttgttcgggcttcccggccagggacagagttccctctgccccttatctcatgtctggagcctgggtatcttccgtggatagactcaccgccgcccaggggagccggagccggtgccggtycctcttccatgaacttaagctgaaaccagcctcttgttgtgcttaattcttatctgtgcacccacacaaactgttaacagcccctgtgttaacatcctatgctcttcaccccttggacctattatatagcatgcttttcagaacatacacatttggatacacttgtatttgtcagtacacttcactgggaattttcccactgcttacgtgtgcttttaatgtttcctttgcatttgctttaatgagttaggctttccaactgctgcttcagtcttatgcccagaggcagaactctgaccctttttcttattagagataattaatgttatttgactgttttacaggcctgaagtgcaataaaaaacagtaagtgattattgtttaatactgtttataattgttggttaataacttagcaaagaaaatttctttggttttacaatttgactctgttttagagccaaaatttattgaccgcatactctgtggtaggcacgttctcgttctacctgagtcatctcaattctcacaaccatcttaacaagtagtttaatcttgcagatgctgaaaaagaataatagcttgcccacagatagaaagggatagagctggtggtattcgaactctggtctgattctaaacttaaccttcatatactactgtctccccgtccttagagatatcaaaaacctattttgtttgaacttttggtttattgtggcttatagtcctttatagtttttgaagctcttttacataaattagctaaattgattgaacatcgactgtagcatagtggttaagaacgtaggttctgtagctaggctgcttggatctgaacccaggccctctcacttcctagtggtataaccttggacaggttatgctttgggtctcagtttcctggtctgtaaatggagagaataattgtgcgtattccaaaattgttgtgaaaattaaatgagctcatatgttcatgtaaggcacttagaatagtgctcggaatgtagtcagctctcggtaaatatcagctcttactgccatgcacgaagcattgtgtgctatgccagatgtaataatgaataaaatactctacctccaagaagtttatcttttagaggaaaggttagaactatgtgcaactaaccccaygtcatgtaggtgtggaacaaatcctaaggggctacagtctgcgtgcagattcagaagatagaaatgactaggaccattggggaagtgataggctctttggaagctgggttagagtttaggaggggaaaggagtggtcagaaaactgcaacaaaaggggactgaggccactttagggaattgggggttgatccttttggattgtgaggagccattgaaggtcaagagctttggagtttcctcatgccacagtgtaggtagatggctgtggacacaagtggcatggagtggggagaaatgcaaggtagggctaattttggtttctatccagaggcaaatggaaagctagcatttactcacttattgtagaccagggacagcattttacacccactaccctatttactcttcctgtaaacctctgaagtaggtatattagtggcttcatcttgcaaatgaggaactcggaggcaataaccagtgttsccaagtcacataacaatcagattgcaatgctgaccttcagcctacccctgccttctcagaaggtctctcctagtcctgcagatggattagaactgtcctgcccatttggtctaagcaacccaattagtggagaattggaccttgtagttaacctgtggttccaaagcattttaatgtagsttgatatctttttttttttttttttgagacggagtcttactctgtcgcccaggttggagtgctgtggtgcgatctcagttcactgtaacctatgccacccggattcgagcrattctcctgcctcagcctcccgagtaactgggattacaggcgcctgccaccttgcctggctaatttttgtagttttagtacagatggggtttcaccatcttggtcagcaagatggaaatggtctcaaactcctaacttcatgatccacccgccatggcctcccaaaatgctgggattacaggcgtgagccaccacaccaggccgcttgatgtcttttaagagatgattttttttttttttagacaagttttcactctcttgcccaggctggagtgtagtggcgtgatcatagctcaccgtaaccttgaactcctggctcaagtgattctctgacctcagctccccgggagctaggaccacaggcatgtgtcactgcacctggctaatttttaaagtgttttgtagagatgaggtctcactgtgttggccaggctggtctggaactcctggcctcaagcgatcctcccacctcaccctccaaaatgctgggattacaggcatgagccattgcacccagccaagaggtgattcttgacaaatatccttgacgtgaattcttgttcagttaattctctggacatctgccagacagcagctgccaaaatacatataattcttgttgtttaactttttgctcttcaacaaaaccagaagtattttttctggacatatatttggcatccaggtagagagaacacaaatggtttgaatgtgtcccccaaaattcatgtgttggaagcttgatccccagtgcggaggttttgagtggtggggcctaatgggaagtgtttgggtcatagtgtgtccagaattggtgggttcttggtctcactgacttcaagaatgaagccacggaccctcgcggtgagtgctacagttcttaaaggcggtgtgtcyggagtttgttccttctgatgttcggatgtgttcggagtttcttccttctggtgggtttgtggtgtcaccggctcaggagtgaagctgcagaccttcacggtgagtgttacagctcttraggcggcacatctggagttgttyrctcctcccggtgggcttgtggcctcgctggcttcaggagtgaagctgcagaccttcgcggtgagtgttacagctcataaaggcagtgtggactcaaagattgagcagcggcaagatttattgcaaagagctaaagaacaaagcttccacagtgtggaaggggacccgattggattgccactgctggctcggcagcctgattggtctgttttacagacagctgattggattggtctgttttgacagggtgctgattggtgcatttacaatccctgagctagacacaaaagttctccacctccccactagattagctagatacagagtgctgattggtgtatttacaaaccctgaactagacacagagtgcggattggtgcatttacaaaccttgagcttgatacagagtgctgattggtgtatttacaatcccttagctagacataaagattcttcaagtccccaccagattagctagatacagagtaccgattggtgcatccacaaaccctgagcttgatacagagtgctgattggtgtatttacaatcccttagctagacataaagattcttcaagtccccaccagattagctagatacagagtaccgattggtgcatccacaaaccctgagctagacacagggtgctgattggtgtgttcacaaaccttgagctagacactgagtgctgattggtgcactcacaatcccttagctagacacaaaggttctccaagtccccactagactcaggagcccagctggcctcacccagtggatcttgcaccagtgccgcaggtggagctgcccgccagtctcgcgcctcgtgcctgcactcctcagcccttgggcggttgatgggactgggtgcagtggagcagggggtggcgctcgtcggggaggctcaggccgtgcaggagcccactggcggtggcggggagactcaggcatggtgggctgcaggtcccggggcctgccccgcggagaggcagctaaggcctggctagaaatcgagcgcggcgccggtgggccagcactgctgggggacccggcgcaccctccacagctgctggcctgggtgctaagcccctcactgcccggggccgcagggcctgccggccgctccgagtgcagggcctgccaagcccacgcccaccgggaactctagctggcccacaagcgccacgcagccctggttcccgcccwtgcctctccctccacacctccccgcaagccgagggagctggctccagccttggccagcctagagaagggctcccacggtgcagcggtgggctgaagggctcctcaagcgtggccagaatgggcgccgaggccgaggaggcgaggcaccsagagcaagcgagggctgccagcatgctgtcacctctaaataggggaactggcctcgtaaattattaatgctgtttttgagagaatgagttcctcattaaaggacaactttggccttctcttgctctctctttctctcccctcatttctcactctcaccttctctcaccctcttgcctttctctttggaatgacacacctcttaacctgagaacttggaacagctgactcataataaatgttcttaagtacttagagcagctgactcattataaataatcagtaaacattagctatttttaaaattaattaattaagttagttttttagagacaggatcttgttctgtcacccaggctggagtgcagtgatacagatcatggctyactgaagcttcaaaatcctggactcaagtgatcctcccgccttggcctcccaaagtgctgggattgcaggcatgagccactgtgcctggacaacactagctattaatgtaggcagaacacattaccaataactttgataggatgttttagggtatcattgccttacgcaaagtacacaggtaagttttggggatctgtaggtttacaacagggttcttgacatcaaaaaaaattacatttttaattggggaggtagggtatctgttttaaaaatgaattttagaacagtagaagatagcatgttgctaatgctaaataaataatatgggcagatatgcttataggagatggggcttcaagtgaccattcaaaggagcagttttaggtaaagcagcagaggggtgcggattccagggcaaggaaatgtgcacgcaaaggtgtagaggtaggaatatgctcagcttgtttaagaaataatatgccactataggtgatgtaacagttttgcagaaggttggaatgggttcagatggtaactgcctaagggttaagtttatccttgatctcaaagcagtgaggagctgatagctgccaagcagttttggcttctccaatctaggaagctagaaagaatcacagagtgaagcaagcctggatttcttctgccagttcctacatgggtgttgcccagacagggttgcccacagtcctggagaagagcccttttatttaccaaaacacaagaatttataatgtttactactcaacacagaaatggcagttactttgcacatgcaaatatatctttgtcttccgttgatctctctctggtgctaggaagactaagtaaccataaagacactctccctggcaaccatcaaagagtctttctcctttctctcgggatcctcacacacttgccctgtcttgggcctacattgtcgtttttgttgttgttgttcctcatgccaccttgtctaagaaggcccacattatcttgactcattctctgtaagggctagaccaggttttctgtgttttgtaggatgctaagcagtatccctggcctctactcataagaggccaatagcttgcctgagctatgacaacccaaaatgtctccatccatggccaaatgtcccgtgggggcaaaattactggactgagaaccacggatgtagacctgtgtaacagtgtactccatgaaggaggggaaaggtggcctttctccttataacctggtagggaactttctctctaaaactatttgccatactcagtttgttggctatagaaattgatctacagtttcaaagatttttgttgaaagatttcaatagcagccattgagattttaaggtgctgtttgcaaaggagtttacaagataaaacagtcagcagctcacaaaaggaactcatcacgtgagactctgaagccacatcccacttagaccatttcacaagtccacttttagagtaacaaggccctcaatgagggtgatagcaccgatgatcagaaaggaagacatgttaataaaagaagacttgagaagatgtgggaattatcttgaaatggaggaattagatggactacacattttctaaatgaaatagcttagtgataggcaaagattgggacatctggagaaaaagtaatttagggtgacagaagaaaggtaattctgttttagacacgttttaggtattaataaaacttacaactgaaagtgtcttagaagctggtcagaaatgggtctagaaagtggaccagtgctaaagctatggtaaaaggaaaacttcatctgaattaaatttaaaggagtttaattgagcagcaaattgggcagcccccagaaccacagcagatttggagakactccagggatgccttgtggtcataacaaatttatagacaaatgaagggaagygacaaatcggaagtgaggtacacagtggctggattggttacagatttgcaattgtcttatttgaacacagttagaacactcagcagtccatgagtggttgaaggatggctgctgggattgcccaagacgcagctactgttacaggcgcatactcctaagttaggctttcaatcttgtctacctattaagctaggttacagttcatccacaaggactcaaatatagacatacggagtccttctcaggcaatatttagtttgctttaagagctataaatgctagccaaaaccataaatgggtatggggcatcggaaggatagtgaagaaacaggagtggacaagtcagcctttggggtacagttcagaccatcctgggtaaatgttgagaagcaaagaagcaaaaggagacttagtaggatatcagaggaaattctgtgacatatgtgttttattcagaattggagcaaaagaaggaaaaggatatttaaaagcaaacatacagaatttgtgtcacataaaaaaaacaaacctgtgagagcagaagcggtgtgttttgagaagtgcaagacatggsagggccagctaatggagctggtggaatgcatactgaggaggttgtgaaygtggttcatgctcccttcactcaatttggtaaccccctgtccccagccagtgttgaatatgcaacccctgatatggaactctggtcttttggcatctatttaagtgtttcttctgactatcttccctgaaaaagagggtgagttgaagaaattcccaatgcctgttaagttgttggacccaagtaattatgtgattaaaaaaaaatttaaactccataatagtcctatcttttaaaatttctttgaaaatagaagtgagtgtcttgtttcatttttgtccactggtaatttgggaaagagaaattgttgacttggctaaggtcacaataaaggcaagcccawctcctttaccttatatttatttatttatttttttgagacagagtttcattcttgttgcctaggctggagtgcaatgcgtgatctcagctcactgcaacctcctcttcccgggttcaagtgattctcctgcctcagcctcccaagcagctgggattataggcacctaccaccatgcccggctaatttttgtatttttagtagagacaggattttaccatcttggtcaggctggtctggaactcctgacctcacgtgatccatccacctaggcctccctaagtgctgggattacaggtgtgagccacctcaccgggtggacacagtttctaatggccggcatttgcatgtctaagcttgctgtcccagcttgaagagccgggctttcctgctagacaagaaacgttcctggagctgctttaaaagaaacaaaaacttcccaaggacaccttttcctctctataggcctaaaataattttttaataactcccataatgaaagtcgggggtggcttccaggctataggtaaatttaaacattttctggttgacaattggttgagttgggctaaaaacctggggtgaatagaaaggaatgtctgggttgtgataagaagttgtagagaccaaagtttaatcatgcagatgaagcctccaggtagccgacttcagagagaatggattgaaatgcttcttattaggcctaaagttctgtgttgatgttcatgctggtgaggtataatgaggtatgttcgacccccacttcccatcatggcctgaaacagtctctcaggtgaaattttaagacccctggctagggaggaagtctgttcagctggtttggggggccttagaatcttatttttggtttacacatgattaaaaaatactttagctccataataatcctatcttttaaaatttctttgaaaatagaagtgagtgtctggtttcatttttgtccactggtaatttgggaaagagaaattgttgacttggccaaggtcacactacaggcaaacccatttcctttgtgttgattcccttgccttgtgtcttgtcttggcttatttaaccctcttttgagggaatcactataattcttaaaagggcaaggcattgttaggaactcctaaagactagaatgaagaatcagagactggtagatgggaaaggttgcgtttttagcagttttggagaatacctagaacagaagctattatttatggagaaagcaagcagaggttggacagattctggtatagaagttttggcttggggatatraaattgggatcaacttaaaatctaatccattggtacactgctaataaaggcatacccaagactgggtaatttataaagaaaaagagatttaatggattcgcagttccacgtggctgacgaggccccacaattgtggtgaggaaggtgagggaggagcaaaggcacgtcttacatagcagcaggcaagagagaagtgcaggggaactgccctttataaaacgatcagatcttgtgagacttattcactatcacgagaacaacacrggaacaacccgcccccatgattcagttacctcccactgggtccctcccatgacacatggggattatgggagctacaattcaagatgagatttgggtggggacacagccaaaccatatcaagcaggtatgaacaatttggcttaggaaatcaaaatcaaaactgaatatagtgttaagtattttttcattaaattctaataaattgttgacacaattctcataagccgtatcaattcctgtaattttaaagcccataaagtagtttaattttcctttgggggtggtgagagaatttgtttaaacttcatttcagataattgtagattcttatgcagttataaaaagaaatacagatagatcctgcatcttgttatctgatttgcccctgtgtaacactttaccaacctatagtacaatatcacaaccaggaaattgacattgatactgtcaacctaaataacagagagaggctctctgaaagaaaagatgcttctttgggaatagagcattgccatggaaatacacgtgccataggattacataattgttttaaaataattatagttggctacaagatcaataacaaggatgacgccagtccaggattgaacaggcagttactggggcagataggccttgcagaagcattttttctgtaagattgtgatggcctttgtgcaatattttggtgtttgcagtctttggtgatagttttttatcaggcttacaaatatgagaacccttttttcatggccttgcctygctctatttgtcaaggtttgtttgtttgttttacattactgactccattttgattctgacaacttttacaatatgatacagcaagctttttcagatattcccagttttacatgtatatgtgtgtgtaggactgtgcagttctatcacatatgtttgtgtatccactgctrtagtcaagctacaagacagttccaacagcataaggatcccttgtgttgtttgtcctcttataaccactcgctacccctaacctcctgtcctggtctctaatcctcggtaaacactagtctctagctttataaatttgtcatttcaagaatattagataaatagaatcatccagtcttttttttgtttttttgctgaatagaatttattgtgagggaaggaaaaaaattttcatccaccctcttaggttcagtgactggggcttggaaattaaataacaaaagacagattaacagtagtaaaaggtttatttcctatgcataatgagcaagtacctggctcattaaatagttaaagggttttgtttatatacctaccttaggtatataaaggaagggggagaaagggcctctataggaaaaacaaataggtctctttgggaaagacaaacaggtagtaagaaattgtgtaatgatatttgcctattcatcttcagggccaaaaactccccaggagggggaatttctaatagcctcatttcccagaggttgctgctttagtcagttaagggaagctcctagaaggcttttcctccacttgttgaatctcagatgtcttcagcttaaaagaagcattatgccaactctgggattccaaatgggtcgctgcaccatgatagggatgtaccacagatgtttaaccattcacccactgaaggacatctggattgtttccagktttttactactgtggctaaagctgctgtggacatttgtgtgcagatctttgaacttctgttgttacttctcttgaataaatataaaagagtacaactgctgggtcatatgataattgcataagaaacagctaaactgttttccagagtgactgtaccattttacattctcaaaaacaatgtatgagagatccatttgctcatctcccttgccagtgcagcaaatcaaaatattttaccccaaaatgtactttgacatattttgaaatggttgccatagtgccagcagaccaggctgaccaacatggtgaaaccccgtctctactaaaaatacaaaaattarctgggtgtgatggcacgcggctgtaatcctagctactcaggaggctgaggcaggagactcgcttgaacccgggaggcagaggttgcagtgagccaagatcgtgcaactgcactccagcctgggtgacagagcaaaactccgtctcaataaataaataaataaatacatacataagaagacttagctttccaaacaatctgtctcctgtcttcttcttctatttggtagtttatttgcaaggcaaacaagcatctttcattatcctttacaattaaatgaaaattgtgttcaagggagagaaagccaaatttcacccctgcattagtccaccattaatattaaccccagtattttatttttaaaatgaaaccttatagacaaatccattcaatcttaatcagtttgactataagatgggattctcataatccctttacaaatttttgttaaagagtacatcagtgccttaagaaaaccttgtgcttttattccaatgctcaatttatggaaaaatcaaataatacccttttgaatgtagtcaatatgttcacacagagaatttcttttacaagattaatttttacaaaccttccacaacttgttcaaacctttagctttatcttayttaactgaaaacaatcctttaaccctctaaactaggcaaatatttacattcccatggcttcttataatcttttaccaaaaacatattttactttctttacacaccttgcatgtcttttttatataaacatcacacgcataacacatatataactacacagatagacaaaacgtgcagtagttgtaagatttttcatttgccaatctgctaattggattactggcctcagggtggagctcttcacgcaacagggccaggaaaacatgcagtttctatgacttaataagcagatatagctggaagacaagaatagattttgagagggatctatcatagcacttttaattcttggggttctgaggaaaacagggtttttctcccaaaatagggtccttggtgacttttctgtttttcccaaagagtcccatgctctcagaagtgatcttagggcctctcatgtgtgcattaagagtggcaagacaaaatggagaaaaataactcagtcaactgtgaagagaattaaaaaaagcttctttccagcaaaacaagattcaagaagagaaaaaaaatacataaaggccttttaagtatacatatagcttggatatccacttttaattaggcttttaaccataatgctctttaaaaacaaattcttttaaatctcctattacccaactctagccatgccaagtggccaatatttctggctttgaactttaccaaaggtaacctcccaggttctcagagaaaggaatatttgaaacagttcatggaggggaagagaatcagcaaatggtaaatgtcacacagatatcaaaccagaaaggactcattccccaagccaagattgaacctatgacaccattgtaaaatgatgaagccacagctactgagccactgcattggacartctccactgcccctcccagaaggagtctagagtagttaattttgagcttgcaaagacttccaactacttaagattattttagagctaactatgacatgaaccccaaaattcctggtctgggtagtggagactaagagaaagtaccgcacgtggttataagggaaccttttcaaatctgtgatttgagctaacttttagataacttctgaattacacaaaattatactttttctcactaataacacaagcctttctggcatattctgtattcagaattatgtgttaattcgaattcttatccttagtaacccaaggatatccttagtaacctaaaactttaatgaaaccataaagaacaagaaatcctgaagtatcagatatgggcatttatacataagaacatttggacaattttagaaacatatttccccatatcacaaccctttcttaattgaaaatgagtcagatagtaaatgagcatcaaaattaactttaagattttaatttacacaaaaaatttacctaaaacatttatcccatttactgtactcaattccttcattttcaacagtttatctagattacttctgcaaactgagatattagacactataattgtttttaatagccagtgaacatccagtgctcacctaaacctaagtaagagccttaaagttaaatacacagatatttttaccgataactcagaagacttggctaacaacattaaattactctcatttgtcaaaacaaacaaacaaaaaggcatgcaaacgaagatcattttgttttggctgggtttatagttttataaccttctatgccaaaccctgacacctcaaaatatctagcagagacaaatataaaatccagacaaaaatgtatgttgacaattctgaaggcatttctatttttgttttatcaatagttttaaaaccagcttgtttatacttaagtcatgtgaacttgaaatttgcttagacttatgtacttaatttatgagcactcttttacttaaaagccaatttggtagaaacaacatataatagtaagtatacatacaaataaacacatctagacaggtatacacacacacacacaaacaaagatccagtagcttttaccttggaactctagccatgagatagcaatacaggctcaccagttttactttgtatgccccaatagataatccaatgaaggctgtgaaccaaaactgcgggtaaagcagtttccatggcagtttggtttttaaaggccaaacctccccaggctccaaagaacactggggccaaacagcactaaaggagagcatccctcgctaaccaggccccctgcttagaacagcagcacaaaagcctgggtacrtgcaattccatcccactttcccattcagcagcaaactccagattccaaacaatattgggaccaaacagtattgcaaaatttcccattgtcatctgtgaaagaaaattctaaggagggcttagtactggacctcagaacctctgcctagggtgtcccctttggagaggttgaagtctggagttcgatcccctgaggtgtccccctttggggtccagtcttagagtgtcagacatctctgaccttaggtgggcaccaatcccactttgcatgttttccctccagaggcaatggcctactatgagctttcctttggttcctggatgtaatccccaacttttagcatcctcataatttgataaggccacgctttcccatgcttcccattccactaaagtgatagccatgaatggtaatgataggagctggaggctgagtgggtttcttttgtccttagccagtcaaatagaggaagggaagaatttagtataagaaaagaaggtttaagttaactgaaacatgttcgagttctctccagattagctgcgccacatgtagggattagggaccatagccggaaatgatagaagagtccttacctcttccagggagggcagctatcctcagtcactccttggccttcaggcaacactggagagtggccctggccagaaacctgcagttgcctccgtgtttaggtgctgcccaccaaggatcctgagttggaaaggaaaagagagagagattcccctggatggagcagaaaggaaaaggtgaaaaataaaccccaaactttgggcttaccacctggctggctaaccaaactatgctaccagtgtagggtgtccaggttcttggcattttgaacaaagagttggacaaaatgcacaaacaaaggaagaaaagaatgaagcaacaaaagcaaagatgtattgaaaatgaaagcacacctaacagggtggggccgggcccaagcaagcagctcgtggggctgggcccaagcaggcagctcaagggcccagttacagaattttctggggttcaaatacactctagaggtttcccattggttacttggtatatgatgtttcctgccatagctgaagtatagttacaaaattatttacttggctttagaaggttagaggctttccatttaatttagttctaggaaacccttaggttccctgcctccagaccctatttcctgcctcagtcccagctatcctggaggctgaggtgggaggatcacctgaccctgggaagttgaggttccagtgagcagtgggcgtgccactgccctcatgcctgggcgacagagtgagactgtcwtgaaaacaaaaagaaaacaaaacaaatgttaaaccagatcaccctgaagaaaaagtaattaatgaaaataaaaggcttttaggccaggcacagtcgctcatgtctgyaatcactgcactttgcgggggcctagccacaaggatcgcttgaatctaggagtttgacatcagcctgggcaacatagcgagacctcgtctctgcaacaacaasaacaacaacaaaaaattagctgggaatggtgtgcacgtatagtcccagctacttggaaggctgaggtgggaggatcatctgagtccgggaggtcaagactgcagtcagctgtgatcacatcactgcactccagcctgggtgacaaagtgagaccctgtcacgaaaaataaataaataaataaataaataaaataatgtgtttgcatggcaaaatacccaaaactataagcgaagtcaaaagacaaatcacaaactggcttttttaaaagttgtaattcctgccatcaaagagctaatttccctaatttgtataaagctcctggaaatcaatgggaacagaaaaagaaattgaatagaaaaatgggcaaagaacatgaataagctgtatgcagaaaaagaaatacaaatggtttgtagacatatgaaaacatgctcaaatgcataggaagagaagcacaaatataagaatgcctggcccagtgtggtggtggctcaygcctgtaatcccagcacttttggaggcagaggcgggcagatcacctgaggtcaggagttggagaccagcctggccaacgtggtgaaaccctgtctctactaaaaatacaaaaattagccaggcgtggtggtgtgcacctgtaatcccagctacgcaggaggctgaatcaggagaattgcttgaacccaagcagttcttggggggaggttgcagtgagccaagatggcgccactgcactccagcctgggagacagagtgagactctgtctcacaacaaaaaaacaaacaaaaaagagaatgccttgtgatacaatttttcacctatcagatgggcacaaaaatttaaatattaaaacagcatactgttttggccaaggctctgaaaaacagaactaataatagtccaccaaagtattatgaaaattttaaactgaaaacatccaatcagtagccacagggaaaaacattatwtaaacttaaaccgagccttctgaaaatacaactgcctgtgtaaataaaccttgtctctactattgttaatctgtctatagttagttcagagcccctctatcatcaccatttaacctggttggttagagaagtatgtaaatgtatcattctttggtattttatcacgtgtagatttgcataaccaccactaccatctagatgctcacaaagatctccctcatttcagtttacttacaacaaaaggagttttgttgtaccttccccagcctaccctacccccagaggtaatgacttttattagatttctatgcagtctaaggtggagcctagttctaaaaacaaaaaccttggtacttgtacacagtggactattttgcaactatttaaattttaaaaaggagtgaaaaagctctctaagtcttaatatgcaaatatctcttgaatatattgctaaatgaaaaaaaaaaaggaaggcacagaataggatacatagtatgctacatttttgaaaggacagggagaaaaataagaacgtgtattcctatttgcttatatttgttttaagagaacactagaaggataygtaagaaactaatttaaaaaaaaaagaaacaggttgcctatgggagaggttgagaagtgggctggatgaggatgtgataacagagcttttttgagccttgtttgtatgttacctattaaaaccagaagaaaatattaaagccaactggagaagggatgtcatggggtagggcacgttcatagattattacttgaactctaataagttcaagattattacttgaactctaataaccaagccataagtgaatggtttggtttttgaaaatcataagatgggttgaattttcagtctccaaagtcaggcatgtaaaccacaaattccagcacaagctgcacaacagaatgacctggggtgctttttagcagtaaggatgcccagggcagagtctactcttgaatcacaatcttagatgttgtggctatgatagctcttttttaagttctccaagtgatacagctatgcagctgatatgatttggctgtgtcgccacccaaatctcaacttgaattgtatctgctagaattctcgcatgttgtgggagggacacagggaagtaatttaattgtgagggccagtatttcccgtgctattcttgtgataatgaataagtctcatgagatctgatgtgtttatcagggtttccacttttgcttctttctcattttctgctgctgctatgtaagaagtgccttttgcctcctgccatggttcagaggccctcccagccatatggaactgtaagtccarttaaacctctttttcttcccagtcgcaggtatgtctttatccacagtgtgaaaatggactaatacagcagccaacatggtaaccccttgttcccatacaaygggtgtgtatggtcccttggcagatatcaatccagtgtccacaactagggaggatttagcaaggggattttattacttgtaacaagttaaggagaacactgggattattcccacaacagtgtcttccctgagcttggggctggatcaggtwttgtaagcatggggtaatgaggtgtgatctgatttgatcctgcaatgagttgatgccaggaggcatgatctgaccagatcctgccagggtgtgacccaggagctcatctgattagatccttgatcctgccataaagtgtccacttcttataataattaagtccttactcctcagtcccagcacttaggttctctttgtggttgcatgcttgattcatctgggtatgcccagttttatgtaacctgaggtccatgacaactgaaaaacaactcaccactttgttacataaaaatggaatcagattggcctggggaggctacacactgatttaaatctcagggacattctttctcagacactaatagattagttggtaaatgttactgtaataaactagtttaattattgtaacaatattcagcagttaggatcttatccttaaaattgttctgtgtcatactaaacacattatctaaaacctactcctagcttttaaaagcaagcctactttgaatccctttgaaaacaggctgggcatggtagctcaggcctataatcccagcactttgggaagccaaggcagaaggatcacttgaggcccagagtttgaaactagcctgggtaacatagcaagactgtctctacaaaaagttaaaaaattatctgggtgtggtgtcgcacacctggagtcatagctagtcagaaagctgagccaggaggattgcttgaacctaggaggtagaggccacagtgagccatggtcctgccattgcactccatccttagtgacaaagcaagaccctatctcaaaaaaataaaataataaaatgaaaatgaaatcccaaagcatacgtggttcaggcaattgtacatacttttaagtcttaaaatttttgctgggcataatggcttacaattgtaatctcagcactttgggaggctaagacaggaggatcacttgaggccaggagttcaaggccagcctgggcaacatagcaagaccccatctctatttctaaaacagaaagaaaaaactatgtaaagtttcttaattaaagttttttcttgttaaatatttctaatatacagaaaagtccaaaaactaatataactgatacccatatacacacaacccacctttgctacagatttgttttaaaggttagtcaagtgaagcaatattacatattttttcaaaagaaataaaacagaccagtcatggtggctcatgcttgtaatcccagcactttgggaggccaaggtgggcagattgcttgaggccaggagttcgagatcagcctggctaacatggtgaaaccccgtctctactaaaaatacaaaaattagctgggcatggtggcatatacctgtagacccagctacttggagactgaggcacaagaatcacttaaacccaggaggtgcagtttgtagtgagctgaaaccacgacactgcactccagcctgggtgataaagcaagattctgtctcaaaaaaaaagagaagaaaaaaaaaaaagaaagaaaacaatgctaacacagaastcacacttccaccctctcctcagatacaacctccatcctgaagctcatctgtatgcttcctgtttgtgtttttaaacttttactatatctttatgtcctcataagaatatgtactatcatttggtgttttaaagtgtacataaatgctgtcatcctgaacaaatcctctcgctaactgcatctttaactctatactatattttcaagatttgtccatgttgatccacgtagctccctagttccctttaactgctataagatattctgttgcatcaatatatgacaatttatgcatgctttgttgacaggtaattggatttttagtgttttgcctttacaaaaatcactgcatcttttgcacatgtctacttgtgcatatgaactgaggtaaaattgctgggccttactgtaaatatgttgttttaattcactttgcgctgctgtaacagaataccatagactgggtgcttataaagaaaagaaatttatttctcatagttctggagaatgggaattccaagatccattcacaggttcggttgtctggggaagactttcttcacacatcctcacttggcagaacggaagggcctgggttgatgctgtgtgaaacctcttttataagggccttagtctcattcccaaggaggagctctcataacctaatcacctcttaaaggccccccactcaatactatgacattgaatttcaacatctgaattttagaggggacacatgcaaaccatgtcatatgtctttatctttactatcactaaattgtccaaagtgattgcaacagtgatttatatactcaacccacagagtataagaatttctcctttctagctgggcacggtggctcacgccagtaatcccagcactctgggaggccgagatgggcggatcacttgaggccaggagttcaagaccagcctggccaacacagtgaaaccccatctctactaaaaatagaaaaaattagctagctatggtggcgcacacctgtaatcctagctatttgggaggctgaggcaagagaattgcttgaacctgggaggctgaggtagcagtgaactgagatcgtaccattgcactccagcctgggtgacagagcgagactctgtctcaaaaaaaaaaaaaaaaagaaaagaaaaaaaattttcttctttctccccacaacctttcctaactcttaagggtcaagtagttggggagaagcttcaggagacaacacaayatctctgataygtcttcctttgcctttcatatattgtgaaagcttctaggtttaaagcactttaagaatgtttagagcaatacttcattatgctggagcatagcggaggaagggaactaactcaattcttttgggtttcacaaatgagcctttaccagaacattccacagtcaggagttcttaaccttctttgtgtcttgaatgaagagtaaaccacaagattaaacaacaatgtagtaaagtttatagaccttttctcaaggattcaaaatgcataaaatatagagggttacaaaggaaatcaatctatttttttccccaaagacgctagatataaaaatactttttaattgtgatatagtaatgtgtgtttgttaattaaataagatatagcagtagttctattcacagataactgctgtgaatttgaagtagtgaagagcacaaataatatttcaagatatttgcaccaaatcaatgtgatataaaagtatctgtaatttcttttgatgacagagtcacagatactgctaaaactactgtaacttgttgcttacattcataatagaaggaaatgctgtattttagttagaggttagtgaaatgaggatgtaattttacccacatccaagttcatggactttattattctgtccacgaggcccagatttgatcatcaacacttctaagtgcaacagaactctggtcagttgagtaagaaacagatcagactcaagctctggaaagtatttggcaaggcataaatagccattattccattcaagtagcaattgctgttctatacaaaaaaatgtgatgatgtggtacaatgggttataactgtggaaaatcattttgatggagaggacaccaaagctgcaaaggctgaggtcaacactgaagggcaggggacattagaaaatcaacatcaaaacatcaggctgtgcagtcaaaggccaggaaaagaaaagcttcttttattaaagactgtcatagtattaataaatggaaaattttttctgccgaaaaatgttaggtaatatctctcaatgctttggttaaaaatggattccattcacttagcatatgtcactgtattttatgaagagcatcttcaataattttaccctgtgatcctataccatttctaacctttttaagtacaattgtctctgttattgtgtctatgaatctaaaatcactgctatgttttgaatggtcctatactttgtcagtagcaatactgaaatcaagaggctcacagttgtgtccgtgggaaaaataggtattaatgtaagatccactggcttttaagtttctcagtagtgagctttcttttcttttctttttcttttttttttaagatggagtctcactttgtcgcccaggctggagtgcagtggtgtgatcttggctcactgcaacctctgccgctggggttcaagcaattctcctgcctcagcctcccgagtagctgggattacagttgcctgccaccgcacctagctaatttttgtagtttttagcagagatggggtttcaccatcttggccagggtggtcttgaactcctgacctattgatccacctgcctcggcctcccaaagtgctcggactacaggtgtgagccactgcacccggcctcgtgagctttcttttaaagataaacttaggtacaaaggtgatatattaactaacagacacatagaattctgtcacaggtttagtgaagtaaataatctcccttagaaataagaaatgtgggcaatgtattatagtttttgaaatgtaataggtaagtttcatgagcattttgtgaagaagcctagttgacacattctttcattcattcaaatatatatcaagaaccccattcaaggctccaccaccagccagtgagcggacttggcccccatgcttacttctcttccttctccaatttccattctttttttttttttttttttttttgagacggagtttcgctcttgttgcccaggctggagtgcagtcatgtaatctaggctcaccgcaacctccgcctcctgggttcaagtgattctcctgcctccacctcccgagtagctgggattacaggcatgtgccaccatgcccggctaattttgtatttttagtagagatggggtttctccatgttggtcaggcaggccttgaactcccgacctcagatgatccgcccgcctgggcctcccaaagtgctgggattacaggcgtgagccaccatgcctggcctccaatttccattctttcccccctttcttccttctttcttcgtgccagctgccactgaccattctctcctgctgctgctagcagcgttcttccccttcttgagcccctttgcacttcgattcttacctcacttctcctttacccttctttttaattcttcctgtccatctcatcaaggagaaaataccttatgtcccctttgtcctcctttctagcccaaagttttcctgtcccaactctgtctttaatgagaaaaaatgttccgtgcaactttgccccaaactgactcctacttctgaaaacaaaacaaaacaattagctaggaaaattgagacgcataccacttttcttctaactggccagtgtttcttgttcccgggtgaatccagagcagagtatgtctgctcctaggcacatagttgcaaagagtgaccaacatgcagcaaagattgacagtggtttcaaacgtagtgactcgtccacagtttctctttttcttgacttttcagcgtgtaatcaaaactactcagaaaacatatttcagtattttactgcatttgttaaaggatttgggacactacaacaggaaggcactctcatggcaagcaatgatggctggcagtttaactagatcgttactrctgctgyttctgtgatgachacctccacttctgtgttcttagcagttgtgtagaaatagtcattacagcgtattgagctctttactatatgctcagcccttttatggatggtcttactaatcctcacaaaactccaagaggttggtacctgcattttacaggtaaggaaactgagactctgagaggttttaactgagaggttaaaaatcacttgcccaagaccacataaattaaatatcagaagctaggatttgaaactagttctttcagacttcagaggttattttcttaatttttatgctgcctgtaagatgctgaaaaaaaaaattagccacggaaattacaaaagcccagctgcctgggctctctcagcacagggcaggtagctctatgtcctccccagctccctgggcccactcagggcagggaagggcaggtagctctgtgccctcacaagagaaggctcttgataatggtgagttttagacatcagtggtgctatagttccagtttccccttctaaaatgtcagtgaaatgtgaaatacattggagaatgaaattttttgagaaagttctgtctccttgattggtaaaagttagttatctgggaaatttgtttatttaaaacagctcatagctggataaagaaggtatcacatcatgttaacaaactaatttgtgttatgtttaaaagactgaatttaaaaatgcgctaggttaagtttccttattttggtgacatgaaatataagaatgggttataaagtcattcccaaagaaaatgatattcaagtacctttctttcatgtgtgtatgttccctacagctaagaagaaatttcctgacttgtttgtcttcttggaagattcctcctcatgtctcaaaatcttcccagtcagaagctctactcaatataacaaataatggaatacactttgctcccctgcaaacrtttacagatgaggaaatgatgataaagagttcaggtaagtaaatttatcagtgtcacctttttctccccagacaggatctctggagcatagtggtgcaatcatggctcactgcagccccacctctgggctcaagctatcctgcttcagcctcctgaatagctggaaaaatatcaccttattattcctctggtcatgaattgggtctacaatatgaagtcacatatgacaggattgaaagatatgttcatctaaatttgtgatgaagaaaagcaatgcatatccaatattaaaacaacagaataaaaggctatgtagttaaaagtgaagactctcccacccatgttctctagttccccagttcttgccaccttgttaccagtttcttatatagccttgcagagttagaagtacatttatattccacttttctttagatagtgggttttctttttctttctttctttcttttttttctttttttttttgagatggagtctcactctgacacccaggctggagtgcagtggcgcaatctcggctcacagcaacctttgcctcctgggttcaagcaattctyctgcctcagcctcctgagtagctgggactacaggcacgtgccaccacgcctggctagtttttttgtattttgttttttagtacagacgtggtttcaccgtgttagtcaggatggtctcgatctcctgacctcatgatctgccctccttggcctcccaaagtgctgggattacaggcgtgagccaccatgcccagcctagatagtgggttttcatactttacgtggaatttcaattttacctttatctatgaaacacctgtggttgaaacacggagcccaaatgaagcagaagttgtataccactaaaccttaaagcagtttgcattcatttatttatgggtatagatataggtgtaaaattatgatatatttaaaaatccatagcagaacatcagaatgttgttcttagagaatatggatgttaagtgtattcgttttctattgcttggtattgaatcactacaaacttaacaagttaaaacagcaccggtgtagtggctcacagttctgtaggccagaagtccagctggagcaagtccaggcgcagggtctcagaaggtcaacatcagtgtgtcagttgggctgtgttttcktccagagctcagggtccttccaagctcccgtggttgtgtcagtacgcagttctttgctgttgcagggctgaggtcttgttgcccagctggctgtcagccagaggttgtccccaactcctggaggcctctgtattccttgccatgtggctccctccatcttcaaaaccagtaactctccctcccagcatcgagtctctctcatccttaaaacctgtttcaccagaaagagccccaccttttttaagggctcacctgattaggtcaggcccaccaatctccatgttttaagttcagctgatttggaagcttaattgtaaaatcccttcacagcagcacttagattcatgtttgaataactgagagaggacatgtatacaccagcggctgggaatcttggcactgtcttagaactctgtcacaataagtaaatttcttttctttcttttttttttgaaagggagttttgctctttttgcccatgttggaatgcaatggcactatctcggctcactgcaacctctgcctcctgggttcaagcaattctcctgcctcagcctcccaagtagctgagattacaggcgtgtgccaccacgcccagctaattttgtacttttagtagacatagggtttcaccatgttagccaggctggtctcgaactcctgacctcaggtgatccaccaacctcggcctctcaaagtgttgggattacaggcatgagccactgcgcccagctagtaaatttcttttcctttgctccctcgccttttagatatggtctcagggaagtgagtttgggatagctaaggaaaaacaagagtgagtggttagtttacataaatcaaagaatttgcttagagtatcttgattctctgtcttcagtcttatttatttctttagtatccacctagtctaagcacagaagcaataaagatgggcaagaaaaaaatcactgcttttaaggaactcagaatctagtggcaaagacagtcgaataaaggaaatagtttcagaataacatggtaaatgtcatggaggtatttggggarcaaagcagagaacacctagactttgctaggcgtggcagaagtgggctaaggaagcagtcaggaaaggcttcccagagagtgtggagcttgagctgtaccatgaaggacaaagtgcagttggccagctggacaagggaagggaagagattctacataatgagagtcgcgtgtgcagaaacgaaggaatactgaagcaagccacatgcactgaacccggttgccttctctaccgacttggtattacaytggtagtaaacttaagaaggtrttttcatcaaaatgatttataaatgcatctaagtcttaaaaacattaaaaaatgaaacagcggttttcagtgggggcaagtttgcccccagcggacatttagcaacatttagagacatttttgattgccacaacttagaagtrggggacgctcctggcagctagtggggccgtggccgggctgctgctcaacatcctgcaatgcacaggacagccccacaacaaagactcacctgccccaaaatgtcaatagtgccaaggtggggaaaccctgttctgtatgaccaagcagctatgaaaacgaccaggttagatgggatatgctgacatagaaagatcatcaagatatagttgaggggaagcaaggcacacaccagtgtgtatctcatgattcctttgtgtgaacatgtatgtgtacagttaagtatagatgattttcaaagaaaagttttcagaaagaatacataataaatttaaaattagtcacctttgggtagagtggaaatgrctttcatttttcattttgtgctttctttattgcttgtgtttttgcaccatctacacatatcatttattttgtgaggtcatcaagagttacaaagggatatgggaaactacacctttctatgttaaaaagaaaactttataaattctattttaaaaatataagaagggtacctgtrtatattttaacttagttaaaatgtaaaattttgtcagcaaactattaatgtgactgtcactttaacatagacttatcagtaattctttttcctacagttaaaaaatttgctcaggaacaaattgcacctttggtttcaaccatggatgaaaattcgaaaatggagaaatcagtaatacaaggattatttcaacaaggggtacatttcataattcttccactttcaagcttctataattaaattcagggactgtaatgatagcataatgaaccctgcatttcccagtcaaaattatctgttttctttttttggttgaaatcctacttgatatttatgtacttmaaagttcttaaaaatrgaattaacattttttaatttgaaatactgtatattttaaggaaaagtttggaagtaagatggtaatttatttgtatctttagaccagcggttctcaaatgggggcagttttgccctccaggggacattgggcaacgtctagggacatctttggttgccacagctaaggcgtgctactggcatctagtgggatagagacaagggatgccactcaacatcctgtagtgcacaggacaactgccacaacaaagaattatccaacccaatgccaccatgaagaaaccctactttagatagtgaaacttcatagcatagtttatattctacctgaagctctatataagtgataaacttagaagcagaggtgatacatgaattccacataaaccgggcaacagattcccatcttctcaagtcacatagctctttaatggaaatacaaygtatgaaatagatacaagtaaaaccgctctcactgtgagtagggggaggggctattagcataggggcttctagaagaacattttaaaaatcactgcacgcatcatttctcacttccgcagaggtataaaatatattttttttaatttttaatactaaagatgtcccagaacaagtggctgctattcagagccattggcctaaatcttgtctgccatctggtttgaaaaataaccattgccacttagctagatagttttatttatttctgttttaaagcaaccagcttttttataccgtgtgtagtagtgattcttccatctttcttttagcagtcaaactcttaggaaactggaatcttatgtggaaccatagtggtcaaacaggaggccgatgtggagaacagatggactctgtgagtccatttctcagccaggttttatttctattgcttgcagaccctctaggcttctgggagcagtctcacggtttcacagtgtgagatctcccccgcggtggtcgttcctgcagcggggctgtctgcagagtgatgcattgcctgcaccctgctactcatctccacaaaccactcctgtgcagatgcagcctcacctgcctcctcactcccattgtcctgggtttttggcataatggcttgcaaaaacactatttccacgttgggagagattagtgacttttttagagaagcaatgtctctgatatctgttcgagtcattgtaatgaggtttccggagtgccctcctcagttctcaggcaaacccagatccttccgttcttcctcgtttctggttttctcaccattcagtcgctcgcatttctggttcccttttcctgttgtagcccaaaatgtaacagccacagccctgactgcagcatagtgtgactccaggaatgtctagagagagactaagagaattatccttctgttagcagctgtgggttttgaattacacatgcacacattctctttgtgaaattgagagtactatgtgagtttcagtaacgatggaactgggtcgttggaaaggcttggctggcactggtcgtgtttaccaggccctcgtgctttggctagtgtggctctagcaaacaccaccacatgttctctgctaaccatcctgaacttatgaagtggcgtaaaaggaatggtcattcaattattaacttggctgaaaaagtgaaggtgaaagagcctgactagaagaaactttgccaaatgaaactatagacatcccattgaggagtaggttattttcttctgtttccttattacattgaaatcagcataaggtgggtagggcatgttgaaaaatcaaaaccccacctacctgctttaagcaggcaacaacagttcttagcaagaaaggtcatctaagtatataagatattttctcattccattaagctaccctttaaagcattttacctctcatnnnnnnnnnnnnnnnnnnnnnnnnnnnnnnnnnnnnnnnnnnnnnnnnnnnnnnnnnnnnnnnnnnnnnnnnnnnnnnnnnnnnnnnnnnnnnnnnnnnnnnnnnnnnnnnnnnnnnnnnnnnnnnnnnnnnnnnnnnnnnnnnnnnnnnnnnnnnnnnnnnnnnnnnnnnnnnnnnnnnnnnnnnnnnnnnnnnnnnnnnnnnnnnnnnnnnnnnnnnnnnnnnnnnnnnnnnnnnnnnnnnnnnnnnnnnnnnnnnnnnnnnnnnnnnnnnnnnngcgaaaccccatctctactaaaaaaaaaaaaaaaaattagctgggtgtgatggtgggcacctgtaatcccagtgacttgggaggctgaggcaggagaattgcttgaacccaggaggtggaggttgcagtgagctgagattgcgccattgcactccagcctgggagacggagcaagactgtctcaaaaaaaaaataataataaatatggttacagtttattttttaacttgttcatgcaagaaatttccccatataaaaatagctttcttaatctatgttgccttgttttttctttagttgatgggtattgaagttgacccagaatatggaggcacaggagcttcatttttatccactgtgctcgtgatagaggaattagccaaagttgatgcatctgtggctgtcttttgtgagatccagaacacattaattaacacactgattagaaaacatggaacagaagaacaaaaggccacctatttgcctcagctcactacagaaaaagtgagttgagatgaattgttgatctaatggatctaatctttagtaagtttacaatattttcaggaaaaaagtagctgcaatgtcgactttactatccaagaccacaatgcggtatcattaattcaagcaatgcttgataaattaatgctgctggaaaagtacactctacctcttatttgccagttggaaatttagaaaataatcatcagataataaaattatttctttttgtcctgattatattttctaatacgtttgttgatggtttcatttacgttgtgatgtctttctgctgtaattattcaaatcaatttcaatgagtatgtgttcgtgagtctttaaatttgtcttggacaaatagggtatatttttggaaaataatactttcagaataccattgctattttcataaatataggctttttaaaaaagcagctaaagatttgatttacaaatgtccatttttccataagtatttgttatacagagtataaatacagttattaatttggacatttttttctcccatatgtaggtaggaagtttctgcctttcagaggctggagcaggtagtgactcatttgctttgaagaccagagctgataaagagggagattattatgtcctcaatggatcaaagatgtggatcrgcagtgctgagcaygcagggctctttctggtgatggcaaatgtagaccctaccattgtaagtttgaaaacgaaatttctttctttttccaaaccccttcttttctctttctttatcttttcctccttctgtttcctttttaggacttcatcttgaactctttagtcttctcagtactgaaaatgtcagacttgagctggcattttttcacttcgttaatctcctaaagtaaatattgttgacaaaattattaattagaattggcccaccatatctgtggattcaaccaactctggattgaaaatatttgattaaaaaaaaattctgcaaagttccaaaaagtaaaacttgaatttgctttgtgccaactaccatattgaattcacgtgaataaagtgacatgcatgtattatgttaggtatcagataatctagagatgatttagagtctaccggagcatgtgcataggttatatgcaaatattacaccattttatgtaaggtacttgagcactgtcagattttggtatccatgggggtcctggaaccactccgccacagatatggagggatgactgtttgtggaggaccaactgttacttagctcctaatgggttrtgtaggaagctaatcttttttcttttctttttttttttttttttaatatggagtctcgctgtatctcctaggctggagtgcagtggtgtgatctcacctcactgcaacctcctcctcctgagttcaagcgattctcctgcctcagcctcccaagtatatgagactacaggtgtgcaccaccacgcacagctaatttttgcattttttgtagagacagagtttcgccatgttggccaggctggtctcaaactcctgacgtcggatgatctgcctgcctcggcctcccaaattgctgggattataggcgtgaaccactgcacctggccctaatctttaattttgttgaatttccaatttctgtttagtaatgaagaatttaagtacctatttagtacatttatttttaagaatattttattcagttggaaaatagacatatagcaaaataataaatacattttttcaccagtaaatacagtattttcactaatgtaacaattgaattaaattgttaaaactttttttttttttttttttttgagacggagtttcgctctagttgcctagactggagtgcaaggctgtgatcccagctcactgcaacctccgccttctgggttcaagcaattctcctgcttcagcctcctgacgggtgcctgccaccacacccagctaatttttgtatttttagtagagacgttttttcaccatgttggccaggctggtttcaaacccctgacctcaggtaatccgcccgactcagcctccgaaagtgctgggattacaggcatgagccaccgcacctggcctaaaactttatatagtaaaattaaattgagaacatgacattctcatgattatataatagtgtaataataattttaatatttatgatggtctctgaaaaagtgaaacaaatggtaaggttctatagtttggatctaatgtcctctagctgctctcgtttcataatgcccatgttgcaattctgagtccattagtatttattaccannnnnnnnnnnnnnnnnnnntgttgccaattctgaagtcccattagtaatttattaccaaagtccatttttagttttcctttttacttaaactcttcagaaacaaggcgttttataaatccaagtggtaatagcgttttaattcttctttttagggatataagggaattacctccttcttagtagatcgtgatactccgggccttcatatagggaaacctgaaaacaaattggggctcagagcttcttccacctgcccgttaacattcgaaaatgtcaaggtgggtatcgtagactaatcagtaaaagactgatgcgaaayaagccttgcatggaaccacaggaggtgtgcaagacaggtgtcaaaatactaagtggctataagcacacgcaggagagtattttgtaaaaccctgaacagcgctctttagtcatgaccagataaatgtacttttcacaaaagtggaaacctttctgccaagaagctgtcctgggaagcaagtgccaagaattcatcccatttatgttttataacttatgtgcttctgaccacgtatactttataagcttgagacttgtgaaccaaatggggcygcagagaaggaagtctggtgtcagtgcactaaaggccacaagatgggggtgttgctcagtgagagcggaaacagccaggctrttaaacgtgagcagcagaagatccagatagttagtgctgatgctggagaactccctgtaggtggggcaggtggtgtcggcttttccaccactcatcacagagcttgatcttttttttgcatggctgtggggagtgagggggaggatgtctttacagatgtcactggggcctcattacttcaccccaactgttttcctcattcttactttcccatttctttctccattcttccctgctctctcccccaactacccatattacaaaactaagtatagttttttattattcttaattctttatttttttaaagtatgaataagcattttagtctgtttcttctctcttcctctttcttgtgcatacacctgtgtacacacatgcacacacacatataccccaccgttgatttttatgagggtgaatggtctcaacagcagaaaggcttactacacttgtttttgcaagtatttgcagatctttgtagttcctaatatgttatctcacactgtagcctacagataagaattggggggaaaagtattaatttatgttattgatgaattctatgagattcccttactctagattcactcatccattcaatacctgtgcaaggctctggaggatgcaatcrtgaacagcatggacttgagtccttttcctcagagagctgtggaaaaacagcgtagagggagacacagatgccggcaagttctgtgagagggctagcacacgaattgagagtctatgtgtacttacaaatatataatcaaaatgaatcatggaaaatgaaactgagaaataagtgcacatttgtattttcaggttccagaagccaatatcttgggacaaattggacatggctataagtatgccatagggagtctcaatgaaggtagaataggaattgctgcacaggtaagtcagatttaaactcttccatgatgtgagtcaattaaactgtgaaaagaaaaaaatgcaatgagaccaatgaatatttggaagcttatggacacaagatggcaccgttcccttacatgagggatagaatggcttattatttctttcaaattcccttttggtcaattatgtaagtgtccatagaaccaaacaatggcttggtggtaacagtgtttctgctttgagaacattaaagtattatctaatacctgaaccgatagcttttcaaatgtattgtaaattaaatatggcactttaaaaaaaatcaacttttcaaagcatgaaattcattctggaaggaattttttacattaagaataaataatattccttccactgtgtagtaaagatatctatagttaataaaagatttgttgcttactgttttgcatgtgaaaactgggcaagttttttggcggcacatgaaataaaatagccacagttaagtagatacataaaatgagaactattcaaaatttttttttaccaaatttggcttttataatgcatattgcatttttctattaagtaatatcagttattttccagattaacaaaatgaataaggtctttggctttactttagtgtcagttttgtagagtgtatatatatatatatatatatatatatatatatatatatttttttttttttttttttttttttttttttgagatggagtcttgctctgttgcccaggccggagtgcagtggtgcgatctcggctcactgcaagctccgcctcctgggttcatgccattctcctgcctcagcctcccgagtagctgggactacaggcgcccgccaccacgcccagccaatttttttgtatttttagtagagatgaggtttcaccatgttagccaggatggtctcaatctcctgacctcgtgatccacccgcctcggcctcccaaagtgctgggattacaggcgtgagccaccgcgcccggcgtttgtagagtatatttttaatcagtgattatacaaaactcaagaacttagagcttttcagttttgaagatgttacatataagctattggaataaatattagattattactctagatttttttctgctgctgttactttgctaactatttttagaccaaaacttagtctagttttcctacaatgcttgacagtgtgtcactaaagaatattgttttatcagttctcttaaaagtttttctgtgattcaacttagacatgacattagaaactgcaatactagagctcatttttttcagacatataaataatatagatgttctggcaataaaatacacagcctgggcttcagtttaattactccaagttatataataacctaattaaaagttaagatcaggtagttactatctcagtggatacctttgagaggaagaggcacacggagtataacagtgaactgaaggcatctgtcctcgaaaccttgcaggcagagagaattcagtttttcagtgtttgtagtagaaacattttactgaggtagaaaagcccattttgatggataactgattatttcagtcttcgtgtcaatatagggtattatttatgtacaaattttagctgtaagggtatagtgacakcatcttatctcacagccaagagtgcagtgagtctgctgcctcatttgaatttggggtttgtggttttcttgtgcctttaatttttaacatattattctgttctctagagagttcagaataaaagactaaaagaaaatgtgaatgaatactaatgaaataaattgataagtytgctgggcatttcccccaaaagctttagctattgattttctaaaaccataatttgacataattactgatttagtggctacctaatgttgaaatttagaaacgatttctaagcttgaatcatataatagatatgaaagttggttagcagtgagacagttcagctaaaattgtcaccacgtcctgtgtaaattaatgyttttamtagatgctttctatccattgttctcaaccctagctgtgtattaagtcactaaggagttttacagagttgaggtttaggtcacactccttcacctactctactcccaaratttggattcagtcattaggcytgggtatcagtattgttttaaatcagattccccaaatgattctatggtacagctcggattcagaaccactgctctcttatgttctaatgccctcccattgaagctctcattaatcctaatcatatacaaaatagacggaaaggtagaaagttaagaagtgaccttccatattttacttctagaagaactggagggccttcctctatagccttcaaggccagttctgagcaaaacttctatggctcattttatacctggagaatcaaagcttaaggaagattcctaaagagtaatcttaacctaaaaaggttgtgtgaacacagccttgctgggagatttacctctgctagaattaaatgtgctcatattcacatgaaatcactcaaaattttctcccaattattggaagttcagttctacaaatgcggtgggtgaggatgtgttattaacacacacctcaccacctcagcatctccagttcttcccctgccccaatcattcaatttatgtttagagggaattcacaacttggataattaaacttataacaaaataagaaattctgatcttatttttttgttttaacagatgctgggactggcgcaaggatgttttgactacactattccatatrttaaagaaaggatacaatttggcaaaagactatttgattttcaggtatgtaattattagggtctttctgctgtgttagacttccccagcttcctgttaatgaagggctgtgttgaaatccatggagggaatcccttcagggggattttaatgggagatgggtaggggaggaaagaataggtctcagggagtgtacttgtgaatgccttgatctttgccaagggcagagcagtagtccttgaggcccagctatggcatgattcaggatatctcggtgagcaccgtgaagctgtctcctcactgcttcagaagctcagggcagggggtctggagtcagacttcctggattcaaatcctggttctttcacttaccagctttaggccttaggcaagtgacctcattctagtcttaaactgcctcatctgtaaaataaaggtaaaactacttacttaccccgktttaaatgaggtatgtgtaaagtgtttcacacactgcattggtatagcatgtgctcagtaaatggtaacacttgttatgggtcccctattcagaccagaaccatgtggtaatcctcagaggactgtactttgacacctacgtctcatggaagatacagtttgctgcattaaatacaaatgaggtgcagtcagccaagcacttgggtaatactgatttggtccagtgctgtggcttctcagagctcaccaggcaatctggggattccttggtggcagtggtattcttcctgccctccttgagatcttgccagggtgggggcagcctggagtggcagcttaccaaaccttttaggcaacctgaaggcatgtcacctaaaattccagaataattactttacatggttgcaaaacctccccttaagcagctctgggctccaagtacaatttatgattgcattgccaactgcatgttgcattgtcttcaggtttataataatgactaggcatcctacgagcacactcagattgcacatgtgtagagatacgaggctgtggacatgcacagtcagttcaagacccagaaggactgagagtggcaggcctggccagtgcctaccacagcccatgctgtcattcccatcttatgcctaggaacctgaagcacacggaggctgagttcccaaggtcataaagctaatatggggccaaaagtagaggttttttttttgtcttggcttctagtcgaattttcattatactagagtactttctcagccagctaccacaaagattgcagtgaaagagacagaatgtaaaggttgttttgaagggaggcttttgatcttctttatgcacaggaaactatgttcttgtgcatatagatagatagatcaatagacagaaggggtcaggtatactaacaggtataatcataatgacatctttagagatgcctagtatggatagttaaaagaacacttagatttttaaaatttatgtatttatttatttatttatttttatttatttattttgagacagagtctcgctctgtcacccaggctggagtgcaggggcgctatcttggctcactgcaagctctgcctcccaggttcacaccattctcctgcctcaggctcctgagtagctgggactacaggcacccgccaccacgcccagctaattttttgtatttgtagtagagacggggtttaaccgtggtcttgatctcctgacctcgtgatctgcccgcttcrgcctcccaaagtgctgggattacaggcgtgagccactgcgcccagcctaatttattttttaaaaattttgtgggtacacaggtacccataaacatttatgaagtacatgagatgttttgatagagacatgctatgtgaaataagcacatcaaggagaagaaattttgatcttaaaaagcaacattattatagctgtataatgctttgattaaagttagtggagttttttctaacacattatcttatgtttgctttgcatgcattcgttcatatctttctgacctcaagactacatggtccttgagggtagagaccagcctattcatctttattaatttcaattgtttattcagtatagatttatttagcatgttctccatgccaggccttgtgttcacaatgtagttagggaacgagtattcagcaatggtgagttcttgtagaggaggagacatgcctcagtcactttcctgcctctctcagtacttaatgtggcaaagggaatagacagcatggatggtgactgtaagtttaattgaactgaatgtagtttgcaaaaataatcagaatctctgagttccacataaaaagccaaattcctagaacagtgatacttgtatagaaacagacaaattcactgatggaacaaaacagaaaagccagaaatagacccatgcatgcagcagatttgatgtatgatagaaatggcattacagatcactgagtgggaacattctttctacgtgagaaaataatgaaactgtattcctacctcacaccatacatacaaaatagatgtcagatgtaaagacgtgatcttaaaagcaaaactttaaagattttaggagaaaacagagaatatctttataacctcatggtaggaaaggtttttgtaaacagacacaaaaaggactaatcctaaagataagatgggtggtaagattggtaagtttttttccttgaaatatgccataaagtgaaaagataaatcacaggggagaagatattgactctgcacataggtttgtgggtgtttaacttactattatgctttatagcctacatatacggaacatcgtctctttttgtacatacgaaattgttgtgtgtatcacatatttcagaaagagaaagagaagaatctgtagggtattaacaaacagtgctgtttttctccaacttttccctcccttttgtttaagaaaggccattcctgggattcgtgtgtgattgacttaatcaaggttcactgtcttaatattcatcacacattattataattatttaattgtctgttcttcctgctggactatgtattataaatcatgagaacaaggaactctggctgtaatgttcagtgtgctgcctctgtcactcagggcggtgcctgccatctcagaggtgcccaataactatctgggtggatggataggttaggcatgagaaacatttcagtttgtagtaaacatctgtgcctgttatttgcaggaaattgtttataaatgttaatgtttgtattctggctcactaagttaactgttgtttctttcattggcaaacatttagtgtggacctaatcaccctctaaaatttcagggtggtagtaattggtgcttcaaatattcttcattactttgtagctaacattttttaatgcctggaagccatatgaaaaatcaaaattttcttaactcaagcaaataaagaatatattcaaagttttgctgtgccaggatttcatttaagctcaattttgatcaaaagagttgaaataattattaaatataacagtcaagtttttaaacctaactttgttatactttactatttaaatcttgaaaatcatgaagacttacatgaactttgaagtttttctaggaaaagaggatttaacaatacttatagtgtcacatttcattttagattactcattttaaagtatttaaaagacgtgaatgtaaatttcctttggggtgtattttgagtctgtcagtgttgtgtatctaggcaggactttgaggttgaggtgcttgcttttttgaaatcataattctctaacttgggcctgactgttacagggcctccaacaccaagtggctcaygtggccacccagctggaagctgcaagattactaacatacaatgctgctaggcttttagaagctggaaagccattcataaaagaagcgtcaatggccaaatactatgcatcagaggtaaaaaaaaaaaaaaaaaaaaaaggraaaagtaattcagcctttttttttttcagatatatacttattaacattttctcttgggaatgttgattgtactttggttgtttttcaagttaagataacatggacttttatttcttataatagaaaagcaaaaaaggaaaactgccataggaaaacacttgaattctgtgaggtctcaatgtttcgttgagtagcccagctcagctagaccacccatctcaaactgccataggaaaaccttcagttctgtgaggtctcsatgtttcgtgagtagcccagctcagatagaccacccatctcaaatccatggctgagcctcctctgaatgagggtgtcatgcctatggtgtcaagttcgggcaaagtgaatgccgtggaagatgatgggtccatcatgtgaacaaatcagatttaaaacaccaagaaaagattgtctaaaactttctactcatacatttgctttctagagctaacacattagactgaggctagagaatttagccaaatcactgggcagctgtttcgtagcctcagcagtatcttattcattccatggctttaaattctcatttaacctctccagcccataaattaaatatcctacctcaacttctttctgaattccagactaacatgtccaacttctgcttcaccatcagaacctgagcgtcatcttggcaccctgctttccctcaccccccacattgagtccagcatcatttcctatgattctaccyctaaaagattccttaaatggtgtgtttgtctccctctccactgccacctctgtacttcagtcacctcactgccctcctggtccctggtgcttcctcccatccagcctctctcctttttcaaagtggcagtgaggccatgtcaccttccagctttaacccttcagtggcttctcacaacaaatggagctctatctgtactagattccaattgctgctataacaaattaccaaaaagtcggggacctaaaacaacgcagtttcgttttctgtcacttctagaggtcagaaatctgaaatgggtctcactggaatacaggggctgcctttctgtggttctggcagacagttgtttccagcttctaggggctgctcacattccttgactcgtagccccttcctccatcttcaaagccaacaatgtggcatgttcagatctctctctgactctgcttcctgtctccatggtcacgtcaccttccatgactaactctcctgcctcctccttttccttataaggatccctgtgattatatcacagccacccagataattcagggtaatctctccatctcgtgtccttacccacatctgcagagtccctattgccatggaaggcagcatattcacagctctgagggctaggatgtggacgtccttgaggggccattctgcagggtctctcgctcctccattctcttttcacatttcaccccgatcccagcccactggctgtctcaggggctggaagttgaagagctcattctccccttggaggatttcgacgtgttggtcctcagcttgaaatgtcccttagctcgtccgttaggcccccagtaaacatttcctgaataaatgatatctctcagcatgcagattcatgygaacaatgctctaatttcttaagaaaatggggattctgtgaattaataggatgttttacagaaatggtatggagaatgggactgaagagacaatgctagtttagaagataactttagtccttccagtgccactaacagtraatccatgttgctgaaaatgttacccagaagtgtttatcatgtataagttatgtggtttcagtgtgtgatttgcacttgcttttggtagattgcaggacaaacaacgagtaaatgtatcgagtggatggggggagtaggctacaccaaagattaccctgtggagaaatacttccgagatgcaaagattggtaaatagatttttttttttacattttattttgttttatttgcctctgtaggtattttggctgttttatttgtcgtttttttcctaggtaaaagcaattttaatttcttcagtatatgtttggtggctctatttatgtggctggatttttttcttacctcgtccttcaaaaaaaattgttctatatttttaaaaaatatcaaattgcctttttaaatgcctcaacaggctttttagtaaaactgccacaaataacagtctgagcttatgcatcaattgttgaagaatcaaaatcttcaacttttgtttacacctttagtcagtttaatactgatcctggacatcgagaaaccaaatggaaaattgtcatctcttagtcaaaattactgtgaaatagtaccatattcaggggacatgaagtgatgtgactagtaactgttttatagcaagcgcagaggtgatgtttatagagctatttcttgtcttaaccatgcgccaactcctcattgttccttctgcttccttttgcttaaggtacgatatatgaaggagcttccaacatccagttgaacaccattgcaaagcatatcgatgcagaatactgacgtctataggagtgggacccctycctggtgtcactgctgtaaaattttaaacggttgtgtcttgttgggagtaagtgccttgcgtgggaataaacttccacagcattcraatattttaatgaagcccttagtcagggtcctggtgttggcctttttggttttctcttttcaggctgtttaacttaggcacaggagatccacttttaaacttgggaaataagcacctgtatttttttccaaaactgtttttaaagctgtatacgcatacatatatatatttttactctgtcttactctgtcacccaggctagagtgcagtggcgcgatctcagctcactgcagccttgacctcctgggttccagtgattctcatgcctcatcctcccaagtagctggaactacaggtgtgcaccaccatgcctggttcatttttgtgtttttagtagagatggggttttaccatattgcccaggctggtcttctggcttctggatatcgcccaccttggcctcccaaagtgctgggattacagggatgagccaccrtgcctggctgggtatttatattatcattctagtttcagagtatacagaagtttcatcccatcatttggaaaaataaaggcatctgaagtacaatattacttatagaaatagtttatattcctattaaatcttaatcttgtggcatcagggaaatatttgttacatagtaggcaatttttatccagtactttatagattcaactctaagttgcaagcgaagtcaaaactgatgaaaatttatttagaaaaatctaaaaattctggttttaaatatgagaatcagtggaaaataagggtataattttgtaggtcatatgattgaagaaaatattattttaacaatgtaaagcaatatgatttgttactataattaacctgtataaaagatacattttatggtggtttcagtaggtcattttaaaaaccaatgtgcattagttttcaagtataaggtttaagtaatttggtttaataatcagaaaatattcaatacagtgttggatattctgtcatgcactatttttcagttgacaatttctgtattttaattgaatactgtttcttcagtcatggttattgcactttatcctgaataatarttcagaaattgggttttggttcagtgattctcaagaaaaagatctcttgcccattaagaagtgtatcaaaatctcataaggaatgagggagagaagggggctgtasagtttgaaaaagcatattcaatattaaaatagttttatatttgggaaggcaaaaatgaatctattgttttgcaatataggttataaacaggcaaaatgcaataaaatatatatctggttgtattagtctgttttcacgctgctgataaagacatacctgagaccaggaagaaaaagaggtttaattggacttacagttccacatgactggggaggcctcagaatcatggtgggaggcaaaaagcacttcttacatggcggcagcaagagaaaatgagaaagaagcaaaagtggaaacccctaataaacctatcagatcttgtgagacttactatcacgagaatagcacaggaaagactggcccccatgattcaattacctcccccgggtccctcccacaacacatgggaattctgagagataccatttaagttgagatttcagtggggacacagccaaaccatatcattctacccctggcacctccaaatctcatgtcctcacatttcaaaaccaatcatgccttcccaacagtcccccaaagtcttaactcatttcagcattaacccaaaagtccgcagtccaaagtttcatctgagacaaggcaagtcccttccacttatgaacctgtaaaatcaaaagtaaactagttacttcctagatacaatgggggtacaggtattgggtaaatacagccattccaaatgggagaaattggccaacacaaaagggtaacagggcccatgcaagtccaaaattcagcagggcagtcaaattttaaacctccaaaatgatcacctttgactccacgtctcacaatcatctctctcaagttcgaagttccacaaatctctaaggcaagggaaagatgctgccagtctctttgctaaaacacagcaagagtcacctttactccagttcccaaaaagtttttcatctccatctgagaccacctcagcctgaattttattgtcaatattgctatcagcattttgggcaaagccattcagcaagtatctaggaagttccaaactttcccacattttcctgtcttcttctgagcccttcaaactgttccaacgtctgcctgttacccagttccaaacttgctttcatatttttggctatcttttcagcaatgccccactctactgttagcagtttactgtattagtctgttttcacactgctgataaagacattcctcaagattgtgaagaaaaagaggtttaattggacttacagttccacatggccggggaggcctcagaatcatggcgggaggtgaaaagcacttcgtacatggtggtggcaagagaaaatgaagaagaagcaaaagtggaaacccctgataaacccatcagatctcatgagacttactatcatgagaatagcacaggaaagactggcccccctgattcgatgacctccccctgggtccctcccacaacatgtgggaattccagaagataaattcaagttgcaatttcagtggggacatagccaaaccatatcactggtgatgccacttcttcagtattagggattctcagtcagaagagaccccctgtgtggcctgagtcccctcaggaggaaggtggacaacagagaaatgagagttttgatattttctgaaagaggaacatgtgttagagatgaagaatcttccaaggctcatgcagttgcttagaataatcattactgttatatgagaaacattttagtaatttaataaaaggataatgtttatttaaaaaacctgacttttccagagtaattttgttttgcacattcatgtttattgaagtggactaatttctataatgcaaatcagagttaaatattaaaaattgtgtaaatacaattgacataggaattacattaaaatattaggaagaaacaaggacaaatttagaccttgaatccgaagagataaagcttacttgactttcaaatggagagatgatgaaaacccactcattcagtctttcagaacaaaaagacagtcatctgataagagtatgacatggatgaaatgccctacaggggccttggacatctttaatttctgcgattatgtgaaagaggtggactttacagataatggagcagaagccaacattagtaaaaggaatcccaacttcttcccatagaattagaaacatgtgaaagtacaataaacttcttgttcaaattaccagcatcagagagcttcccatttgcatctagaccttgaatttatatttattgatcaagttctaatttgtatgtatattttgtgcatattcaccaataacagttaaaattaattatgtgttatagttaatatatgcacctaccttcttccgttagtgcatcagtaaatgtgttattttgtcatttttccaaagagagtgttgtaggttttccctgtagttcttcctttatagcttttcttctgataaccatgacttcaggagctttaaaactatctatcttgcatttgtgtctggcggagaactagccatcagcctcctgaagcctgccatcattgttaatttgaggactgggctgtcttggggctcagaaggtaaagaactatttgagcagatgtgtgtgggtggcactggattccacccaactgccaagttagtattgttagagatttcattttacaacacaaaaataagcctgtgtcaaagattttaaaatcatggaaagttaaaatctagaaagaccttagagaaccagccaaccaactctctcattttaaaagtgaaggattcatagcacagattacttgcctaagatcatccaggaacgaagacaagaatccaaatgtacttggggacaagaattagtccccaaattcagtgttcttcctagtattaaacattgcccctttcgacaaattttggatttcattcttgttatatttcagtactcttgctgatttattttaggtttaactggtaaagaatgaacatttcagaagtgttaggattagtcagtgtcatcgcttatgtatatgaatcacttgccaaagacactggctctcctcagctgtaaccagcatgtcaaatgtgaagattattgtgtgggatcctttggtttcattgttatgatgtattttataaatgtactagttatatccttgtttatgtatttttgctgatctttcataaagcagaatggtacgtatcggattgttttaatgttatatattggattgtattcgttgttacaaaaccaatattctatggagaatgaaaaaaataaaggactaaattaactggagatttttggtactcttataaagcaaaattgtttgttatacatacagatgaaataagaaaataatgtaatctttctgtaagatatatacatctttgtttaccaaaccaatagcttgcctctcacataagccaattttgtttgttttcagagaagaggtcttataatgtagactgagtttaaattcatgatactaaagaaaatgttgccagaggacccttttttttaaatggcaaaataagcagctcttcagtagagagttcacctcttttgagcgtatccttgctgtacagatattatctggctgatatgtatgcctgtgctttatagtgttacttttagaaaatgtatattattgcactttttactcagtggtacactgtagcctaaggctataggaaatttcaacttatcttctccccattatcctctacatcattttagaaatctaggtattagtccctttttttttttcctttgtcattcagcaacatgtagtgagtggtcgctatgtccaaagtgctgtggacgctgagccaccatgcaaacatgaataagaacagctccttgtttaaatgtgcgcccattcaggtgtcttttctattcatcacagaaagattgagtagaaagctaccgaggtcacccctataaagaaatatttctttacatccattagaatgataacagtaagcgctgacatctcttgagctcctaccatgtgctagccatgattctagactcttgacacatattaactcacaacagccctatgagggaggtgctctttgttatctcatttcataggcaaggacactgaggcatagaggtgttagataagatgcttattcatagatggcagaaatggaactcaaactccagcagtcttgctgatgaaggccctcctagatttattcttttgggtctaagtcttgtttatcttcaggagccttccagtaaaataccaccaccaactagtcctttattcattaataattcttcatgaatgagtttcagatactttgaggcagagaaactagctgagaatgggaccttcgagacgaacgggtgtggtggaaacgtgtgtttggagagaagacctggcagagtaggtaaagcaatgggaagatgcagttagaaggatgagaaaagcactgaaaagaaaactaaggaaataccaaataatctcactctagagttttgcctgggatttgctatgtgccatgtttgattcttgatcttaaaaagataaaaataagtaatttcttgagcccaggaaatttgagaccagcctgggcaatgtggcaagaccccttttctacacaaaaacacaaaaattagccaggcatggtagcacatacctgtagccgctgctactcggaggctgaggtgagaggatcgcctgagtctgggaagttgaggttacatttaggtgtaattgcattccagcctgggagacagagtgagatcctgtctcaagaaaaaaagaaaaagaaaggaaaaaaaaaaaagtaaagactcaaagttaccctagggtggggagaatgacaaaaaatcatgatagaaatctgagtggtggctacgcaattatttatacagatagctcacaatataaggaaaaaaccttattttttttaaaagaaatcaaggtaagtagaaaataagacgggaagataggcaaacatagtattatttgtagttgcaaatgggttaaactcagatgttcagatggtgcaaacgaaaaatttaaatcccagctacataaagttagaaacacctaaaacaaaacagcacaataaagttgaaataaagagatggaaaaaggccatacaaatgctacaaaaaggaaagcatgaatagcaatgttgatatctaacaaaacggaattaaaggcaaaaataattttaaaggatatgtcataaaaaggaagagttcaccaaaaaagtccagcagtcacaaactttatgtccctaacaacataactgggaactacatagagcaaagcraatagaaatacaatgaaaaaaattgacaaagccataatcatagttgctgacttagaaatcaccaagtcaagtggaaggtaagaacagatgtagaggatttgggtggcgtaattaacaggtttgatagaacttttttgtttcttttcaaatgcaaatgaatgatcattagaattttgtctcaaaatttctacaaattccaaaaagataaattttacaggcggcactcactgtacacaatgataagtaaatatataaacaaaaaagataggatataaaaaagctaaccacgccgggcatggtggctcatgcctgtaatcccagcactttgggaggctgaggtgggcggatcgcctgaggtcaggagttcgagaccagtctgaccaacatggtgaaaccccgtccctactaaaaatacaaaaattagctgggcrtggtggcgtgcccctgtaatcccgctagctactcgggaggctaaggcaggagaacctggaggcggaggttgcagtgagccaagattgcaccactgcattccagcctgggcgaccaaacgagactccatctcaaaaacaaacaaaaaactaaccctagactttaaataacctggattaattaataaataaaaatataaaatacaaattgttggccgagcatggtggcttacgcctgtaatccaagcactttgggaggccaatgcgrgtggatcttttgagatcatgagttcgagaccagcctgggtggcgaaaccctgcctctactaagtaaaatacaaaaattagccaggcgtggtggctcgtgcctgtaatccaagctactcaggaggctgacgcaggaggattgcttgaccctgggaggcaaaggttgcagtgagttgagatcacagcactgcactccagcctgagtgaaagagcaagactccatctcaaaaacaaacaaacaaacaaacaaaaaacaaa

SEQ ID NO: 93896 - DNA, 181323 bp, Homo sapiens
  misc_feature (1)...(181323): n = A,T,C or G
ttttcgacattgcgaatcctgctctcccacactctgctgattcttccacttctctcattttcccttctcagttcacaccactggcttctttttctttgctgtgttcataaatagtgtttcactaggattctatcctgagcccttttctcttcttacctttcctggccaactgtttctactgacatggatttactatattgaaccatgactaaattgttattttcagcctagactttttgccaagctccaggcacctatatattcaaaaatccacccaaagtttcacttgaatgtctaaaacaggaattcattttcttctttaatttatttcttcagttcctatctcaaaaatgattatgattatggtgataatatttactaattccttactatgtgccaggcactgttctaatcactttatggatattgactttagttgtcacaggaatactataaggtaggtattttctcactttacaagagaggaaataaacacaaacttagtatttcagtgagtgacattgtccttcacctgaatacccagttcagagacccaaaaagaatctagatttttcttcctccttctttatgtttaatccagcatcaaatctctttgactcttccatttgagtttctctggcttgattccatcttctctatttattgttctccagaatctgtgcccttgccttaattcaggccctcatcattgctcaacagattcttaaaatagtgtcctaactgatcttcacaccttcaatcttagctctctgcacccccaatacaatcattccccactctcttccagagtggtctttctgcagtgcaaacttgatcccagtactgtgctacataaagtctttctgtggctcccctcacctacctcatagctctgtctgcacggcactcaagacacccacgtaccctcatctgctgcccactgcatggcatttcagcttcatctcctacgcttccctactttcacttcagatattccatatacctccctgaatgccaagtgcaaaaactttacttacgcacttttctctgcctggaatatcccctaccatttctttgaactattcatacttcaacagtgctgtcttacatgacagccattagccatatgtggttacaagcacttgtcgttaatctgaattaaggtgtgtcgtgttgttaagtggaaacatggaattttgagacatagtatgaaaaaagtataaaatgtatcaataattttatactgattttacattgaaaagataatattttggatacattgagttaaataaaatatattattaaagtttttttctgtttctacctttttaatgtggctacattacaattacacatgtggcttgaatttgaggctcatgatatattttaattaaacaacaatctttcaaaatccttacccagtaaacttaaccaatgaggcaaaataactgtacactgaaaactacaaaatgctgctgagaaattaaggaagacataaataagtgaaaagacatgccatgttcatggattggaagacttaatatcattaacatgaaaatactaattaaagttatatacaggtttactgcaatccctatcaaaatctcaatatcatttttggcagacctaaaaagatcctaaaactggtatggaatctcagtaagccctgaatagccaaaacaatcttgaaaaaaaaaaaaaaaaaagagaacaaagttggaggtctcaaacttcctgatttcaaaacttcctgatttcaaagctacaataattcaaacaatgtggtactggcataaagacagacatacagaccaatggagtgaaatagccgaaaaaaaaaaaaaaaactctcatatatacggtcaactgatcttcaacaggggagccaagaccattcaatggggaaaggatagtttcttcaacaaatggtgctaggaagactggatatctacacataaaagaatgaaactgggcatttatcttctacaatacacaaaaattaactcgaagtatattaaagacctaaatgtaagttttatagctaaaactataaaactcttaaaagaaaatatagaggaaaagcttcatgacactggatttggcaatgatttattggatacgacaccaaaagcacaagcacagacaatataagtaaaaatagataaactggactacatcaaaatttaaaatgtcagtgcatcaaagaacacaatcaacagagtgaaaaaggaaacctacagaatggaagaaaatatttgcaagtcatatatctgataggttaatattcagaatatgtaaagaactcctacaactcaacaaccacaacaacaaaaaccttatttaaaaatagaggacttgaatagatctttctccaaagagggtatacaaatgaccaacaagcacttgaaaagatgctcaatatcactaattattaagggagggcaataaaaactaccatgagatatcactccttacccactaggatggctattatctaaaaaacagaaaaagtatcagtggggatttggagaaattggaaccgctgggcactgttgttggaaatatgaaatggtgcagccactatggaaaacagtatgacagttcctcaaaaaattaaacatagaattaccataagatccagcaataccacttctggatatacatatatataccgaaaagaattgaaagcaggtcctgaagagatctttgtacacccatgttcccagcaacattatttccagtagccaaaaggtggcgcaacccaaatgtccactgttagatagatgaatggataaacaaaattcatatccatacaatagaatattattcagtcttaaaaggaagggaattctaacacatacaacctggatgagctttgaaaacattctaagtgaaataagccagtcacagaaagacaaatcctctattatttcacttatatgatgtatctagagtagtcaaactaattgaaacaaagtagcacagtggttgccagcatctggatggagattgaaaggggagtttaatgagcataaagtttcagttttgcaaaatgataaagttctgcagatcggttgcacagtaatgtgcatatatagttaacactactgaactgtacatttaaaaacggttacagtggtaaattttgttacatacattttatgttacatgtattttaccacaattaaatattttttaaaaatccttccccaggtatcactccccctcctccctgcttctgtgtgaattaacaactccctcctttgcacctctacattatcttgcgtataccaccattatggctcttattacatttttggtaattacgtgtttgacaggataagggttactgtcccatttgccccatcctgggacaggtgaatacttatccactcctggggtcctgactagaagttaggaaaatatactagggtctttggcaagacagagaaaagaggcagtgacccctatggcataattggctaaagaggaccgtcgttatcagcaagaatatatcttggatcttgtagatgtttcactctgaggctggacctggaaggaccatttttcttcaacaatccttttataggcaggctctgacaaacctaagtaacacttctttcctccctcaacacacaaaaacatcttctccattatgaggacagccagctgaaatgactggtcatacctggtctgacccacaggagggaaaagagaaagatgttcattcaagatggattcaagggccgggcacagtggctcacgcctgcaatcccaccactttgggaggccaaggctggcggatcacaaggtcaggagatcgagaccatcctggctaacgcagtgaaacccccgtctctactaaaaatacaaaaaaaaaaaaaaaaaaaaaaatagccgggcgtggtggcgggcacctgtagtcccagctactcgggaggctgaggcaggagaatggcgtgaacccgggaggcagatcttgcagtgagccgagatcaggcctctgcacaccagcctgggcaacagagcgagactccgtctcaaaaacaaaaacaaacaaacaaacaaaagatggattcaagatagaacagctgacctaataaggttctcaggggggacaataaggaactatttttgcttcccttagactccttgtatgtaagtttgatacctaattaaatttttttttccgataatggactgtaactttctgcccttccaaggtcatagtcaagaggttacatttgtttgctccatctttgcttctagatgggagctcctttaggggcgggaccagactttattcatccttggatcccctgtgcccactggtcctggcacatagcagatgcccaataaatgccaactaaatgactgaatgtttagaatgagggtctttacagcattgagcctttccaataacccggagagaggcttttggccgagcaactagtctaccccagagagaaaggacagtctgaactagagagccacagggagtaggaaggtctgctgggtatggggagcagagggagcatgagaagaaaacgtggttcattacatagcccaggttgaacagacagatgaaaatcgcaccctccagcttcatgttccactgtctgactggtcattatatagggccgacatttatctggtctccaggcaaattctataatttcagctccgtctgaagcaacacagtaacactgactcagtggcctagattccacaagtgccacataccttgctttagcttaaatcaggcattgttttgtctggctgctaggactggctcaggtctgctaacaataagatgcttatgcatggccctttcatgcagtcagtcttttaaatttttttgcctctcttgaaatcctggaaatgattcctaacaacggttaatctaaaaatcagctggttttggtcaatataatggcgccccttcgaactcacattcatggaatatggaagctggaaggaagagtagaaactagttctgcttctcaggtaaggaaatccgtgcccagagagttgggctgggttccagccagttaaaactagaactcagagatgctgtcccgagcccttttacttctgctgcctgcccgcaattgcggtcacacctgcttcagacacttccagctcaatcctccctccattttctgtgcaactagggtcctctctggagagctcttaagccatcagctctaggagagaagtgggcagacacaaatctttcacaggttaattttccttggaacattctgggtgatttttttgtaaagcccgattctcaatggtgttgatttcagggtagtgttcctcactgagagctaaggaggcgttgcagaagtgcgctgattagctagaattgaccataaacagagtggcgcggcggatgggcaaagggtgggcagcgaactggcccaaatcatctgtgcatcacctcacaagcaccaactgagcacttactgtgtgcctgggtaatccacagctgcctaattaagaacgagcagctgccttccaaccctcccctggcccgaggagccctactaactggcagattgagggacttctgattctcatcgtgggtctggccttaactagggtcgcgactccaagcaagtatttaaaattctccaacccaggtggcctgaggcttgagaagaaataaaaggcttctcaaagggatgacagtttcgggaagttttttttggggggggggactggaaaaataccataaaaggcattttgggggtcacacacacacaagagcagaagcgctgtgagccgccctgcaggctccctgccccgggagccaccttccacccgcccccgggcggaggcggccaactcccgcccagcgggctccccagttcggccccgaaaagccgaaaggggggcgcctttgtctataagcgccgcacgggcgctcctgattggctgtagctaagcagggctttcttccgcgctccttcggagcgctccctccagcgtcgccggccccgttccatttycacagctcctcctccccggccgcgcgcccctcccgccccgcgcgcgcctcctctttctcgcggccgagttcagcccgggcagccatatgggggatacgccagcaacagacgccggccgccaagatctgcatccctaggccacgctaagaccctggggaagagcgcaggagcccgggagaagggctggaaggagggractggacgtgcggagaattcccccctaaaaggcagaagcccccgcccccaccctcgagctccgctcgggcagagcgcctgcctgcctgccgctgctgcgggcgcccacctcgcccagccatgccaggcccggccaccgacgcggggaagatccctttctgcgacgccaaggaagaaatccgtgccgggctcgaaagctctgagggcggcggcggccyggagaggccaggcgcgcgcgggcagcggcagaacatcgtytggaggaatgtcgtcctgatgagcttgctccacttgggggccgtgtactccctggtgctcatccccaaagccaagccactcactctgctctggggtaagtcccgccggcgccccctgcgccccggcctccgtggccaggccgcgctggggcgcgcgaggtcgccgctcgcccctcggctgcgggcggtgcgcagcgacccccggtctcccctcgcctcccgctgcgcgccgcggcccccttggcatccagttttccgtcccttgggacgggcaggtgtttctgtcccagtatttcaacttccgccccccccccgcccccaccccgccgcggtctgcctgaggaagcgcatttgccggcttcccgatggagagccgggggggacccggagtcctgcggtgccaccgctgtgcgcagaggcgcgcgaagggagaggctcggcacaggctgaatcggctcccagcgagggaggacgggcgggcgattgtgtcacctctgcggtccctggggctctcctatcccccccatcacctccgcgggtcacggaccttggggacagagatgaggacaagtaagggagttggaccggggaggagagacccggcacaggatagagtcttggtttacgcgcaccagatggaagataccggttcccctcttgcctctccaaggcccctgtccctgccccctccgcaatcttctatgcccatttgcagttctcggtgaagtttctcggtgagcaaaccgatcccatggcgagagcggtctgaccctagcacgaagctccgactgtggctgtgcagagccttctccaaaccctgttcccatttggccagtgggaacctgtggctctcctggtaccctccttccgtgcacccccactcctgccagtagggaagggagcccgggcgccgaccaccattccccttcccctgggccccagggactgcgtgcccaccctacacgaccccagtcgttgatctttgaaccacttcgcagccgccctggccgcaataactggttttggcctcctttactgaagcggcagtwgccaggacaaaaggcacaggcattgatatgctgagtgagaatttgacgaggtaatccaagatgcccttccagctcccgtttccctgatctctaggggcgggcaggagaaacacaacctacttttatttccagaggggaagaggaaggaagaaaataagacctctttctacagggcttttttggcatggtgccagctgcaaatgcctaggtagataatggggccactatggttccaagccttcccttgaaatcctgcagtccctgctcttggaagtaaacccatccagaagtgggtacctcttagggggtgtggctcagggagggcatagcagagttgacggatggtgagagaggtaggatctttggggatccctaaagcctttaaagtctccccaaagctctgggaaatctcctgcttcatctttccttctctcagtgcacctcctcatttctgtgtccttttcaccatcacctttatgtgttggtttaattctccaactgactgtagactgtatgatgttcagctgttgcttcatcaacacactccgacactgccaaccaaagcccttattgcccagagttctccaacaagctcctctctcccccctgcttccagaggcagggctgggcttggtcctcagagcctggtgacctctaggggattgaggcttatctttaatagctgtggtgttcagagagtgctcagggaaaagtgagcacttaaaatattatcttacatgcctagggctcactggctccacttcttacagcctctgagccccaagaccctggcactggaccaggagccacaaggacaaggcccctctctccaagtttgccaggtcacctctgccctttccggaccgctctctgtggtgaagatagaacctttgttctgaaagatcttggcttagaggacacctcccaggccccagtgtcctctagcttccttagagaagttaacacactgaaggaatctggtttcccctttgtgactcatgtcccaaaccccattccataccttcctggataaattctgcctgtgcttcatctgctatttcctaagtcttttttttttttttgagacagagtctcgctctgtcgcccaggctggagtgcagtggtgcgatctcggctcaccgcaagctccgcctcctgggttcacaccattctcctgcttcagcctcccaagtagttgggattacaggtgcctgccaccacgcccggctaattttttgtatttttagtagagatggggtttcaccgtgttagccaggatggtctcaatctcctgacctcgtgatccacccacctcagcctcctaaactgctggaattacaggcgtgagccactgcgcccggcccgtaagtcttaattctctccccaccttcattgcctccctaaaaaaaaaaatagcagacaatggtagatattagagttttaaggtccaaaattgtgacttagaaacagtccaaacaatgggtcttatctgatgaatagctactgcctctgctgcttttttttttttttttttttttttttgtgagacagggtcttgctggagtgcagtggcacgatcatagctcactgcagtctcagtctcctgggctcaagcaatgctcccaccgcagcctcccaagtagctgggactacaggtgtgcaccaccacacctggctattttctttttcatttttttgtagagatgggggtctcaccatgttgcccaggccggtcttgaattcctgggctcaagcagtcctcccaaagtactgggattacaggcgtgagccactgtacccagtctcatgaatagcttttgagggaagaaatgagggacaatcagagaccagctaagatcagctgtgctgatggctaggctacatagtaagcagagggacgaggcagaccactgactcagggttattttcagtgaaagccctggtgccttgatccacaaatttccccccactgaaggccctttttcaccacctccctactggttatgtgtagcattagggccaagttcatgccccagtgggctgctcatgcacttcaaggacctgacttgtagaggaaataggcttagcctgtccattgcttgccaccctccacaccagatgaggttgtgctggaaacaagaggcatctatgcagtgcacccagcaggggatgtgttggatgtgcagtgtgcagagagtaatttgtgtggtggtaaaatgtcatccgtgaaagagccatcaaattgttagttcatcaagttgttagttctccttggggccagagcatgttgttttccctttttatccttttcgttttatgagtgggcaggctgtcaggacagaatgctcttggtgcccccaggtcctcagcaatgcgttcatgactttcaaggacagaaagcggccgggcatggtggctcacgcctataatcccagcagtttgggaggccgaggcgggctgatcacaaggtcaggagatcgagaccatcctcgctaacacggtgaaaccccatctctactaaaaaaaatacaaaaattagccgggcgtggtggtgggcacctgtagtcccagctactcgggaggctgaggcaggagaatggcgtgaacctgggaggtggagcttgcagggagccgagattgcgccactgcactccagcctaggcgacagagtgagactccgtctcaaaaaaaaaaaaaaaaatggacagaatrcaaactccaactagaggaaaaacctgcatctgaaggcttgagctcacaaaaatgcctgcttgagagtttctggccaaagggacagttagtcaatgccctgaatcccaagatgggtagagcagggagtgaggccttgcagttactgtgtggacgtgtgagtcctggggctgcttcccagcggagcctcccctgatggcctccagacatctggctgttggctcccagaaacatcaaggccttttctgttttttccctaaatgtcatccgagtcccctaaatgtgtcccatagtgacatcatgactcttttcctcatgagataacttcagtgacagcaccaggcatgcaaagcagtaattttccctgtttcctttgatagatcagccatccttctatcctgtcttggcgcaaacgtgaccattgttaaggcagatatagcgttctctggtgccctgctgggttcttggagcatctgtaccatcctgagtgggattcagcatatggcaaggaaactgagaagtggtggagattaacaaggcagtgtggggtgatgggatggtcagtagaagctggggcttggaaggcactggtccaccagtcacattctgaaatttgcccaaagatgagctgtcttccgttgggcatcgggtagtctgtacctggtcctgatgtcttcattgggttgtgcttcttttccatcaagtccctcaggttgttgaggacccccaagaatgcatggtcatggacttctgtcttgccccaaggttttctagagtaagcaaggctcagtagacaggcagatctgaatgtgaatccctgctcttctacttacttaccagctgaatggccttggacaaatttacatctctgaagcagttttctcacctttaaaatggatatattaatactgtttgttcctaaagttgtgagaatcaaattagatgatatgtgtaaatcactgagcacagtgcctggctcttggttggtgttaattattcactgtcattattattggtcctaatactggccccttttctttagcagaagaaaaaaaagtcttccggcagcgcaataaattccacaaagatggcacagaacttggcttcacagcctctcttgcatagaaaagatagatttggctttggaaataagggctctttctcaacgttccaaagagagatgaacacaaatcccttctgtgcttcctccctccttcatgmccttctctttcattccatcttcctcctgttttcctccaaaagatcattgttttgtagctgggatctttttgttcagctgacaactcagctggtcttgagcgttttctttgggatttttgagcacagccagttacaattgctacagaaacagggccacatcatttctttgaatctcttagagtctcagttttgacttttctccctccctcttcctttgactcatcatttaaaaaactttaatgctcaattaaactactaaaaatctaagaaaagtgaatgactcttcctttcaaacgttgtaattccaagcccattgttgttacaactcttgcatttttaacaaatgggcaagcattaagagccttacccaagcctggattgcagctagacccgaaagaatagagtgtgcttttgctggctctaatagtcccaacaagtatgaacatagattgaggttaacattattaactcaattttaaaacaaacaaactgatcaaggtcactgcagacggcactgtgaccatgaaatgagaaagagagctgcagagtagaaaccagtgcgaatcctgacattgctaattagttcaacttcagactcgtttctttacagtttgtgagcctcagtttcctcatctgtaaagtggatacaataatcttgagcagacagttatttgagaatttgggcatatgtattttctttgagacaagatcttgctctgtcacttgggttggagtgcagcagtgccatcatggctcactgcagcctcaacctcctgggttcaaagtgatcctcccacctcagcctcccaagtagccagggctagagatgtgtgccactgcacccagctgttttttgtttgttkgttggttttttgtagagatgggggtctcactatgttgccagggctggtcttgaactcttgggatccagcgatcctcctgccttggcctcccaaagtgctgggattacaggcatgagccacggtgcctggatagggcatatgctaaaggacttgctaaagagtagacactcaatgctatctactattattacctcccaaggtaggggcctggtcatgaaacctgcactggcttactggtctgtctccgacttggagtacttgtgactcaaatgtaaggcacagctttttttttttctagatggagttttgttcttgttacccaggctggagtgcaagtgcagtggtgcgatctcagctcactgtaacctctgcctccygggttcaagcgattctcctgcctcagccttcccagtagctgggattacaggcatgcactgccatgcctggccaattttgtatttttagtagagacagggtttcttcatgttggtcaggctggtctcaaactcccgacctcaggtgatccgccctcctcggcctcccaaagtgctgggattataggtgtcagccagcgtgcccggccaggcacagcttttaaatccaaatatttagtcatgaccttgctataatattttagttttcctcacctagttttgtgtgtggcataaaattataatagttgcttggaaaaagtcagtgatttgcaaaagggtgacacagccatggttttgttgttgttgttgttgttgttttaaggatctataaaagtgtctttgagtagcatttttttttcattgaacatttattttgaaattctgtagtctctggaacacagtctacccattcctctgtcccatgtttctttggaagtgccacaaccttgggtgtaacaagagtacaaccagcattaggctgtacctggaatcaaatgaatgcagtaaggagcttgcctggaagccagcacagagtaaatgttagccttccttttccatccacacgtttccttagtgtttcacttcgctcattccctctgttcagctcctcctttggagagcgagacactctagccagcccgctggataaagaaagccccatggttatcaggaagccctggtcctgggtaaaggcagtttttttttttttccaattttatttcccctggcaatggattggtggccacaacaacaggtacctgttgtgagctgttttccctcacaaatgcccattgtttgttcattacatgtgtgaatggccatgagagagatcctcacagtagtgcatgcaggcacatattcattcatccactaatctttttttttttgagatggagtcttgctctgtctcctaggctggagtgcagtggcacgatctcgggtcactgcaacctccatctcccgggttcaagcgattctcctgcctcagcctcctgagtagctgggactacaggtgcatgccaccacgcccggctaatttttttatttttagtagagatggggtttcaccgtgttggccaggatggtctcagtctcctgacctcatgatccacccaccttggcctcccaaagtgctgggattacaggcatgagccaccacacccagcccaagaatcattttttaagttccaatgattgtcagaaatggtggcacatcagaatcacttgggtggtgattaaaattgtcagaagcctgggcctttctttacctaggcctgatgaattggaatgtctaaaagagatgccctggcttttttttttctttattttatgctattcaggtgtttctaatgcacagcgggctgagaaccattattcagtttccttattcaacaatatttattacttactcattacctgccaagcgctggcaccatccttgacttcattgcacttacaggccagttggagaaataggtgcacaggtgacacccctcaagacaccatccattctcaagtgccatgggaccgagaatcagtgccagcttagggggaattgggaggctccccaaaggtaggagccaagtggagcatggcaggaggtgcagggctggtcgtggagaggctgggtgagctggcatcacaacctgagcaaaggtcctgagaaagagagacagggcagggcagctcaagaactcaattgttcagcgtggctggtgagtagagtggagagagaggaacataacgtggagagggagacgtgctggaggtctctgctcagtggtgaaaagatttagcagacctcatctggtttgtggaaagagaggctgcccagggctccctgcagccttcccactggctctcacctcctcctctcagcccgtcgcacataacaatgatttctagtgtggaggaacagtctcaagcccaatttctagaccagcacttgtcggtgggatgtgtgaagttattcaggaaagacactgggacaaacatctcattgggtgccagtgtccctgactctttagtgggcttgaagtggggctgagtgcctgcctcaggctgcatggagctgaggggaggcttggaataaagtctcagttgggcatttgatttcacagactcagactcagtcctgggggaaaaattactaacaaacaaatacactaacaacaacaacaacaaaaaacccctaaggctatcacaaactcagaccaaacccagagcctgtcctccttccccttccttcctttgacctgtactctttccactgcttctaaaaggtacatgtgtggagagggggttgttcccattccccctcrttctttctttagcagctgattcccacgagcccacwttccagggaagatggatctgccctccttcatatctcgctgcccatttttgcaggtgttggggctactgcagggcctgctgcttactagaaaggttggagggctctgtgggtcctggcaggctgcaggtttctctctggagacattccagagctttagaacaaacatgcagacagtcttacagctgcagttgcctgagccttaagggccttgctactcaaagtgtggtcctcrgaccgccagcatcagcatcacctgggagcttgttagagaaaacaaatctcagacctcaccgaccccacggaatcactatctgcattttaacgacatctccaggtgattcatctgcacacaagttcaaccacaggctgaccatttagagaagctggacttgagtgggattttgcagtttttccttttgatggcctcctcccctttgcttcccctcctacccttctgactccttgtagcttattttagaacatgtcgggatcctgcttctcttgtcaacaaaaggctgttrttaaaatctttcagccggcagcagcaatgtttaattcatggactagaaaattaattttattttcatgaatagagctgaggaaaaatagcaaggagactctgtgcatggcccttgggaatccagcttgtctatttaacagatgaactggcaacagtggggaggcctgaggggagggctgccttctacaaacttgtgtagcaaattgtattaggrtgcttttggctgcaggtatcacaaaattcagcttcaaatggcttaaaagaaaaggaaaatttctaatttcactgataaaaaatcttgagatagggyacttttaggatgacccagaaatgccatcaaatagcaggtttgttttctgccatggtggcttgttgcattcagttttcctcatggttacaaggtggccgccagagttccgggcagcacatggagtcaatgtcctatggaaggagaaagaggctgcccctccctgaagtttcattttatcagagacaaaatctttcctggttacctcacagctgatcctcacagctggtgtcctcttaaatctcacttgtggccaggtacaatggctcatgcctgtaaccccaccactttgggagactgaggtgggtggatcacttgaggccaggagttccagaccagcctggccaacataacgaaaccccttctctactaaaaatacaaaaattagctgggagtgatcgtgaacacttgtaatcccagttactcgggaggctaaagcacgagaattgcttgaacccaggaggcagaggttgcagtgagccgagatcatgccgctgcactccagcctgggtgacggagcgagactgtcataaaaaagattttaaaaaaagtctcacatgtaggattgtgtcatgcgtcccttggtaaaccagtcattgggaaggggatggattactatgggtggctcagcctgatcagggttggacactttcttcatctgttgaggatactataacagagtaccacaaactgggtgacttttaaatggaagaggaagaaatttatttctgagttctggaggctgggaagtccatgaacaatgcatcggtagattggcgkctggtaaggacccacttccttattcatatatggtgccttctttctgtgtcttcacatggcaaaaggggtgaagggtctcttctctctccagccttttaaaaagtattgattgattgattgattgtctgacagggtcttgttctgtctcctaggctggagtacagtggtgcactcacagcttactctaaccacgaactcctgaactcaagggatccttctaccccagcctcccaagtagctaggactacagaggcatgctaccatacctggttaattttttacgttattatttttgtagagaatgagggtctttttatgttgtccaggctggtctcaaactcctagcctcaaatgatccttccacttcagcctcccaaagtgttgggcttacaggcatgagtcactgagtctagcccaccagccttttcttagtgccttagagggcactaatcccattcctgatggttccatcctcatgacctaattacctccccaaagccccacctcctaataccaacaccttgaaggtaaggatttcaacataggaattttggagggaagacaaacattcagaccacagcagccactgagtcacatgaggcaagggcaaaagagccaaatgaaacagaggctctggctcgaaggaagcggagggcgtggctgctgagacagccaacacctcttccaaggccttccttggtgttgcctccattccctggaaaggtctggctcctgtgttttacatttcagtgtgctcttcccagtagagcggtaggttactctgggcacagggaatttttaaacacccttgtgggagggttcctggaactgaattaaaagaaaaaaaaaaaaagggaaaaccagtgacttagaatgtgttctttaccaagattctccatggtgacatactttccccagactgatcgttttcttggttggtcattttccacatctttcaagtgacacagaatctcactgatgaagtcctaacaggatttctgttctcttgcctcagattttgcttcaaaagggagcatttataaggccagtgcatcctcacttaacctcacacagcaggtactttttatttgcacaaacaatctaggaacaaagatcttgcttaggaggagggagctaactgtgtgaaacaaaacaatagcttttggccggagtggacggaaaaccttattttaaagggcagatgtcagaaaaatgtgtagagcgggactgtggcatagccattgtgtaaaacctttcagtcaaacaaggcatgtacaatgcctacttaaggtaagtgcttgatctacgttgctcctggtggctattgggaagtttttgaagattgccttgtttttttttttttttttttaaggcaaagtctcgctcttgtcccccaggctggagtgcaatggtgtgatctcggctcactgcaacctctgccttctgggttcaagcgattctcctgcctcagcctccccagtaactgggactacagacatgcaccaccatgccgagctaatttttatatttttagtagtttcaccatgttggccaggctggtctcgaactcctgaactcaggtgatccgcccacctcggcttcccaaagtgctggcattacaagcatgagccactgcgcctggccgaagattgcctcttaaatagagaaaaaacatcaaatatcaatgagcttgaaaatgaaacaagacatgaatagagtttagaaatcaggtttaaatttattttcttcctatatcactacctattctatcaagrttgtcacacacttggctatttgggctgtgttggttttagcttggttctctgaagagacagtggcttacaaatgcagcctatgacctaaattggaaaggccgtctctaatagcaccctcctccttaacatcaaaaagcatttattaagcaagtaattaatcacttacagcctgggccacccgttgtgtaagaaaacaaagaccaggtctctacccttctccctttcataactgaaaggaacagctgtaatttcccccagtaccctaaccaactyactattctttaggcaggggtagataatggaaaatattcttactttcaaacttccatgcatgaagttagaaatgaatttctttcttaaaaaaatgaatttctaaaatgtaattgtcccgtggaatagtttatcaacccacccctctaataggttcgtaagaagcttttgcagatggttacaataaagctcatctctgttctcagcctatgactcacttgagtgtccccagaaacatttgttttgccctggcgtctctgttagcaaaaggagatatttgttaggaagtgtgaataatgcctacatatctcccccttccacctctcacccccacatccattgtttggctgtgtagcaattgaagagtgggtgagtcattagcattttttagctatactcaaattactgtagactctgtagagggagaaaaaataattttctctccaccccttgtcatttttagcagggaaagaccccctgcagcaaaagacagactagcaagagaaaaacaaatcgaaatttattgacatatatacctcaggtatacatgggaggtaaccaggaaacgagtaattctcaaggaggtgactttgcattcaggcttacatacgattttcaacaaagaacagtaaatttataaggaagtgacaggacaaacgaaaaggactttgagtctggagggaaggcaaattgataaagggtggttagtaaggcttgttatgtagattcctttgatgtcttaaagctgctaggggtctaactttgtcttgcatggtcatcctttgcttttccttataaagaggggaggaagacccttttgcctttgtaaatctgtgtcctgcttttaggcaaataaggggagggcagagagctcttcttgtatctgcttcttttcaattgctttcagctcaaaataatccttatgccagagtagtgtattttggagcggcatattctggtttcctacagcatcatctggagctggggggatggggggtggtgagcgaagccactaccctgtgagtatagatgagatctgcactttacttggcagagctcccatgagaactggaagaagtcacagctattagagctaatattccctacagacagagctgggcttccattagtgtgctccactgtggctctactagttgttaaaatgttgaaatagtgaatagctgctgccttccctggtactcctggaatcgccaacaatccaggagctaaagggttattgcctggcccagctgcagggcttaaatctgcatctgttctgactggttttgattagctggtgccctgtgggttgtcagatatttttaatatcacctctgcatttgcatcctcttcttacataatccgtataatcttcagcttctatccctttcacggttctagtttaatgagaacttaaaaaaaaacagtctgttattctggcttaaagttatgtcccgaaaccatgtaaagaaaggtattacagcactgtctraattctggggctttcactcacttgtctgaatagaaactccttttgcagtagaagcaatgtgtatctaaaatgtgattttattttctggtttacaattgctgttgtatacgatttcctccccccaaaaagaattgatattaattttatcatcagagaaaaataacaccataaagataaaattgcgaagctatttctttttggtgttaggggttgggaatatgatgtagaagatggcactgcagatttaggtgtactcgtcactcacaattcattttcccatgaggctgtatattgtgtctaggttctcgggctagcctggggtcagcgtcactcaaaccatcacctgaagcgttgtataggtaatttttttaaattatagaaagtgtgaaacatatacaaaggtaaagagaactgttaccgctgcctcacatgcacctggggattttttttctttgaaaccattttactgtgatgtgtaatttcaagctcatagaacagttgttaagaatagtatcaggatctcccgtagactctatccagattcgccagctgacatcttgcctcatttgctttatcatttcctctgtgtatgtatatacgttatatacgtgtgtatgtatagaatctatatatttttttctgaaccatttaagaataaattggagacattctgtccttttatctctaaatattttagtgtatattttctgagaacaagaatataaccacagcacagttatcaaaatctggacatttctttctttcttttaaaaaatctttttcttttttttaattttaatttttttcctttttttttttttgagacagagtttcactcttgttgcccaggctggagtgcaatggtgcgatctcggctcactgcaacctccgcctcctaggttcaagcgattctcctgcctcagcctgccaagtagctgggattacaggcatgcgctgccacgcccagctaattttgttattttcgtagagatggggtttctccatgttggtcaggctggtctcgacctccgacctcaggtgatccgcccacctcggcctcccaaagtgctgggattacaggtgtgagccaccgcgcctggccaatttttttcctttttaaatctggccttcctgagtaaaaaatctggaaatttacttttgatattctctactgcacagtggaaagtctaatgtcatcaggcatcyttgccatgtcctctttagctatttttttccccctttggattagattgaagcaaattccaggcaattgtatctgtaaattactaagtatcaagtattggcagaggtcattctggctacattgtccatggaaaactttgggggcaacctttttcctactaactctccctagtccttgggaaaaacagctgtgagaggctggagatgggtggaaacagagaagcaggagtcagtcatgagtgagttgtactgaagtgcacagtgtggtctatggccgtctgcatcggagtcatctgagttgcatgttgaatatgtagatttcagggctccatccagacctacagaattagtatctctgggggccagacccaggaatctgcattttatcaagtgttgctggtggttcttatagccagggggttggagrcattcaggcccygaagcaggtggcctgggagtgatgctgtgtccccatcaggtgaacatcacccttctcccacctcagtattgttgtgtggctctccttagagtgactgaaattccagcccagattccttagggttgacaacaggtgcaattttaggcatgtgaatagccgtgggtgtgttccctccacaggaatccacacgttggtgtaaagtgctttcagcacatattttcttctaacacagggctgacaccttgagggaatgggagtttcacaggagcagggagagtattaggacctggaatactttataggggtggagtaacttgttttcttgggggaggatgggggtggggatgggaatagatacttggattgtcccttagatgtgtggggaaaagctgttaggaagtaggaggtgaaaaaggaccctggagaaagcctcaaataagtagctttgggcacaaaccttaacctgcaccttgggagaggaacaggaaaccttcttttctaggattggtgtgaggactaaatcaggggcagcagctgcttcccaggaaggaccagccctgctatgggagtagttattacccccagaaccggacaagcacactgatgctgtcattccactgtatttctggatttccgctgtatttcaggatttctgctgtatgtctgtattctagtaaatttgttaattctaaatatggaggttcatggagctcttctctaaggtcccttcttatctctggagacttttataatcacctcatttggagaggagcagacacttccctcgatcagtcatgcccctttttcaggcaggccggagacacagtgcagttcttcatgggactaaattgtctttaggggcatcctagatttagtcttctctgtgacccaagataggagggtcctttgtaagtgtttctgagccactgacaaatgggcggaaagacagccaggctctagatgttaaatgcaactgagaggtggggaggacttaatcctcacctgcatcctgtcaacagtggccacatgacataggtgattttgctcacccacagggtgatgaggkctgatgaccaccctcatctaggacagtaatctgtcttagtctgttttgtgctgctatgtcagaatactgggtaacttcaaatgaacagaaattcattttccataatactggaaggtgggaagtccaagactgaggggctggtatttggtgagggccttcttgttgcatcatcctattatgcaagggcaatgagagggtgagagagagcaagagggagcccacctcatccttttatagttagtccactcctacagtaatggcattaattccttcataagggtagtggcccagtaacccaaacacctcccattaggcctgcttcccaacactgtggcactgggaatcaagtttccaacacatgaacttagggagacacattcaaaccacagcataacccaagtggatatttccattccttctgctgttgaatctttcccctcccttctcttggaaaggagatgtactttccaagtccttttttctttctttctttttttttttgagacagagtctcactctgtcagccaggctagagtgcagtggcgtgatcccagctcactgcaacctctgcctcccgggttcaagctattctcctgcctcagcctccctagtagctgggactacaggagcacgccgccacgcctgactaattattttgtattttagtagagatagggtttcaccatgttgcccaggctggtctcgaactcctgagctcaggcaatctgcctgcctcggcctcccaaagtgctaggattacaggcatgagccaccacgcccggccctcaagtccttttttcttttagtgtgaatgattctcaagccctagctggtgcttgtttattttgaggcttctccagccctcctctggggggccctgctgcgtttctctccctttcaattatgtgagtgtgaggaggctggtgggggccttctagacctagccagggcccacctctaactgttggtgtcttcatagggaagaggaaatacaaagcactgtgaaagcaaagccgccccttggccctgtgcccggacctcccctgacgctgtggaagcagcaggccccggagaagcagccgtccaggctggccccctggggcctcctggggtggccaggtgtttcttcagtctgaaggttgaagggagagattttggactcagataaatttttgctgaatagctgaagtgctaattaatctcccaagtctccctttggccagggccatttctggtggatattaattgggcttatgagacagatgaagtattttaaggwgcaaaagaagttctccaggcactgttgtgataatgctgaatgtgcaaattggtgtttttagtctctgttcagatttgagagcagtgagggagccctttttgggatgtgcttttctgcacctgcttggagactggcaggctgagagatttaggtgtctgattaaattccattttccacacatttgtggacatgggcctagtgtgtgctaagtgctaagaatacacaggtaagcaagctatcattcctactcacgagatctagaaggggagatggacctaggccagttataatgcagtgtgaggaatgccagcagagaagtaggcctggggtgcaggtgtgactagaggagagtggtcaaggacacctgcatggtgggggtgacaccaagttacctttgaataggtgaatgggagttctccaggcagaaacaccagggaaaatgcattcccaacagctgtaacagcacatgctaggcatggaatgtagaactgtgcaagaaaactggctacagatgttcctaaacatttatgtgctttctgtgcatcaggcatgggcctaagtgcttcctgtattataactcttttaatccacatagtaactctatgaagtaattatagggccacagtatccttgctgtagttaggaacagcaacaataactttgagaacaaaagttattttataactaatttagagagaaaacttgacccagtgaatccatttggtggcaaaactgacctatttagtctgaatagtcatattgtgtttgatgatggactcactgtgggcattaytgtagtgcaaatgcactatacaaaaatctgaaaaattgtgaaccttgaagcacatctgaccccaaggttttgggtaaggaatgacagcctcgtcctggtgtcatccacattttgcttttgaggaaacaaagagacagggaggagtgatttgcccaaggtcacagagctgttaaggggccgtcagggtttrcatgaggttgttctggttcctgagccctgcctagcatccttaggcaacacagycctgaaggttctgacttcctacagaggagtgatttgggcactccatgtgtgggcagctctgggacagcattgcccactgatgcatgcctggtggctgagccctgacaactttcagcaacacaaatttactatttcctgcagattagaaacctgacctaggtttcactggactaaaatcaaagtgtcgacattcaggaggccctcrtgggtaatctgtttccttgcctttttcacctggtagaggctgcatgctgtccttggctgatgggcccttcctccatcttcaaagccagcaagagcacactgagtccttctcacatgacatcacgctggcctcctcctctgcttctcttccacttgtaaggactctcattattacattaagcacacccacatagttgaggatacttttgctagtttaagattagctagttggcagctgatcgcagtgactcacgcctgtaatcccagcgctttgggaggccgaggcgggtggatcacctgaggtcgggagttcgagaccagcctgaccaacatggagaaaccccgtctctactaaaaatacaaaattagccaggcgtggtggcgcatgcctgtaatcccagctacttgggagctgaggcaggagaatcgcttgaacctgggaggcagagattgccatgagctgagattgtrcggctgcactctagcctgggcaacaagagcgaaactccatctcaaaaaaaaaaaaaaagattagctagttggcaaacttaattccacctgtgagcttaattaccttctgctctgtaatgtaatacattcacagataccagtatgtggacatctctgggagctgttattctgcttaccatacccagacactgaggaaaactaacctgcattggttccttcagttatcataggtactacctggacagaaacgcccagttatttaaaggctttctttgaggagagcttgttcttgtgaaggsgacatcaaagggtcatcagagtggcaagtttgctgaccttgtcctcccctccctggggatggtctggccagctcacaggttgaggcccactggccaggaatagcccctagagcatgcggcccttgtagggaccttccaaaggacaaatccttccaaagaattgcagcccagccacacctggctcaggcttctaatctgtagaactgtaaataatacatgtttgttgctgtaagttactaactttgtgacagttcattacagtagcaataggtgtcagtgtacgagcaccctccttgggccaggtccctggggtgacatcttagcaaaatgtgactggaggcagggtgggttctggaggctgttgacctattgacttgtcctctaagttccctcccctcacccccaatcccccaacaggccctggtgtgtgttgttcccttccctgtgttcatgtgttttcattgttcaactcccacttatgagtgagaacgtgtggtgtttggttttctgttcctgtgttagtctgctgagggtaataacttccagcttcatccatgtccctgtaaaggacatgatctcattcctttttatggctgcataatattccatggtacatatataccacattttctttatccagtctattattgatgggcatttgggttggttccatgactttgctatttgtaaatagggggctagggttttgaggggggaaatgtctcaagggggcagcgtcagctttcaaagggggagtgttgctcggtgaagagactttattgcttagttgcatgaatttggggcttctgttttgttttggttttaaacactggccgagaaaacatcacttactaagactatatagaatcctggccccacaggaagccccatggttgggaatggggaatgcagggaggcgaccaagatactttcccagaagcaggaccagctacataatttatagggcccagtacaaaatgaaaatatagcacctgttcaatgattattaagaatttcaagatggtgatagcagtgcatttaaccacgcatgaggccctyctaaggatggggccctgtgtcaccaaccatcacacacctattaagctgtctttgaccagaaatagtataccctgtgtgtatcctcagcactctctgatgtcatgaatgttttcagcacctgtttcccagggaattgactaaaccataggccttagccctgaggactcactttcttatcacaaaacttgtcttgattgcactggatatctgatgctgtttgaaagatactttgctcaattcttggcgagaaaacacattccagggttgggaagggagagtaggccgaggaggggaaacttgacactttctcagagactttctggctgtgtgacctcagacaagtaacttagattctcgccatctcagttcttcatctgtacaatggagatcatgttgctgaccccaatgtgatgtcatggggctaattaattaaggtgctcagagagagggccactgtctggcatgtaggagctaaaaggagagctctccggctcctcatccatccagttttctgcccagaactagtggtcagaagtctgcagaagagcatgggcgcagcatgtagttcagcacagcttcccagatgagttttgttttgtttttgtttttcagcagaatgcatgttattaaaatctctaagctacaggtttagcttcagaaacacatataacctatgcagcaaagtcagtcccaacaatctactaccaaatggatttctcagattaacataaatatgtatctctagttaactttcttatttctgaattctagaacacataaaccataccattgttacatagacaaaataaggcatagcctttctccatactttatggaacttcttcttcctcttgtgagactcccacargtttctagaaatgcctctggtgtcttggacatttctgctccatagagaaatgcaccagagacagatgctcgttggaagaggctggctcaccacaggtcaattccaagcaggaggttgaggatctgcatgtgaatcctcggatgctttgaagctgtccaggtcatgcctttcctaggaaagcctccagcagggatatgaacacctctaagtcagttcctaatgtgctcctcactcaaccatgttcagtttttccctgctctcctagacagtcttcacctatttttaggatgctaacttaaactcggtcaggtcaaattgacacaacattcacagatgccgaaatgatctttttttcacatgcaaactggggaggccaaggatatgattgcaaaagagttaaggtttaatattcatggataagctctcttccccatgaaaacactatgtggcactttacaccagagcacttggtctaacagacacacaaactccccaccgtatctggcacagatacgctccacatgctatattacgtataatttccatttttgttttctccagagaatagtttttcttcagtccttaaggactcagcttcttacatgggctttggtggaggttgtggggcagcacgtgcagatgtaaatcgggatgaaggtatttgattctttgtcctttcggccttcatgagatgaagtcctgactaccttgctgtggatggcacaattcacacagtgatgtagcttcacacttagaaagcacataggcgtcgaagatgcttgcttcagaaatgtctctgaaagctgcagcctctatgtttcaaatgatgaacttttttttttttctttttgacagggtctctgtcacccaggctggagtgcagtggcatgatcacagctcaccgcagcctcaacctcccaggctcaagtgatccaccagcctcagtctcctgagtagctgggactacaggcatgtgctaccatgcctggctaatttttaaattttttctagacggtctcactgtgttgcccaggctggtcttaaactcctggcctcaagtgatccttgtatctcagcctcccaaactgctggaattatagacatgagccaccacacctggccacaaacttcttaatagcctggtccttgaacatgcatcaggtgcagttcwtgcagcaaataggttgcacgtggcatggcccttttgggcatgaccgtcgtttcttctttctctgtcatcttggaagtgaggacttgagccccagatgttcttactcccccactttcctttatctgccctcaacatgcatacacctcacctacacctatgccgatgctttcctaggccatacccaagagccattgaacaagccattgaactgagcttccatagctccagccctgctcagaatccatgcctacaagcagctcccaaccagggygtgagtgaaataaggagtgaacaggagagggaagcaactgtggtccagtgaatctgggggatatccacaaactcatcctgaccaatgcttgccacctctttcccagcagctgttctctagcaagaggcagaagcaatggctttgcttctgtccaccctgtgctggctgagctggaggtgctaattagcagtgaagtggcaggctgtgggggagaggaagggagccaacggtctgaactccctggcctagagaatctggaacatgccagaggaaagactggccgctgcagagagtgggtccttggtgagctgagggcagtcaggcagggcaggattagttccagggaatgggtttaaggacttctcccctgttggtgcctctaaagctttgctgatggtcaaattccaaattcctccatcagtctcaaagctcttattagtcactttaattggaatcctgggaagacagagtgggtggaagagaagygggcagggtgggagagaaacagaaccaagagactgggtctatgtaacagttttcttcaggcagtaaattcctcttacatgctgggaggagcaaagggtgggggaagagggaaggtcacttttctcccagggagaagtggtttgtgggtttctgtgctcaaaacctggggctactctttcttttcgaggaattttatcttacattttataaattaagaagtacttgttcattgttgacagcctagaaaacacaaggaagcaaaagcaaaagcaaaaaagttacttgtatctccccattttagagatactattattaacattttgggctatagcctttcagccttttttctctatgcacaatttgtctcactgtctgcaattatactataaccttgttttgttagctgttttttcatgcgttaatgcgtcgtagacatcttttcatgtccatagatgtggatcatggatttttttttaatggcagtatcgtattccaacgtttagatgtacttaacccccctattgttgaaaatttaggttgtttttcgttgttgttgcagtgttgatgttatcaggctacatccttgtagcttcatcctcatgcacatccttaataatttcctcagaataaatttctagatgcatttccataggatgtatttctatgtgcttttttttttttttgagatggagtctcattttattgcccaggctggagtgcagtggcatgatcttggatcactgcaacctctgctgcctgggttcaagcaattcttctgcctcagcctcccgagtagctgggattacaggcatgcgccaccatgccaggctaatttttgtatttttagtaagacgaggtttcaccatattggctaggctggtctcaaactcctgacctcaagtgatccacccgcctcagcctcccaaagtgctgggatgagccaccacgcccggcctctatgtgcattttcaaggctttataccagtgctctcaaccaggactgagccctcacccccaagaggcatttggcaatgtctagaaatgtgtttgaatgtcacaactggagggggagattgccgctagcatctagtggatagaaactccccacatcaaggaattatcaagtccaaaatgttaatagtgccatggttgagaaactttgcttagacatgtgggtattttaattctttgtaatatgtgtggggctggagattctaagccttggaagaacacgaggtgggggtactcagtttagctggctgaagctcagccaaaaccaacccaatctcatcctcccctccacttgcagaaggacttgggtggccctgctgatttggagtagcraaatgactgatgtgtgctacttggagcctgtccctgcatctaggagacaaagagaggcaggatgccctggaaggaggtgcagaagtgagagagaggcagagagagaaggaatggggaggatgtgtggtgtggtgctgaacaatataatccttgttgcaattaaaatccttgttgcaactatgtcgtctttagggacttgaaggccacttcccagcactgaggacccaggcagggaggacacatgcaattgcagaatgcgggaggagggagtgaccagaaagactctattgtacccctygaagctggcatagggagcatgaagtcctgtgtcctggggtgctggccagggcctgcaggatcaggaatgaaaaacatcagtgctccccacaccatgcattgcagttctatgagatctgaaatgttgccctatccattaagtctccttctcaagtaaacctatgactcattgaactagccactttatttgttcatctttggaatgcatcacaatcattcattcataacccatataattactgagcacctactagatgccaggcactatgagaggcaatgaataaaatagaaacactttctgctgtcatggaggaaacagtccctgacagttcatcaagcagcagaaattctatgaagaggacatacagggttcaggggagcacagcgggggagcaccccacctagggcgcatggggtcctacaagaggtgcttctgctcttgtcacggggaacctttctgcctccatgtgagaaagcccaggccagccagtagagagagaggcccagccatccctgctgagactagacatgtatgaggccatcctagaccatccagccatagcgagaccatttcagatgggaagacccaccctgacaacccatagaattgtcacaaatggtgaattgttgttgcttcaagccactgagttagggatatgtttgtaaacaatcaaagctaaccagcacaagtcatgtggctgctcaagagttattgacagaacggtggggtgctataattggccagacctgggtcaaatgcccacttatatgcccaagagactctactctgtaactgaagacatgttgggaaagcttacctggcagatccaaaggatacttgtcactgtctgatgtagtgacgcatggacaaaaatggcctcagcatcttccagtctgttctttctcctgtattctcagtcttggttagtagcaccaccttccatctgattgctaaagccaaaaatctctgtcattcyggactcctttctttccctcaactcacacatttattcaatcactaccttctgctgaaatcgccatcaaaattttttttattatatccctggatattctttgcccttcgagactcagcctgggctttacctgaccaggaaactttcctgaaaccccaagttgggctaaataactctcttgaatgcatatctgtaccttacttaacacattctatggctgcttttgatcatgagtgtggctccctcactggactggaagctccctgagggtagggactgttcacaagatgtggttgggaatgatcatgcaacagatgtgtgtggaactgaaccaaatttctctgacacagttttcacctttttttattaacttagatttcagaaaaaaggaatgaactcaaagccttttgtccctgaaggatttaaggggaagctggtcggtagtggcctgccagggttaatgaagggattcaggaggcaggtggagaggcaggcatgggaccatgtggtctgtggctgtagatttgaacactacaacctccccagcctccccaaactgtgtgattttaagcaaaatatttacttctttgagtcaccttctcctatctgcaagaatacagtaactgtatttttctagtagggttgctgtgaaagttgaacaaagataacataggcatagcgtcctacaccgttggtgggtccttaatgaaattagtttctttcttttcttcttgaaatacccccttgtcttgcagcaggttccctcagaatcagagcctgagagaacactttgagtataagtagtttgcttgggaggtgatccctgaaaggagtgagaagtgagatggagatgagaaagaacccagggtatgttagtaaaccagctaccagtcagctcattggctcgtgcctgtaatcccaacactttaggaggctgaggcaggaggattgcttgaacccaggagtatgagaccagtctgggcaatatggcaaaacctagtctctacaaaaaatacaaaaacattagccaggcatggtggtgcgcacctgtagttccagctactcaggaggctgaggtgggaggatcacctgagctcaggcaggttgaggctgcagtgagcagtgattgtgccactgcactccaggctgggtgacagagtgagatcctgtctcaaaaaacaaaaaacaacaaacaaacaaaaaaacaataaaccagctattactgtgggctactggggccatctgtctggggccatctgggccgttgtgtagattagaacatgcctcagaggacgagagaataggaggcatttatccacccaactctgtccaccattggctcatggatgctgttagggcattaacaacccagctctctgttttgtttcctggactgggaaaagttctcaggcagagaatcagaagagcttgtggtaagaagccattggcacagataggaacggtaagagccaaggggacatgtgcagagccctggcagccttggctacactgcctttttgctgaaatgatattcttcattcccatacttattatttcttatacttaacaaatatttccctgaataaagaggatttgaaataaaatacaagtgggctgttttctcttatcactgtgaatggatgaaatccctagaaatgcaactgcttgcttactgtactctgaaagtatagtaagagcagcagcagaactgtcagcagtggttaagcggatgatcagctgcaactcatcaacccttagggctttcaggtactcctgctctgatgatcacagctatcaaagagaagggagatgggaaagggaaaaatacatgggggaaaatgtcatgaatattctcttataaattggggtgtgacccgcatgttctcactcataagtgggaactgaacaatgaggacacttggacacaggaaggggaacatcacacaccggggcctatcgtggggtgtggggaggggggcaggatagcattaggagatatacctaatgtaaatgacgagttaatgggtgcagcacaccaacatggcacatgtatacatatgtaacaaacctgcacgttgtgcacacgtaccctagaacttaaaatataataaaaaataaaaaataaataaattgaggtgtgacaggaagtttacagaaagggtgtgggaggggaaaaacaaatgcatttcagttaggtatttttctgagcattttttttttgtttctgtaagtttttattttgatatagttttaaacttataaaaaagttgcaagaatagtacaaggaactctcttatacccgaaaagttcctttatctagatkaaccatctatttacagttgacccccttcctccctctcactctgtagtacctaggtataaatacatatttttaagccattcagagtaagtcagagacattgggaccctttaccattaaatacttccagatgtatttcctgagagcaagaatgttcttttatataatcatattcagttatttctgagcatttttaaccactttgcagtattttcaagtgactctcaactacaggaaattctttaccaaaaaagaaaaaaatgcatcaatatagactgaatcagtacaattgtcaagttttccccagttcratactgaaaggcaggttaaggcttacagactaccaaaattttattgatttttgtatcaatttattaaaaaaatctctaatcctctgtaaattggtgaaacattatggactctggaaaacactacctacttggctaatttctttttcccctaatagtctactgcaatgtgatggccccttattaatttattaaccatgagagtcctattaaaggacagagtattatagctggaggggatcttagggattcctctagccccactttatagttaagcaaactgaggatcacaaaggcattgccctcacaatctcagggcagtggctgggaatggagctcagagatcttcactctagactcagaagacccttcaaggagaaccagtctaatgtgcttgaggggagaccatgggggctcctagggacctgcgaagagccagagtgggagatggtgagttgaggagaatgacacctcagcctccaacctccagcccccgttagacagtcctcttttcttctctgtttcatatgttaaacataaggttttctgtgaaaagggggccttactacttaaaaaaaaaaaaaaagtcttaggtttcaaggcagtctcagtattacctgaaaaattgatgcagagctgggctcagtcctgagccttccaccttcacactacacctctcataatctgcctgcacctcttctttcaaaggaaaaatcaatgctctgggggacaagaggcaaaactcgtttaaaaaattaatcctatcaaaggatgatttcatttttctaaagcccccctctaccattttcattcttctttgactcgcacctttactttatgctcagcaagacgccacacatacctccactgatgctttccagaaccaggacactaatcttactctcgctagatgatcagtgttcgtataattttaattgcaaataatgcatttcattacagataattcatataactcttgctctgatttgtaataccaagatcatcaactttgccttacctctgcccttcactaactcacttaataaaagatgaggtcttattttcattaccttattcttcctaatttttggtcagacttttttttaacttactagaatattgttccttattttgaaaattattatcctattagttattttaggccaatgttatttttcctctgtcaggcaacagtgttttcaatttatcagatcactcctgtaaataatggggtttagtgccaaacagacttggatttctatttctgccataagccagcaaatgtcccttaataagtcttgagtctcagttccctcatctataagtgggaatgataattgtggtatttattttatgggattgctttgattactaaattgtaattcatgtggagtacttagaatgagtatctgatatgtaatgaatatttgctagttattatttttatataggagaaatttttggctaatttaagttagctaaataaatgagacaggtgtgatctttaaaatttagttgtttttttcttgtaagtttgacacttgagtcatatagaataattaaaattattattattttccttcaaaaagaggacaagtgggagtacatttatgcctcatgctgtgggtagcccagtagaaccagagggtcctctgtagcatgcatgtgaacttgtcagcctgatcaaagtgtcattattatcttgtgatgtgggtttttagtgtggcattcctttccatgtatctttagtttttaagtatttgtcaaaaaatatagaggaaaagaaaatgtatcaaagacttttaaataaaagaagttaagagaaaaaaggaaaaagccagatgtatgacagaaagatgtagaaacactttctagcaaaattctctggagacaatttaggcttctgcttccagccaagatggagtaacagggcctgggtttgtcattctgtctgaaacaactaaaaaactagacaaaatatgtgaaagatgggttttcagatgttggacatcaggcggaacaggacggagatctccaagaaaggagatgcaaacaaggtgagcctacaattgccctgatagacttcctagagagagttttcaggctgcaatgccaagcagagtgcagccatgtccttgagtcgaggagacagagctagaagtctggggaggccaaaatggctagagttcacaaagaagagttccagagagaagagagctgcagagagaggtggagaagagagctgcagcagatagagtgagctgcaagaagagacagagagagagagagagacagagggaaaatgctgtggagatgtgcagacggtctccttcaagtattttagctgagtactactcagtgcatgcatgtgagaaaactgcccaatgtcagggaaagaaccattcaaaaggaacagagggaacaaccccacaggtctgggaaaactgtattcccaccagccggaatggaaaacctcataattcatggggcattggatagagtactcagaaggatattgcctcagtatttgggtaaaattatctctagaattggccaggcacggtggatcatgcctgtaatcccagcactttgggaggtcgaggtgggcggatcacctgaggttaggagtttgagaccagcctggccagcatggtgaaacgccatctctactaaaaatacaaaaattagctgggtgtgctggcgcatgcttgtagtcccagctactctggaggccgaaaaaacttttaaaataagccttgaaagaatcaaactatttccaagtaacttaactggattccagaacaaagctcaacaatctttataggaacacaaaaaatatgcagcactcaaccatgcaaaattcacaatgtctgatatccaataaaaaattacaaggtatgcaaagaagcaggaagatgcaacccatgttgaagagaaaaagcaatcaatagaaacagagtcggaaatgacacttatgaaagaattagtggacaagaccactaaagcaattgggataattatattttatgtgttaagaaagtagaggagaaattgagcatgaaaagtagagacatggaagttgttgaaaaagacccaaatyaaacttctagagatggaaaatacaatatctgagatgaaaatacattggayaggatttatttacacactgcaaaaaaataaattagtgaatttgaaaacaaagcaatagaaattatctataaaaagtacacggagggaaaaacactggaaaaagaagraaagaacagagcatcagtgagctgtgggacagcgtcagatggcttaatatgagtgtaatggagtccacagaatggtggtgggaaaggaaaaatatttgaagaaacactggctaaaatattttcaaatttgatttaaaaaattccacttattcaagaagctcaacaaactataaatacaagaaatatgaagaaaaccacaccaatgtacacaagaataaaattgcttaaagccagtgataaagagaaaatcttaaattagccagagagaaaagaacagtatagttggccctctgtattcatgggttctgcatccatggattcagccaactgcagatcaaaaatayttggtggggggcatgcacagtggctcatccctgtaatcccagcactttgggaggccaaggcaggcggatcacttgaggccaggagtatgagaccagtctggccgacatggtgaaaccccgcctctactaaaaatacaaaaattagccaggtatgatggcggtgcacacctgtagtcccagctactcaggaggctgaggcacgagaatcacttgaacctgggaggcagaggttgcagtgagccaagatcacactgctgcactccagcttgggtgacagagcaagactctgtctcaaaaaaaaaaaaggaaaaataacaatgaaacaataaataatacaaaaagcaatacagtataacaattatttatatagcatttacattgtgttaggtattataagtaatcaagggatgatttaaagtatatggcagaatgtatgtaggttatatgcaaatactatgccattttatctaaggtatttgggtatccttatggagtcctggaaccaattcactgtggataccaagggaagactatgtatactatagacagaggaaaaaaacaaggatgatgacagcagacttcttgttggaaacaatgcaagccagaaggcagtggagtaatatctttaatgcactgaaagaaaaaattcctatcaactgagaattctatatccaacaaaaatatcttccaaaactgaggataaaatccttttcagacatacaaaaattaaaaaaattcatttccagtagacatgcactacaacaaacattaaaggaagtccttcaattaaaagaaaaatctaccaactggaaatcttgatcaaaataaaggattaaacagcaacagaaatggtaaatagtagataaatataaaataaattttcgtattttaaaaatatcttagccgggcatggtggctcatgactgtattcccagcactttgggaggccaaggtgggtggatcacctgagatcaggagtttgagactagcctgaccaacatggtgaaacactgtctcttctaaaaatacaaaaattagccagccctggtggcacatgcctgtaattccagctacttgggaggctgaggcaggagaatcgcttgaacccaggaggtggaggttgcagtgagctaagattgcaccgttgcactgtagcatgggcaacaagaatgaaactccatctcaaaaaaaaaaaaagaaagaaaagaaaatatttaaaagatcgtgtttaaagcaaaaatagtagcagtgtattttgaggtttttagatataaaatatttgaaataatttcacaaaggccaagaagggggaaatgaagtaggttgttgtaagattcttatatgatacatgaagtactataatattacttgaaggtagatgataataagttaaagatacatactatgaaccctaaagcaaccactaaaaacaaagagttatcattaataagccaataaaggcaataaaatggaatcatgaaaaatgctcaactaattcacagaaagcagaaaaggatgaagatatgaaaaagaacaattagacaaaaagaaaatatgtagcaaaatgatagatttaaacagccatattaataatrgcaccaaatgtaaatgatctaaatcagggctgtccaatacaacttcctgtgatgatgcaactgttctttttatctgtgttcttttctacctagtcacatgtggctcttgagcacttgaaatgtggctcgtgaactgaatttttaattttattaaattaatttaaatttacatagttgtaggaggctagtgatgtaatggacagtagagttctaataccccagttaaaaggcagagattgtcagattggtttaaaaagtgaggcccaatgatatgctgcaaaagaaactctctttaaacatgaagacacaaacattaaaaataggaggatggaaaaagatacatcacgcaacatcaatcaaagaaggctggagtggctctattaatatcaaagtagatatcaagaggacataaccactcatgtggagataaaaacttcatgcagtcatccttgggattatattgttgctgctgggggcagctgaggaaaaaagggaattgtattggtttgctagggctgctataacaaaataccacagactagatgggttaaataaagagatgtgtctcacagttctggaggctggacgtccaaggtcaagatgtgggaaggctggcttgctcggaagcctctccttggcttgcagatgtctgccctcttcctgccgcttcacgtggtctttcctctgttcctgcacacccctgggtttctcctctgggtgtccacattttctctgggtgtccacatttctcctcttatgatgccagtcagattgggtgacagtccaccttaacacctaattttaacttaatcacttttttttgagacagagtctcgctttgtcacccaggctggagtgcagtggcacgatctccgctcactgcaacctctgcctcccggattcaagtgattctcctgccttagcctcctgagtagctgggactacaggtgtgcaccaccacacctggctaatttttgtatttttagtagagatgggtttcaccatgttggccaggctggtctcgaactcctgacctcaggtggtccacctgcctcagcctcccaaagtgctgggattacagatgtgagtcaccatgcctggccacgtaatcacttcttaaaaggccctatctccaaatacaaaacagtcacattctgaggtactgaggttaggcttcagcatatgagttgggtgggaacacggttcagcccacaacagatagggacattgtctatcacagctgtcctccccaggaacagtgccttggggctcccgtggtgtgctgtaattattgggcagcaggctgtgcctctctgaccttaggatgacagtgaggcatggagagccctacagagggggaccaggaaggcgatggggctgtgctccaccgctcaggagagttgtggaggaaagtagaatggggaggaaggaaatctgtgtccacccagaatcctgagttgcttctactgtctttgttgaaacttctgacaacacgttcatgcctctcagatatatcctttttgttaattaaagtgtcactatatttttttccttttgaattaatgaaagagaaactccaaataaacaatgttgtttcttcagatacccaggagaaccactgcctgcaaacacggacccttcctcaaacccaccagctcgctccacccacaacaagtggcctcttattgtcatggcaatatttgtttttatctaacgtggaggtactagttctggcttcactttgccgaatgttaggagactggacctaagtcatcaatttagcccctagaggctggatgcaatggctcacgcctgtaatcccagcactttgggaggccgaggcaggtggatcacctaaggttgggagttcgaggccaacctggccaacatggtgaaacctcgtctttactaaaaatacaaaaatacctggggtgtgcctgcaatcccacctacttgggaggctgaggcaggagaatcgcttgaacccgggaggtggaggttgcagtgagccaaggtcacaccactgcacaccagcctgggcaacagagtgagactccatctaaaaaaaaaattagccccttgagtgtaaggtctctcctctcctctccccctcccctcctctccccctcccctcccttcccctcccctctcctcttcttttgagacagggtctcactctcacccaggctggagtgcagtggcgtgatcttggctcactgcagcctctactccctgggctcaagcgatcctctcacttctgtcccccatgtagctgggaccacaggcacctaccactactcctggctactttttgtatttttttgtagagatggggtcttgccatgttgcccaggctagtctcaaactcctgagctcaagcagtctgccctccttggcctcccaaagtgctgggattacaggcatgagccactacgcccggccatggagtgtaaggtttctaggtgaggtttgaaatttggaagagagattagaaacgaggctggggctatattctcactcataggtgggaattgaacaatgagatcacatggacacaggaaggggaatatcacactctggggactgttgtggggtggggagaggggggagggatagcatcgggagatatacctaatgctagatgacgagttagtgggtgcagtgcaccagcatggcacatgtatacatatgtaactaacctgcacaatgtgcacatgtaccctaaaacttaaagtataataataataaaaaaaaaagaaacgaggctgggagaaggtgctgtgggaatggaggcttcagggcccctgagctacatgagctgtaaaagaagttagggtgagtctatagagcaatctaaaacagatggatttcctgaaatcaccactgtctccatggaaacagctcagctggctctatcagttgctataaagtgttctctccttggtgtggryggaatcttcgtgttagtggaggaagaggacccaggacagaacatattggactaagcttagaagggagaagacaagatttgggttagctattagaggcttagaaagattctcccaagtgttgaggagatgtcagacgttgcctgctctaatgatttgtatgagaatagtggcagcagttcctgaagttggaaggctttggtacctttcttcctgctgctagactttgataaccagaggacacctgccaaccygtaattgattcatttgatgaaatatttatagagtacctagcattggattctgtcaaaagcatccatcatgctggtgaaatacatgcccatccctgtgaatgtccattccttgtttcttgtgatagatttgccacaaataaaggctaatattctgaattctcccaatggcaagctgcttattttcacccacactcttgttatgtgtgtgctatgctcagggcactgtgttaggtgttgaagttataaaaaggaatgaaccaggcacaggcccttccttgggaagctgacggtctagatagggggatgaattgtggtgcggcaagaatgaattgccatacaaggtggcgtatgccccaaattaatggtccagacaatgagctccacaggaatccaaaagggcagccttgtttccagggatgggggaggttctaatggggatcaggcttgaatgggcttgactgagggcaggacttgggtaagatggagagtggtagggtcttgaaaacaagtgagttagagaccagcctgggcaacatggtgaaaccctgtctctacaaaaaaatacaaaaattagccggatgtggtggtgcgtgtgtagaaccagctactcgggaggctgaggtgggagagtcacttgaacctgagaggcaaagattgcagtagccgagattgtgccactgcatttcagcctgggcaacagagagagatttcgcctcaagacaaaataaaacgggtgagaaggagagtggcaggagaagaagtgcaatgacaggagtgagtgtgggtggctgttcaggggaaaggagcagacttattcaggggaaaggagaagaagggttcagggcatggatggtggaaaatcaaatcagcaagggagggtaggggctcaggttgtcaggactgtgaaggttaacacagggagtttagacaatcctttaggcagtggaggactgagaaaagttttagagcaaaggaggcgtggggtttcttgcaaaataatgctgtaggatgcttaatctggtagctgtgcataggttggattgagggtaggcactagagacagggagatggaatgggaaattgcttcaggggttatggaggttgaaggagtggaaagaaagtgatgggtagaatggatgggcaccatagatgctgggaaggaacagactgggactgactggctccagcacaagaggcagagggagcacatgaggtttgagattggatcaataggaaaggaattattacctttaagagaagttatgcctaccaggtatcaaaccctgtgttaagcaaaaggataagaaggttcttgcccttaggtaactcataatctctaggagaagacaaacatgattatagatgctagggtggaaggacttactttgtacaatgaaggcccaaaggaaggagtggagggtaggtaggagcatttgccaggaaaaggtttacaagagataacttttttttttttttttttttttttttaagacggggttcttgctatgttgcctaggctggacaggaacacctgaaatcaagtggtctgcctgccttagctcctgagcagctgggactaagtgctgctgcgcccagctgaaatgatcctgagcagagtgttgagggagcttgtctgagggggaagtgtaagtgaagggtcatgcttgacttcaaagttggtttagggtgaagcagaacatctgactgccaagctcccgttggttccatttgttgttacggagggccgcttgtgaagctccctggggcaggagctctaggaagaaagagaggaggtgcgctccctgcccttggggaactgcccacatggtggggaaaaagacggccttcctccagccttcaagatatgcagtgctgaggccctgcatcccgccagctgccactgtggctgccgggaacaagggagcaagcagaatgaactcaattccctgctgtcatggaggccacatgcttgtgaagaactcactcagatagaaggcacagtcaggctcagtcgcaaaagacaggttgagggaagtgctggggctgtagaggaaaggaaccgtgatgcgttctgacccgagatggccgggagctgaagaggggtgaccagggacccgcgcagcagttgccggtgtcagcggggcgctggggcggaggcttgagtcagggtgtgcctcaggattgtaaggggatgtgcttgttgtttcgcaggattgtaggggatgtgcttgttgtttcgcgggggaggcgcctctgctgctgtgacagctgaagccaggcatgagtgaccctttgtgtcgtgtgctgtcagtggagtgaggctgtcagtccttctttcctgagctccgcgggtgccggcccatcttacagtgtccagctgaacactgatgggacccggtaaggaaggcccgccctcccggcccatgctcacagagcctgtgtccctcacccgcaccaaaatcctgtcccgctgacccaaagcttatttcctagcattacagagtggggtctctgagcaggaaatgggtgttctgggtcatattacgtccctcaaattcatatgtttaagtcttaacatatgaatgttaagtttcttccccagtttctcagaatatggccttaatgggaaatagggtctttatgaggaaatgaaattaaaatgatgtcatgagggtggacccacagagtctcgctctgtggctcaggctggagtgcaggggcaccatcacagctcactgtagccttgaactcctagactcaagtggtcctcctgcctcccaagtatctgggactacaggtgtgcaccaccatgcctggctactttttttttgtttttggagagacagggatcttgatatattgcccagtctggtgttcaactcctggcctcaagtgatcttcccatcttggcctcccaaagtgttgggattacagatgtgagacactgcaccccactggttgtagtgttctgtgggcctccccctctcccaggaggtgaacagcttgctctggattcactgtcatcctctgaacgtctccagagtcctccagattgtttctacttattcctcacagagatgcactcactaacccagtctcttggaaatggggtgcaatcaccccaccagctgatctgttttctgttgtttacttttttgacttctccagagcagccaaatgaacatcatcttcaagataatcttggcgtagccgttaatggattctgcactgcaaaagtgtttgaagccagtggctgtactttaaaaaaatgcatcctgttggtatttttcatgtgttaggactctcttttcctgaagtttatatagggcttaggatgttccaggtacaaagctaaggaccatatgttattttgttcattcttcacaatacctctgatggaggtactaaaatcatccccattttgcagacgaggctctacaagataagtgatttgaccaaggtcacatggccagtaagtgcgggagccgggatatgtgcccagcactttcactccagagtccttaaccacctcacccacaataatagatttgggtttgaataccagtgcagtcacttactagctgtgtggcttcaggcagtataattcccgtctctggattttggtttcctcagctgtaaaatgcgaatagaaagacctccctcacgggggcaattcaattcagttgaattgaatgctaggtactgagggtctaaagagatgagccccacccttaaggcccacagggtctcattgtgtttgggtgagtgtgaaatgcacagggctatgggaacccagggtgaagagccctcctgggttcggggtcctgggaagccatctgaaggagatgatgactggatcaagacctaaaggacttttccacagaagaaccacacagacaaaggcatagaactttgcaacagcaggatggagatgaattgcaactcagggtaaccagagagtgacgggaaaggagatgggagaggagagactgaaagcgaggatggagagagggtggggaaggctccttatgtgtcacactaagaagtttgggttttccctctgtggaaggtgaggtgccatggaagggttttgagaatgggagtgggatcacatgtagtggctcacgcctataatcccagcactttgagaggtcaaggtgggaggattacttgagcccaggaggcagaggctgtggtgagccaagattgcgccacaacactccagcctgggtgacagagggagatcctctctcaacaacaacaacagtttggtttcatgtcttgatatgcagtgtgggtggctctatggaggatggatttgaggggggcaagactacagacaaggagaccaaggagggagatgttgtgttggttctagtgagagatggtgagggcggctacaagtaggaaagagcatggaatggagaggactttgaacttgacaggtcctgataattgcatggacggggggaggggggtgggggaggaacagtcttagctaatgctgcctcagcttcccgagtaactgggattacaggtgcacaccaccacacctggctaattttgtatttttagtagagatggggtttcaccatgttggccaggctggtcttgaactcctgacctcaagtgatccacctgcctcagcctcccaaagtgctgggattacaggcgtgagccaccttgcccagcctaaagaggttttatagataagaaagttgaggcatagagaggctaagtgacttggctgaatggcacatggctagcaagtaaccaactgggactcacagccgtgtagtttaactccagcgcctgctctcatcatcactgtgccatgcctgtcctgactggtccaggagggcaggagagggggtctcgatgacccaccatccccaccactgctgccaccagcaggaattttacttgggtgaccgagtgggtgatggtgccattgactgatgattctagaagggagtggagagagatgctggtttccatattacacctgcttagtgtgatgtgcctgtggacacccagaggaggaaggcatctcargctgtgcccttcctcctggagcctcttgtcactgagccacagggcctctacaccaacactaaatcactatactgctttccatttagatgacaatttgatttaaacaaattctggtggtgcagggtcaaaatttttcataatctgaagtgatttttctctgtttccagtccactgactggatggcagattaaaatgtgagggtttgacaaaaagataatggagccgtgccagcctttagtgtttcaggcataaaattaaattcaacatkgtatcatgcatttgaagacttgtcatcataaggctggccagacaaatatgctttagagggtttggttttgagaatgagtaggagaaataaaatatgaaatatgataatagtggagactagacgtattttgaaaaacattatctgatggtgttaagccatcctttttgagcgcattgtttaatgctgccttcttttctgcctgtttgaccaagggactctgaagtgttggacaggttccactactgaaatatgcaaatttaacattccctctccccacatctacaccacccctttctttctttcttttctgttttttgagacagtcttgctctgtcgcccaggctggagtgcagtggtgtgatctcagctcactgcaacctccgcctcccaggttcaaatgattcccctgcctcagcctcccaagtagctggaattacaggcgtgtgccaccatgcctagttaatttttgtatttttagtagacactgggttttgccatgttggccaggctggtctcaaactcctggcctcaggtgatctgcctgcctcagcctcccaaagtgctgggattacaggcatgagccaccatgcctggcccctttctttcatctctcctaattttttcgacattctcctacccattttctcctttcctgggccttcaatttgtgcccacctccacccccatcctcaccccccatcttcttgttagctgcatagtttggtctggctatagactttccaagttctgaaggtaaaactgacatcaagttcttcccatctggtctactgagtgcaccctgcaaccttagcctaggcactttggcaccttctgttttagcggctgtctctgtccatggtgggcttggtgtcttgttgcttctgttcctctgagtgaagtgttcaaagcctcagactcctgaggctcagctctgtgccctggccttcgaggcttgtcacttctgccgatataagaagtgaaatataggtcagcctcacagatcccagtgttaaaaataaaagcttcatccccaggctctgcaggtctgtagattggcatgggttcccccactttccagcaaccactcttctaaattgcttcttggagcttagtactgatgccatccgctatgcaagagggaacctgaaaatagaagaggagctgagatcgtctcccttggcaaatgccattccaaaatgtgaagattgcctgaatggaaattgtaaatagcagcactgagcaggtttcctccctgtcgggttaggagggtgggctgctggtgaggggagggtgggtcctggggggagcctggaaggagtccctctccctcttaggaccacccagacccctcctgtggcagccaagtgaccacgcactgagattcctaagtattttgatgaaaggacttctcctccctctctctgctttcccattcttagtccttgcatttgagctttctcagaagatttagctgcttttctgtgatatgaaaactgaggaggttgaaaagcagggcctttgaatttatttttagtatctgcacatttctctcttcctgcattctctcactttcttctctcccttctcctttctcttctgatttcccgctttctctccctgcactgtcattctcttttgcccttcttaactcctgcaaaacggggagataagttttcctccacataagaagccagggcctctgagaagcttgtctttgaacagatgcctcagccttgcccctttctcaggtctcatttttcgggcgagtctgtgcttgacaagagactgcgttatcttgtgggaggaccctaaggagccagggtacttgacatttaaagcttttcataaacagtgtcttcagtgcttggcaaaccttgaaccctcccagctggcagcaacgaggctttctcatcaggactggctcagcctcggatgtgacattttcccagggcctcaaggaaatggaatacgccctgtctgccttttaatccctctcagttggattttcatagacttctgtcaggggggtatgtgctggctgcttttcctataaactggagtcaggggaaaaggggaagatggctgaggggggaggcaaatatggatgcatttaatacacatttggcaggtcaagcagaaatatcattggttacatagttttttgatgctatcctccaggccaaattaaatgacttctttgggagtagagaagggcttaaaaacagtgatttgggtgacaccctatgaacattctaacctgaaacccttccccgcaggtgactcagcccacaaagagccacactcctggcagatgtgggaaatggacactatcactgtcagagtccacccgcgtgactctggggcgcactgctttgtgcctttaaattcagccctgccactggcttatgtcatgaccttgggctactcaggctgtctgcacaatgagccagttggacaggagcagtgccactcaactctggccatacacagaaccccccacccccaccccagggagcttttaacacacatagccatctagagaatgtggattaatttggtctcaggtgaggcttgggtggctgtaaaagctccccaggtaactctcacatgaagtaggtgagacatgctccctagacacatgtctctcaaactggaatgtgcacaggaatcacataggatcttgctaaaatgcagactccagtcctgtggttttcagtggggctggggattcttctcttcccatgtgctcctgggcaaactgatggtgtgggtccccagaacacactctgcacagccaaagtctggatggtctttaaggtccctgcagttccttactgagttttcttggtgaggagagggcagggaattaagtaaaagatatattttaatggtagcaaagaggacctcccttttatcactggggtaaagtcatgtcatttttgggaaaatgtgatgcagtatttggtgggtaggattcaatttgtatccattttcaacactggagtaagtttatttagggggaaaaagggaaacagatgtagctgtgtgtgtgaagaatggggaagagagagaagcgygaaakaactgagtggatgtgtgtgtgctcacagggcgaggattccatgcaaacaaatacataggcttctccaggtccasttttggtgaggggacaggaaaagggrcagatattgttcagctgggatttaaggtgaagatcatgctccctggaacaacccaaaggctggaagattccatctcctcagccccatctctttctggtgctaagcagccatttgttccaattatccttgaattatagtgacagcttttggtttatgcaggccttcaaatcatcctaacctagtagaagaagtaaaatgatgcctttattgacmagaacatttcagctggctggttttaaaagactctcttcttcccacctattcccacgtccctgtgcttccacctcactaagagccacagacaccattttggagtgtcaagatcttgcctgattttgcatatatatatatatatawaattttttaaaattcaaggtcaaccttgagagatattgcttgtattctgccttctgttttccctaatccttatagaactacaaattcccatacatgagcagattttcctggtttaaaattatatttaactaaagttaaatacttcaggccttgtgatggtgattctcctgcccacagacttatggggatttcttttgctttaaagcaggtctttaacagggcagtatttcttgctaaaatccacaatccagggttttgtcactgttctatttttagaaattcttccaatttgtagtctaaaggagaggaatgtttttctaacaaagatattttccaatctagagaaaagaggctgggcgtggtggctcacgcctgtaatcccagcactttgggaggcggaaactggcagatcacaaggtcaggagatcaagaccagcctggccaacatggtgaaaccccatctcttctaaaaatacaaaaatcagcttggcgtagtggcgcgtgcctgtaatcccagctactcggtaggctgaggcaggagaattgcttgaaccagggagtcaaaggttgcagtgcgcggagattgcaccagtgcactccagcctggtgacagaacaagactccgtctcaaaaaaataactaactaactaaataaaagtaaaagattcaaaagattttaaagttattaatccttgtgctctgaaacagacatttataactttaaaacagcatatatagggaccttacctccctgactgatgtacataggatttggcttttctcagtcctaagagayttaaagatttagtgaaacataaagaacatattttaagcaatatcaatatgcaggcccaatgtaaatgtccccatgaatgtcgaatgcaagtagttagtcctcaaactcctcttctcttagccgggtatggtggtgcatgcctgtagtcctagctactaaggaggctgatgtgggaggattgcttgaggccaggagttagaggctgcagtgagctatgatcacgccactgcactccagcctgagcgacagagtgagactctgtctctaaaatacaagttaaatgaaaaactcctgttctgtgtcacacatttgttgattttgctcatttatttattccaccgatacttattatgggcttattgtatgctttatgatgggtttacacagctctttgtgaagccctgaagataccatggaaaacaaaaacagaccttgttctcatgaaatttgaagactggggaggaagacatagtcacagaggttaatatgtaagtgctgtgagaggagggaacacggatctaagagcatataaccaagaaaccagcctagcctgggctgacttgctgaatgtttcactagttggggaactctgggaaaggtaagttctttggcatttgctgcccaaggtttagaggaactctgtgctagagagcccttggcaaacaacttcactttggccttaaacatgagattcactacctgtaaaatggacttctgagycctccctacctgtccacctagcagaccgtttcgtcagagcttcctcttctccaacagtgctttcttttaaacagacataatgaactgccttttggtttcaygacttttttttttttttgctacaagcagctctcttgtggctggcaaaagtaaagccatattctcgaggactcaaaagactctccatggcttccctggatcttgaagaacattttttctccaagtaattttattagcctgggtggacacttgcagtcagtgtcaccattacattcttaatctttacaaagtgtgcttatttgcttctaattttgaatgtctttttattccctttacttcttgcatgtgtgaagaagtaattgttacacagatgttttggagatagtgtttggtcctgtgttactcctgcagggtgtaggtagctcctccttgttctcagtctgtcgactcagctactttaaacacagaggatggggagatggatctcaaagttatcaatgtggaagaccatgtctgtaagtgccccggccctcccaatggccatcccatgccaactctggctctcagccaccttacttgataatattaatgaaagcaaatatttttgtgggcagactgtgtgcgatccattgagttgtgtactttatggactattttgtgtaatccccactacaattgttcacagtaaatcctcttaatattcccacttttccagataaggaaatcaaggcacagggaagtaacttgctacagttatacagctaataaacgtagagctgggatttgaacccatgaagtctgattccagagttcctacccttagccactatacttaacattgcctctgaaataaatataatatgtgcttggggtataaagcccagtcatttcarataaataactcccaaatcagcatgagactaaagttgacagctttaaacagcatatagttctttaatgacttctaaagcaatgatttctaatgtgttagtatcacaactgtccttcaacatgaatctgtgaaatagttggatgatttagagtgaagttgtataatgttggtatttgagactatttctctgagtctagtttcacgatatggtttctgtccaccaagtgggatgtgtgtttttgtaatatgaagacactgagctgtttctaagaaggaaacattgcctgtttggcccaacttgtgttgttatttacttttctatttatgtaaatgttttactttcttaaatagtaaaggagtgaaggatgtgccatcccaaaatatcccaaattggtatattcattattttgatctaaaaacattggagaaattgtagttttaagagaagcctagctggcctgtattttcctgcctgtagcaagccataaagattcttttggaaggggtgctttttccctaccagggtgagagactattccttatcaccccggactgggatttggtgttgcaacaggcctgaataaatagactttctgaagtaaccactatattccactagctttacaccctccatatatctcctagcgactccctagagtttactctctatccagagccccttgtcatttcttcacaaatttatcattctttgtctcagaagtataaaactagcttgccttggccacttctttgaactttgctgtcttgtgaagagcctcatgtacaagtaaaactaataaaaacttgtatgcttttctcgttaacctgccctgtgtcaggctggttcctagacctagtcgaattgcccccataagagctcaggggaggcggaggctatcttttcctcccacacagtagactgtaagctgcttgaaaatggtgtcatttagtgactcatgcactgtagagaagaatacttattggtgatggtggtgacgaagatagagccactgctgtctctttcccctggccttttccactgaagttcagagtacattactggatgccccactaaactggaccagttctgcagtctactgataaatgcagcaaattgcattctttgtttctccccattttgttttcttcttcccctaacctcggtaaactcacttgtaccatttcttgggcctcagagtaggttaggaccgtccatagtgggtaaccatctgcagacttaagaacatactctttaattccacttttctggagtaataaagatgctttgcaacttttttgcccttgtgcctcagggattgcagcagatgtgttaagtctcagctgggcaggtgttaagactaaacaccattgcccattgattatttaaacttaacgtttaaattcctggcatgcttggcttggctaagtagaaatagacacagctgaatgtgacgtcctcatccagctggtccaaagaaacactgggtagaaataatgaaggttcttttgagtgtcccctccccctcctctcccccgtgccctgtgcttgctcaaagtcaaggcatgcctaggcctgagtctatcaattctcccaggggcaagtgtttccctcttgtttctggacaatggatgggcccttttcatcgtttccctttccctgctttgactctgtctagattctacttcccatttaagacttgaaattaattatttctcttttaggttaaaatgggctcaaggaactgattaaattcctcccagccctaagtcctctgctcttctgtgggactactgcttcatacagcaacatgaacaaaagctttcacttaaatccccaagtaattcatttttttcctcagcagtaatcttcctgccttccacaattgattgaatttgtcctttttgagaatagctcaactgtggtctcaaagatcagctcttcctctctctcttcctgattccataggtctgaattgcagcctttctgtggctgctggtttccttgttttaaccctactattccaagcttttgccccctatggttcttgttttctcctagtgccagtggcaggaatgaagtaccatgggaaatccttttatagaaagagaggtgcaaagacagttggccaatggcgtattgatggctgcctggtctgctgatcgtaatccataatgtttgcaattataggaagccttgcaagggctggcataacaaaaatgacagctggtatctatttgatcacttactgtgtgccagccacaattttaaataccttaataaacakctcatttaatcttcacaaaatcctgtgaggaagctacggttatcacccccattttatataagagaaacgtaagtgaggtttggagaagttaagtagttaatatgtggtagagctggaatttagacccaatgggtcttgttctaaaacctttgtagcagtgggtaagagaaagggatgagctttggagccagggagtctgtgtgagctctggctctaacatttattaactgtgagactcaggcaggctttaaccttcccaagtgccagtttcctcatttgcatttctaatgaatatcatctatccctcagagtgattgtaataagyatggttataaagtgcttagcacagtgcctggtacatagtaggtgctcaatatacatatttatagtaatattgaaatgggagagttccctttccccctcgccrggagtgtgacaggagtgatggacagcaagatggatggggagccagaagcaggggatggagtgggaaggtcgtctttcttggggggcaggttgcccagacttttctctaactgccccccaaccgaactccccttggtgcctgtgtcattccactgttgctggtctgtgggtgtgttccccgttcctcctctccccctgacgcccttgtgtctgcgtccacttaaggtctcgggtttatatggcaacaggattgggggtgtggtaggccagaggggtcttggaaaatgcaacccttgagtgtaaaagtgggagtgcctattctcgcttgggtccatgggcgcaggaccaagggtggagcccttgccagggaccccgctcttctctactcagcacctcccttgctctttcccgtatcaatgttagttctgcttggatattgactctttccatttactctatcatgtcttcttcaaatgtcttcaaaacttttggtctcttgcctttaccttgtcagtcaccttttgtttgtccagacttctgtggaatagagaaaaatatatgaaggaagggcttgtggtatggaatgcaataatcaattggtacagctgatatgcttcaagaaattaagacaagaacctgattgatctgaagagagaaaattcaggtttaactagagcataaaaatatgtcatcgtggtctcagatgaaagccaaagagagaaaaaagggcaaagtgtacatcagacaatgagaattctctccaggaaagacacatttatggagtctcatctcatcaaaaacacttttcctcttaattggctgaaagccactcctcagcctaagagagctctagcctggtcatctgggatgtccttttgagtattttcctctggttcccattttcctgcaatctggtattgcttccatagttttctaattcagtgataatggaaacgattcagtcccccactttctctccggtactgctcagcatgtgtgactccagttgccataggatctcagttctggtattttggactgtgggtaacagtttcataaagcaatttttaagaaaaatgaaaactcatatagcacttattgtragccaggcactgctctatgccctttatagatattaagtcatttaatttttagaacaacctagtagacaggtactatactttttgccattttgcaaacaaagaaactgaagcatagagagattcaataacttgcccaaggtgatatggccagtatttggcaaagtgagaatttgactctacttagcccgcatttagtgtctagcctcttaaccaccactctgtactgcctcttacctacctcagtgatatgcagtattatctgatactttccatttgagtccatactccatacttttaattttaaaaatggtatctgggtgtgattcatgaaatgatctcaccactttataatgggtaccaacacaaagtttaaaaatcattgggcaggggtgggaggagagaggattgggaagaatagctaatgggtgctggtcttaatacttaggtgatgatctgtgcagcaaaccaccatggcacacattttaactatgtaacaaacctgcacatcctgcacatgtacccctgaacttaaagtcgggaaaaaacaaacaaacattgggttagaccctctctgttgtgagatggacacatcagcctgcctttgcctggtgcctgaaacattccattcatgtctctccttgttctgagccgtgctcacccagcaagtcactgcttaggatttggcctcccgctgaggtctgcctgcagggaaataatgtattggttacgtggacttttgagtctccccatgaattagaaaaccatctctctggtttaggctgtgaggctagataatgtgaatctgtccccaagaaatgggttcttgagaaatgtagtcaccggatcagacatcagtgccagcgaggctgaggactgtgaggaccttgaagatttttgtcaaggtccaccctgtgacatcttttgttggatagcttgcaagatttcttcctggggtggtgaatcctagccctgaggactgactgtgggaacatgatttaaatgactacagcacttagcactttttccatagccagaaatagggctcaatacccctgttttttctccctgtcctcatttactcacgtatctttctacagaaaagaaaatgatgttactttcccacctcagctttattatactgcatgaataaatgcaacacatcacctccaaataattgattgaaatgcaatccctttccctctcgctccacccagtctctctcctaagatggtatctagtggggccatgtcttcatgcattatgcatctctatgattatgcaataacttctcgaagactagcaagtgatacctaaattcttcaagcatgttattgatgctaaataattaattacatcttttatttataaaaatttacttgctggaagttcagacataagttctgccaacccatcttctctattagatttcaacttcccggcatgaagtctgaaaactcacctacagatttcagtctttgaaagcccttaggcaggcagccagcatgaagttgggcattccagacaagtgagactggctttaagccaacagatacctgtactgacctcttcccacggtcgtggggatacagcttgccaaggccttaagtgcctggggaaacctatttccaactttaatgcattagtaactgctgtgtcctaaatgatgagcagttagggactttttgtacctgagtaaatgtaatcaggtgattggagaagttgttaaaccctcctagtttgtatgagtgggaggataatataagtaaaaagaaatatgggtaaccgtctggggaacagactgcatgatcaaaacattttgttttgtcttttaaaacatatttgggagaaattgtaaacagacaaaataaatgtaactatcatggtcaacaaatacaattattgatgtaatcaagagataacttttttcagccaggcggcatggctcacacctgtaatcccagcaatttgggaggctgaggcaggcggatctgttgagcttagaactttgagaccagcctgggcaacatggagagaccccatctttactaaaaatagaaaaattatccaggtgtggtggtgcgtgcctgtagtcccagctactcaggaggctgaagtggaaagatggcttgaacctgggagggttgcagtgagccgagattgtgccactgcaacccagcgtgggtcatagagccagaccttgtctcaacagtgacaacaacaacaaagaagttagtggccgggtgtggtcatgcctgtaatctcagcactttgggagaccaaggcgggggggattgcttgaggctaggagttcaagactagcctgggcaacatagtgagaccctgtctctacataaaaattaaaaattagccaggcatggtggcacgtgcctgtagtcccagctacttgggaggctgaggtgggagggtcgctcaagcctgggaggtagaagttgcggtgagcccgtgattgcacgactgcactccagcctgggtggcatatctaaaaaaaattaaaaaatatatatatataacttttttcctgttgcccttttatactttaataggctgaagtgcagtggcataatcacagttcactgcagccttgacctcctgggctcaagagatcctcctgcctcaccctcctgagtagctgggactacaggtatgagccactataccccactaatttttgttttttattttttgtagatacgggcatctcactgtgttgcccaggctggtcttgaattcctgacttcaagcagtcctccctcctcggcctcccaaagtgctgggattgcaggtgtgagccactgagcctggctcaactcatttttaggaaatagactatcctcctgtcactctaagttacaagctctgtctcaattcagaaattagaatgaccagcccaagctgataatcgaacctttgaacttgatttaatgtttatcatcccctttctcatctcaggcctggatccaactgggagtctcagtgggaagggctgggggctaggtgggagcctctctgtagcttctctctgtctacgcgtctttctctccttacacattctcagtgtgctagctagtttctgaatccccaggactgggtgggtaattggggagttagggataagggaattggaaaggttgctttccactccctgagcctggccagtgtttgacatgttggacattgtggtgggctcttcagagacccgcatcattggtgagctctctcctgtaattgtctggacatataaagatgcattgtttttttggagacagaatctcactggagtgcagtggcacaatctcagctcacggcaacctccacctctcaggttcaagcgattctcatgcctcagccacctgagtagctgggattacaggcatgagccaccatgcccagctaatttttgtatttttagtagaaacggagttttgccatgttggccagtctggtcttgaactcctggcctcaagtgatccacccacctcggcctcccaaagtgctgggattacaggtgtgaggcaccatgcccggccagaaagrtgcatctttatttcaggtgttatctggggatttatttattctaagaccccagcaatcctgtgcccacctctagtttcttgctgctggggtctctctgcctctccagtaggtggccctgtgagacagracccggtcagacctcacaccagctctctcttctgagtggccacgtttggtccccagggcacactctactcaggaaaacccagaaaggcagactagctcctgcatgcccctctagcctgctgtcatggcccactctgggtgtcacaggcatgcctctgggacctgaatgtctgctggttccagctgtagtgaaactactttaaagctccccaagtggtccacacaagctgcctgactgggcttggaatgaagaagatacaactcttgcccatctttcttttttttttttttttgagacggactctcttctgtcatccaggctggagtgcagtggtgcgatctcggctcactgcaagctccacctcccggtttcacgccattttcctgcctcagcctcctgagtcgctgggactacaggcatgcccatctttctttgggggattttaagggggacactacagctcattaacagctcccccaacaaaagctcttcacctatctgcccactccccccccccgcccactctggccccttttcatatccttgatctggaggaggcatccaagagtgacggagccaggtctcaataatttcctttgtgaattctgtgtaagggggtctgtttcacagtcatgtaggtatctgatatctatcatattggtgcctcaattaaaatggaggcagaaagagccctattctaatatctcattccataaacaatagagacaaaggcaaaagtgtgtgttttagttctctattgctgcctaccagccagaaatggagtggtttaaaacaacatcgatagactatttctcatgattctttgctggctggtcagttcctctgctggtctcacctgggctggctcatgcagctgccgtcactcacacagctggtggttggcactgactgttggttgggcgccttggttttctttctcatggcttctcattccctggtaggtgacaatggtttcctttcagaacaagcatggcagtgtttcgagggaccaaagtgcaagctccaaggcctctcaaggcccaggctctgaaagtcacacagcatcactttcatacattctattgaccaaacaaaaccacaagaccagcctagatataagaagtgggaaaagaggctgggcgcagtggttcatgcctgtaatcccagcactttgggagctgaggcgggcagattgcttgggcccaggagtttgagaccagcctaggcaacatggcaaaactctgtctctacgaaaaaaaaaaaaaaaaattagctggcacacgcctgtagtcccagctacttgggaggctgaggtgggaggatcacttgggcctggggcctagaaggcagaggctgcagtgagctgtgattgcaccactgcactccagcctgggtgacagagcgagaccctgtctcaaaagaaaaaaaaaaaaagaattgggaaaagagactccaccttagtcttagtctttcaccctcccctatagtttctaacacagaattctgcctctgtcagttctggttctagactttttctgagcasatttggggtaaaggattaggggaagaattaaaagttatctctacattggtttacattttgcttacatttggaagggtagaaggaagagaaaagaaagattcagaagttgagaggagggaggagagaaagtagagccaactgtggcggaccttggaaaagcactgcaggggatagaccacasattgggaactgggagtccttggtttagagaatagggttccaggccaggcaggtgctttcattaatgaagttatcggtaagtcartatgtctgtctgagttggatgaatgataccctccaaagcttattgtgaaaatgaacttcactatagattggattcccccttggggcctggctaaagccacactatgagatgttagcctgatactggctccataatacccaaacccagcctgagatcctccccgtccacctgccccagtggacaaaccttgcactcccatcctttytcccctctgacttttgtgctcctagggaaggtgatcaacagcaaggygaggtgctgggtgctggcaaaacaacctcgccttcaggttccaggtttctggaagaggtgaatgacagaagagggaatcaagttgattatttcctccatrtctccgctctactttgggcgctacattcaaagctcaggtttttcattttaaaaataattgctaaagtccttagggggtagatgctttatgtgtgcttatctcgagtttaagttgaaaggacctgtgtttcccatcagatgcccccagcaggaatggcattggaggctggtgatatttgaagggcaggtcagattgctgagacatgaagtggctgggctggtgttgagccgacacaggtgagcaggctcaggctgcagattgttgaagcagataagcaagcggtggggatggagaggggtcgggacctgcactcgccttagattttaaacacatcaagtccatggaagaatttattttctactttcagagaacagatatatgcctctctttaagagaatatgctgtgctaaaaaaattatcaagttttcatcgtggcttttcacgatcagcatggctaagcagaagcctgtccagctgcgtctaactctacgtgcttcctaaattacccygtaatcctcttgtcctcttccaagccttggccgatctgaatcatagtgcatttctttcagcacacacatggcratagatacttcagagcatcgttggggtgagttttgtgtgcgtgaatgcctgtgccctggcctgggccaccaccgcacacaaccagcaggcgragtgtggctctaccagccacgacctccctccagggcagtgcggggaggccaccggcagggggtgctgcacccacactgctggcaccagtacgtgggcattaccaggcttcataaattgctggaaatttaaagctggaggggatgttagaaaccgtatcatccactggtttccattcgctcgtgaggaacccatgatcccgagagttgagtttgtggtggaaatggagctaaaatagagccctctccacttccaggccaggacctccacctttcacatccccactgccttcccctggcatgactacaaatgtcttaccagtgttgagagggaaatgatttgcatgtagaagaatcagcaaggacaagaacaggtacttagtgctatttgcctgggaaatcgcagattgaggctttttgcatttggccccaaagtcacagtcaacccgcaactagtaggggtaagattattattttttagtgattatatttaaaaatagcacacttggggaaaaaattacagtttgctacaaatcatsaaaacatttgcccatcctctgagaggccatatgttgtagtgtcagtccccacctctgttattactagctgggtgatcttggccaaatttctaaactccattttgcctcatctrtaaaatggggttggtgaagattaaatgagataagacataggcagtgctttttasggtcacagcrtatcctaagtactcaacaagtgccaactgtaataataatgggagccatttggcatctataacttggaactgctatgtagttgtatctactacagtggagaaatgttccctctcaccagttggatatgtagctgttgggtgtagcttctctatggtctaccaggatcctctccagagaccatagttgtggccaggagttggctaaggtgaaggagtgaagagtaggtatggaagggtggaaggaatgggtgagtggcttttagtctaagctggcaagtaagaaagaattgagaaagagaggaagtgtgctgggatgtgttcttccccaactggggatctttcttatmggcaaaaaaataaataatcaaaagccatgaaacagacagtgataactttttttttaaatggagtctcactctgttgccaggctggagtgcagtggcacgatctcggctcactgcaacgtctgcctcctgggttcaagcgattttcctgcctcagtctcccgagtagctgggaccacagaygcacgccaccacacccagctaattttgtatttttagtagcgacagggtttcaccatgttggccaggatggtcagtctccgtctcttgacctcgtgatccgcccgcctaggcctcccaaagtgctgggactacaggcatgagccactgggcccggccgtgataactttttttcaggtagaaatcttttggttctttttttatcaagtattttgtgtgatgcttacagaatacatttattaagtattttgtacagctcttattttttgttgttgttttacaatttgggtgatgcgtgcaaaaagtagatatagttctagatagtggattttttttttttttagctaattagattgacctcaggtccaatctgtaaagtgtttcaaatacttaagttttgtttagatttctttaatcttatccrtgaccttttttgccccccagccttcctacctcattgtgccattgatagcaacttgactttggtttcttctcttttcagagtttgatccagtggttgtaaaatgctttcagatcacgacatgaaactctgccttaatagaaaggcacaatataaatcagagatggccagaaaggcaagcatgaaaatagtatccctgatttttttccagtagcacatgatataacattgaataattgctgggtatatttgacaaattgggatacagktcattagggagctggggaacttaaaaatcaggctgtcttcaggaaaatttatgaggggattacagtgtgcagccaccagaaaatggggcagcaggaaccttggctgaattgatgatctgcctgagtgggagctgcatccattgagcaaaactttctttagtcaaagtgacttagagggaaaattgtgataaatagaatgaatgaaaaaaattaacatccagaatatctagagaatggaattaaatccacaagtgcaatactatttctactgcattaacagtcaaaaaaaaatctgaacatgttcacacaagaggcattacaactagaaaacaaatccttggaagaggactcagcctccttagtaattataagaagttaaaacacaaaaccatgcaatgccgttaaactggcaaattataattacaaaatcaaagtctggcaaggcttttgagaaagttataccctcatacaaacataaattagtacaatatttctggaaagcaacatggcgaagtgtagtaaaccatggaacatcatatcctttgagctagtatatgtttgagactacatcctggagaaacaaagaaagaaaaataggaaaaaaaaccctaaaaattattttaaaaaattaaaaacaaactatggtctggcacggtggcttacacctgtaatcccaacactttgaaaggctgaggtgggaggatcacttgagcccaagagttcgagactagcctgggcaacatggcaagaccccgtgtctacaaaatttttttaaaaaattagctgggcatggtggcatgcatctgtagttccagctactcaggaggttaaggtgggaagatctcttgagcccagaaggtcgaggccacagtgagttgagggcatcactgcactccagcctgggcaacagagcaagaccctgtctcagaaaaaaagaaaccccaaaagtatgttgtaaaatgaaatataatattactattaagaatgatttttttttttgaggcaaagtctcactcttgtcccccagactggagtgcaatggcgcgatctgggctcactgcaacctctgcctcctgggttcaagtgattctcctgcctcagcctcctgagtagctgggattacaggcagctgccaccacgcctggctaatttttgtatttttagtagagacaggtttcaccatgttggccaggctggtctcgaactcctgacctcggctgatccacctgcctcagcctctcaaagtgctgggattacagatgtgagccactgcgcctggctgagaataatggttttttttttgttttgttttgttttttcttagacagggtcttgctctgtcacccaggctggatgcagtgacacaatcttgtctcactgcaactcctgcctcctgggctcaagtgatcgtcccacctcagcctccagagtagctgggactacaggcacatgccaccacaccctgctaattttttaatactttttgtagagatggtgtttcgctatgttgcccaggctggtctcgaactcctgggatcaagtgatctgcccaccttggtctcctaaagtgctggaattgcaggcctgagccactgtgcgtggccaagaataataaatttgtgtgttataaaaacaaatagaaaggctgatataaaatacagtaagtcctcacttaacatcattgacaagttcttggaaactgtgactttaagtgaaacgatggataatgaaaccagtttaaccacgggctaattgatatgaatacagaactaaattcctacgacatatttctagtcaaggaaacatcaccacatttctagattaagacccaaaacacttctattaaaaatggaaataactgtgagctatacatgcatttcggtaataaaaacaagtaagataattttttacccagtctttggtgaatcggtgagtgacagcagtcatgtggtgggtaagtcaaggaataagtgtttgcaatgagaaaattgtcaggagcccccccttccaccatgcagttgaaaaacgagcagtaacgaatgtggcggctccttgagcgctttcgcactgcgtcgtttattgtcgtgtatctgtaggattattcactactttacaaatttttattttactgtaatttgtatccatttattacccaacccgcttattscacttcagggtgggaggtagccagagcctatccccagcaactcaaggcacaaggtggtacccaaccttggacaggacaccatcccaccatagggcccacacattcacacacacacagtcrttcagatctggaccgtgtagacacgccaatcaacctaatgtacaacacacatctttgggatgtgggaggaaaccagagtacccagagaaaacccatacagacatggggagaacttgcaaaccgcacagacagtggcctcggctgggaatcaattttcaaaaatctcatcaacattgtaacaaaaccatgttgatcaaaatgacacttttttgaggacctgctataatgctaaatgaaaaattgttgagctcaggctgggcgtggtggctcacacctgtaatcccagcactttgggaggctgaggtgggcagattgcctgagctcaggagttcgagaccagcctgggcaacatgatgaaaccccatctctactaaaaaaagtacaaaaaattagctgggcatggtggcacacacctgtaatcccagcactctgggaggctgaggcacaagaattgcttgagcccgggaggcagaggttgcagtgagccgagaacgtgccactgcactccagcctgggcaataaagtgagaccctgtctcaaaaaaaaaaaaaaaattgagctcaactttataaatattgactataggcttgttttaaaaaaaaagcccaagcaacaatacagctaaaaagagataatttgttacatggcaggatgagaagttaatttgatttttctgttgctttgatgttttgtatttatctctcattacaaaattggttaaaagcacaattttaaagactgcaatatatattgttaaacatcaaggacagaaaaaaggtaaacccttacatctcctttatgtggtttctcacagctgtgcagatctgaaacacaagctagaatagcacaaaaactgcatctcggagctgcacaaatttcctcgattatacgtagaggaaaagtgtgattaccaagagctttgagtggatgtcggagaaagtcatgttgggttaactgtctggttggctcatccgatgacagagctttacctacttggatctgatgctgggattgttttgtttggtttgggtttctttggaagtgagggaggccagtatgggatacaggaaagagggaaagcattgactcctttccactagtaagcatttgcctccttcatcaagccagtgccacatttcygcatccttcggcttccttcttctggtctgatccttcttgccccataagcttggcattctctgatggttatttttgctgtgttatctacctctaacagcaacagtaatcttaataaaatatagtctcacatttcctccaagtagctagacgttcttaaggctttagacacagccttcattgtatgtaatagtggcsatttttctttttgtccttgcacctgtgtaagcagggcactaaatcttgtaggtctcaccctgatttgcctctttgcagcagcaaggacacctgagtctctgtactttgacatagatttctgcttacatcgggcagttctgagtcagagggtggtgggcctgagtcaccaccatctgctttcatcaaccatgttcccgagacccagagtggggagattcccatggccccattcaggcacgtacagaggcttcatgagcatgtgcttccctagcagaggcgagaatggcgcagggacccttgtgaatttttactggagaaattgttacggaattctcaggctcttgtttccaaattctttcttccctctcttctctttcccatatttttctttttccccctccacacattagaaggcttcaagataataaggtaatatttattggggacatgatgtgtatcaggcacacttatgcatattaacctatttaatcttcacaaccaccctatgaggtaggtgggcacagctattatcctcattttacagccaatgaaataggcagagagggtaacttctccaagctcactacatgggagaagcaagcttcacacccaagcagttggcccagagtgcaggctgtgggccactgtgctctgtgcatcgtaacagggcaccagrgctagcttgcctgtgctctggggagggggctgatgtgaaagagaccaaagctagagtgaagagtgaggtgtgggagtgcatgctggtggtgtgtggggcgtgtgcgtggagagcctgacctgttttcctgtcgtcctgtcatttactctgtgagtacgcccagttacttaacctctttgcttctcagttccctagttcataaaattccaggaatatgaatagcgcttaacccctcatagggttgttgtgatgattaactgtgttaataaagtccctaggacagtggctggtccatgaatgttagccattatcatcagcatcatcattaatttgggaaccactccacctcctctttctactagactggtagtgacaaaaataacatttctagcaagttccaggtggtgccaatgcttcctgcctgggaatcacactttgagaaccactgaggtggaggatctggaagttcttcctttcttagcaccccacattccgtttctttccctgagctctgtccctgggttattttcactttctgtctttagtacccagagtggccagcttgcatggctatcaataaccagtgaaaggagcttccccagaacctctcattgactcctttcaatgaatactgtaatttgtattcatttattacccaacccgcttattctacctcagggtgggaggtagccggagcctgtccccagcaactcaaggcacaaggtggtaaccaaccttggacaggacgcctgctttcagcaggatctgatgtgatgggtaggcctgtttccacgagagggagatgcaagcaagtgaaaagacagaagttagcaagtgttgaatgcgtagtatgcacagaaacacacctgagtgagtgcatccatgaataaagacagcagatgattttgaaagtaataggaggccaggcgtggtggctcgtgcctgtaatccaagcactttgggaggccaaggtaggcggatcacttgaggtcgggagttcgagacaggtttggcctacttggtgaaaccctgtctaaaaacatacaaaaattagccagacgagtagctgtagtctgagctactcgggaggctgaggcaggagaatcgcttgaactcgggaggcagaggttgcagtgagctgagatcacaccactgcactccagcctgggtgacagagcaagactccgtctcaaaaaagaaaaaaaaatgtaatagaaaagtagagaaaagaatcttcctccctgaaagataatgacctttgagcaaagatggaggtaatggaggaaagtggggagaagagagaaaggggccctaattgtcacattcatggttggaattgtgaggttgtaagaagcaaaggcagcaggcaccctgatcttaatcagacagatgacagcttgcctttcacaaagtaaaaggtaatagtgtataaatgagagaaaagtaggagttccagtcactttactacctctggggacggaagggaatggggagcaggtctggggttcagtatttgtgtgactgctgacttcagaggtctgaattctctgcagctcacttgctgcctcagtgggtggggtgtgatgggacttcccatccagggccctaaactctagaatccatcctcataagaactgcgctgcctctgagcacctgggcaagctctgtgtgggatgcagatactctgcgaaataagggttctgcttcttttaggctgcaagagcagaactgggatgtgaattccagcccagggcattttgcaccctggatctggtttatgctcttacttgctgcaactatgatggtggctgtttccccggggtctcccagcccaagtctggtcctggagtggctcacagcaagtctcattgccccgaggcaggaaggctgcagagaaagttacccttggagtagggagagaggagaggaagccagtgctctcttcaagtggyctgctctgtgttcacaggcccgatgggctccccaaggctgtcctagccaggctggatctgtgccaggccttgacccagcagctgtgttccgtaccttggattcctgacaaaagcaaaataattgctgcttccagctacaaccagctggctaccaggagaagtcaccagggagagttctgctgtatcctctctgcccctacccccagctttccgttctcaagaatgacactttgttgttcctttgtatgtcagtcccagattggaaatgaaaaaaggaattgaaaaaaactaaaatatcataatggggtggtacatttccgaatggttgttgatgggtctgggggtttcctgtgtaccccaagcaggaagtttcgacttgttttgagactgtcagctcttgattggagacttccctggaagaagcagtcgttcaagagagtgagctctttgtgtttatagaagacgaaaaaatacagctgggcgctgtggctcacgcctgtaatcccagcactttgggaggccgaggcaagcggattacgaggtcaggagaccgagaccatcttggctaacatggtgaaaccccgtctctactaaaatacaaaaaattagccgggcgtggtggygggtgcctgtagtcccagctactcgggaggctgaggcaggagaatggtgtgaacccgggaggcrgagcatgcagtgagccaagatcscgccactgcactccagcytgggcracagagtgagactccttctaaaaaaaaaaaaaaaaaaagaagggaaaaaaatacatatattttcctttgggaggccaaggtgggcggatcatgatgtcaggagatcaagaccatcttggctaacacggtgaaaccccgtttctactaaaaatacaaaaaattagccaggcatagtggcatgcrcctgtaatcccagctacctgggaggctgaggcaggagaattgcttgaacccgggaagcggaggttkcagggagccaagatcgtgccactggactccagctgggtgacagagcgagactctgcctcaaaaaatatatatattatacatttatatatagtatatataactatatatataaatgtataatatattatatgttttwaaatattatatataatataatatatgtattatataaaaatatataatayatatattttcccccttattctcctaggttcctcagctggggtcctgtaaattagattgacaaaagacagattagcaagagaaacataaacaagtttattaacatgcacatcacaaatacacatgggggcactcagagatgagtaactcaaagggatggttacaccttggcttatatagcatcttaaaasaayagtaaagttttagagaratgacaaagacaaaggaaaaggactttgagtttctaaggcagcaagttgtgggaaggtaaatagtgggggagctaatggaagataagtgctaattgggaaggttggttgtatagactcctctggtgccctctccgggctggtaagggtctagagttatctctggtgattcacttctgtccttcctggtagagaggggaggagagacacatttacagatttatgttctgcttttaggtaaatagggggagggcagagagctcttttgtatctgctgctgtgtaattgccttcagctcaaaataatctttatyctaaaaaggcatattttggagtagcatgttctgctcccttcatgttcaagaagatatgtttaaaattctttctcttaaacatatctctttccccccttccgtcaattcaaaaaatatttactattccactgacaaacttgtatttggttagacctatgggatgcagagctgtgtgctgggagatgccggggggagggtgaaatccagagctgagtgctgctctcaggaagcttatagttgagcttatcagtcaaggtgtaaacacaagaaagcatcgctgactataatcctcaccagcccaacctctagctccaggccagcctccctcctcctccagaagtccttggccctcctcaccaccataggtacagcccctccttccttctggggaaacccttcccgacccttccatcccaaaatgaatcgtctgccttctcagcaacctacttgtcttcacggactttgtagtttaccacaaacccttggaatgcctcttggtgacttggagtctttaattttggtgttgccatttcagcttttggaggmtcaaagaagacttcttcaacttgtgaggtggattggtgaggttggccacacacagaacttctgttctttctccaaacacttctatacctttctccctctcctctgcctggaaaattccyrttcctttttaaaaatcgaggtcagaaatcacatcttctttgcagccctccagactccttcagagagacaaagtcaccacagcctgtagcccttcattctcctataattggctggtgggttcttcctgcccactgcacagacaaaatcaatccactgagacaacggcattgcagtagagaaagagtttaattgacatgagcgtagcccacatgggagaatcagaattgtcattcacattggtctccctgaaggcttggagattagggtttttatgggcaatttggtgagcagtggtcgggggctagggaatgggtgctgctgttggttaaggatgaaatcacaggggagtggaaaatggtccttttgcactgagtctgcctctgggtggggccacaggatcagttgagtcatgagtagcgagtctgaatggggttagtctgaaagatatttcaaaaaaccaatcttaggttctacaatagtgatgttatctataggagcaattggggaagtcagcaatcttgtgacctctggccacatgactcctgagcagtaagggattgtagaaactatgcctatcttatcagaattgaggcccctctcataatcctaaccttgtgacctttcactagttttacaaaggcaatttagttttgggaagggctattatcatctttgctttaaggtaaaactagaaactaaattcctcccaaacttagcttggcctacacgtagccaggaatgaccaagggtagcttggaggtcagaagcaagatggaatcagctatgtcagaattctcttactgtcataactttgcaaaggcagtttcactcctttatgacatctttatttttatttttaaattatttattattattatttttagagacagggtttcactctgtcacccaggctaacctatagactaacttaagacaggaaaaacatacagaggagacaagagctggtcttgctcattaaaaggctcaagactagaggtggggcatggtggctcatgcctgtaatcccaacactttgggagggccgaggcgggcagatcacttgaggtcaggagttccagaccagcctggccaacatggtgaaaccccgtctctactaataatacaaaaattagctgggtgtgatggtgcgtacctgtaatcccagctactcggtaggctgaggcatgagaatcgcttgaatccaagaggaggaggttgcagtgaaccgagatcgcggtcactgcactccagtctgggcgacagagtgagacactgtctcaaaaaacaaaaatgaaacaaaaagtctcaaggccagaaaggggagaccaagagaagctagactttcctagagtcaaggaaaccagttgtaagggatttasctatgaagtcagaacagttttgactgcctgtcaatgggggtgtccaaggagaaagaccattgcttctgaaaagactaaaagagaaccaaagcatggagcagcagctgtctctgggagacaaaaggaagaatcttcacggaggctgggactgatggatggaccataacctctgatttggwgatacaactccakgagtgggacctgtatactcatagagggtgaggaygagtgtgtttctgaatgtttgaratatgtttaactccacaagggtagaccagggtacacacctttaaggagcatacatactcttagtatagtgttctatgcagatggcatcccttagtgaccttttccagagacaatgcaggtggtgcagttgtacaggaccaaggccttgtccactgcatatcattgttacacccgaatccccttacatcctaaagtcaagtttagggtttcatttgaacctgagtggaggagaaatgaattcagaatctgatggggaaacctctccttacttagatatgaacccaggaacctcaagatgtgagatggggtggacttttctgtagcacacctctatattatcctgtcatgattatttaaaaaagaagcttcattccattagagctggaacagcccccactctgcaggatgagcttgggcagcaattgacaggtgcccttcagaacttagaaaatgtagaggagaaaggagatgtgtctccttttcttgaccaattaggacagctttgtgacagctccaggggaaaggaacaggacgaagagggctgtgtatgagatgggagcatgccaagaarcataggctttatccagtccagcgygtctcacactgcacactgtggcctcacagggggtgtagaacacttcagtttggatcgtgaccaacatttaaagcataataaaatagaaagtgtcagtgcattgagtttagtaagrattaaatattgtttatgaaaattgtatatcagtcatatttgtgtgtgttctagattgcaacgtgtattatattacttagygcaggtctctatttaaaaaaaaaaaaacagctgctttcttaacaagcagagtgaaaataactagtcttttaatctcagtgtccggcaaactcaagtttgcccagttgataaagtcccgattaaccttgctgtaaaaatccaaggtaattgttttttttttttttttttgagacagagtttcgctgttgttgcccaggctggagtgcaatggcacaatcatggctcaccacaacctccatctcccgggttcaagcgattctcctgcctcagcctcccgagtagctgggattacaggcacgagccaccacgcccggctaattttgtatttttagtagagatggggtttctccatgttggtcaggctgtctcgaactcctgacctcaggtgatctgcctgctttggcctcccaaagtgctgggattacaggtgtgagccaccatgcctgacccaaggttattgtttaggaacaaacatggtgggagcaaaaagttgttgggtgttcctctgtttaagagccttctggaaggatgaagtctccaytgggctgrcacagmgcctctgcggcctctgaggcctgtcagtggagacccttcaggcggtttttcctcacttaggttccatgactcaccttgtcagttgaaatcctgcttcctatgggattgggccaaaatcaaatgcatctttcccagagctttcttttcttttttctttttttttctttttttgaaacagagttcactcccatcacccaggctgcagtgcagtggcatggtctcggctcactgcaacctctgcctcccaggtttaagtgatcttcccacctcagccttctgggtagctgggactacaggcacataccaccaggcccagctaatttttgtattttttgtagaggtagggtttcatcatgttgcccaggctagcctcgaactcctggtctcaaatgatctgcccacctcagcttcccagagtgctaggattacaggcatgagccaccacgcccggtccaggctttattttctaaaggaatcacgttttagaatgtccatgggtgagctaatgctgtgacagtaacatatggaagaaaaagtacactcatgctacccatagctgtcatttttgtttgtttggtgagacaagtggaaggtgctggtatagtactgtgagtggttgatagtgaaatgaaaataaaactcaagtatggcttttaccctctgaaagttagcgtggacggtggtgacagagtgatagctttctttgggcttgaactgaattcacattcaaagtttgattatcaccatcaggagcctgtacccatgagccccattagcccttaggaaagcctaacaccatctagatttcacatcagctggaaaggtttatttctgaagttcaggggagttatttattaaagcaacaaaatattccgaggatatagattatgggaaaactccttactctggaactattctgacttggtttttcttttttgttgtatttggccttcagaaaacccttcctgaattcttcctggttatcatccaggttgataaccttgttggtctttaagtgtgcaatttgaaatataatcaacatatgtctaccattttctttgcatgggagagagtgaaaattgtttcttattaatagttacctttattatgttcattaggaaaaacaaaatgccatgttccatttgctctcagaggcagtggaggacaggccctggggcctaaatgtctaggttcgtatcttcctgctgccactagcaagccccactgctcacaggcacaacgacagcagttttcagggtatctatcacctgtctaccacttaccaagcacttgacatttctcatctttagtcctaaaaacagttcttccagctttgttttgttcttcccatttttcagatgaggaaacagactcagaaagcattagggaagagctaatcacggccaccatgtatatctttttatattattcttttaatttgatattgcctttcccacttactctagggcctacttatttgtgggcaggaagaggaggtatgcatgtatttaagtttaatcagtttggtattagaaagtctgtacaaagcaaggtctgttttatttatttattttttctaaagatgggggtctcaccatgttgcccaggctggtctcaaactcctgggctccagcaatcctcctgcctcagcctcccaaattgctgggattacaggtgtgagccaccatgcctggcctaaagcaaggtttagcccgtwctttctcatgctggccatctatgttctggttctaacgtttgtgtggttggtgttaatgttagacctaaaaagagaaagatgaaattcggtatttgttatcaactgtcaaagacacttgttttccccagacttttattatgtacattttcaaacatacagaattttaaagaataatacagtaaacacccatatatctaccactagattcaataattattaacatttgccatatttgctttatttacctataactttttttctcagccatttgaaagtaagttgcagatgttgtggccatttacacctaaatgattccatacacatcccctaaaaataakgatattatcataacctaatctaatatcttgtccagattcagatttcatgtgtcctcagactatcttttataattgttttttgttttgagctaggagctagtcaggctttcacattgtatttgattgttatttgttttcattgtctttggaacagaccctcacccttgacattgactttttgttttagttttctgtagaatgtcccacatttttgtgtgattgtttctaccttccctctgttttctgtaaactgcgaggtgagtcttaccggcatggttgaagttaagcatatttggcaagaatgcctgaagggtgatgctgtgtgcttcctattcatcatcagaaggtgtcaattgcctgcttgttccactttaaagttttttaatttttaagctttatcacgcttatcaaacatatcagaaagcaaataatcagcgcatcttatggtaatcgacaaaactgaacaaggtaattttatttacagaaaaaattttagcaaaaaagtatatagtacagtcaattgaaatgcatgttcattcttcttaggtatacaagaaagtagaaaataaaagttctctgctgcccaataagaaaaaacaagtcttttaaaagacttgaatggaaatcagacatttagggatttgtgaaaagaacttcttggtgcggatccacatctacatttagaattccacttagttatttttaaaaataaataaacgtcacaaacaagacatcacaaagaacagagagcccctagtgccaaaaattgccaggaccaatatgctattgaaacaactggtagaaatgttacagacacctcttcactatgtaatgttcctgtagttctgaggtgaaggtaaaccagcaggagagaatccttttttttttttttttttttgagacagagtttcgctcttgtcacccgggctggagtgcaatggcgcgatctcggctcaccacaacctctgcctcccaggttcaagcgattctcctgcctcagcctcctgagtagctgagattacrggcacctgccactatgcccggctagtttttgtaatttttgtatttgtagtggagacggggtttcactacgttggcgaagctggtcttgaacttctgacctcaggtgatttgtccgcctcggcctcccaaagtgctgggattacatgcgtgagctactgagcccagccgagaatacttttttttttttgagatggagtttggctcttgtcacccatgctggagtgcagtggtgcaatttcggctcactgcaacctccgcctcccgggttcaagtgattctcttgcctcagctcctcagtagctgggattagaggcacctgccaccacacctggctaatttttgcatttttagtagacacctagtgtttcaccacgttggccaggctggtctcgaacccctgacctcaggtgatcctcctgccttggtctcccaaagtgctgggattacaggagtgagctaccatgcccagctgggaatactttttgtaagtagctttggattaagtgatctttcacattttttctaactataccatcttatcaaaaacataacaattacttattactgagtaaaaatagtagtagcttttaatattcacaaccaaccactctagtgctgacataggaggctacaaacttaaaattttttgatcataactagatgatcaagatggagccctttttgggggtaaaaattccttctactccrtatttgacactgttaagaggatataaaggaaagttaaattatttaagatttttcacaaaagatttaagaatgaaagaataaatcctgctggaaaagaatatgacagccataccatctgcaaagtaaatcttctacagaggtgcagcttgactctttttatagtaataaataaacactgcttagttccataaggcactgtcactgcagctagtgcacactagtgccacccactgtccccagtgtgcaamaggaagggtggaggtgcgttccagtgttactgatgctaagcttcatctcttggttaagtggtggcttccagatgcttccgttgtaagattctattttcccctttgcagttaggaagcaatttaagaggtgatacttctcccaaatcctttcatctaatgattttagcatttgtattagtttgctcctataacaatgtactacrgatggggtggcttaagcaatagagatgtgttgtcacacagttccagaggctagaagttcaagatgcaggtgtggggagcttcctctgagggctgtgakggaaggatttgttccaggcctctctccttcgcttatagatggttggcttctccctatgtctcttcacattgttttccttttgtgtatatctgtgtctaaatttcctcttcctatgaggacatcaatcacactggactagtcaacccttgcctgcccatgacctcattttaacttgattacctctgtaaacaccctacctccacgtcaagtcacattctggggcactgggggttaggacgtcaacttttgaattttggggggacacaattgtgattcttgcctgaatctgttatttattggggtctttaggtttctgtgaaacagattctgagatgcagatttgtgtgctggcatatctagtactgtgcttagaaacatctgtgggggaataagaagcagaattggacagagagagaagctgaattgcagtgcagttacaacagaggcctcagcctatatgctacagggagctgygaaacggggcagtcctttgaggttttttgtttgtttgtttgtttgtttttgtttttgttttaagatggggtctcactctgtcacctagaccggaatgcagtgccatggtcacagctcactgsagcctcaaaatcctgggctcaagagwtcctcctacctcagcctctctgagtagctggaactacaggcatgtgccaccaccacacccagcttttttatttttaatcactttgtagagatgggggtcttgccgttttgcccaggttggcctagaactcctggacccaagagatcccctcacctcggcgtcctgaagtgctgggattacaggcatgagtgactgtgcctggcccggacagccctttggagatgttccaaattgaggcaaaaggccaaattttgtacccctttatctactaagcattgaatgcaggctgctgccagggaggaggcaagccttgggctgtgcagcttcccaggtagggcaatgcctgaggaaagactcagttgtgagctgttaggcaccaacaatcccagtagttggggaatgagtacctggacctacagagggttggggcagtgctcaacagcatcagacacaattggggattgcagaagggtgatttccccctctaacctgcatttattattaataatttctgaaattattaatttctgaaaagaagatctttccttcatcaactaggaatggattatagttctaaaaagacaggataaatgctgctttctcttttgtcttttttttttttttttttttttatttttgccttttttgagacagcatctctctctgtcacccaggctggagttcatgattacaactcactgcagcctcgacctcctgggctcaagtgatccttccacctcagcttcccgagtagctgggactacaggcgtacatcaccacacccaactaatttttaaaaaaatttttctgtagagatggtgtctcactatgttgcccaagctggtcttgaaccggggcacaaacagtcctccctcctaggcctcccaaagtgctaggattacaggcatgagccactgtgcctggccgtttctcttttaattaccaattttccaagtcatgaatgatgtaattcatttatactcagggttgcattatgacttttgcctttgtaggccccttctccataaaaatatattaaaaatcattttacaactaccagcctggccaacctggtgaaaccccatctctactaaaaatgcaaaaattagctgggcgtggtggtgtgcgcctgtaatcctagctactcaggaggctgaggcatgagaatcgcttaaacccaggaggctgaagttgcagtgaactgagattgcacccctgcactccagcctgggtgacagagcgagaccctgtctcaaaaagaagaaaatcatggccgggcgcggtggctcatgcctgtaatcccagcactttgggaggccgaggcgggtggatcacaaggtcaagagatcaagaccatcctggccaacatggtgaagccccgtctctactaaatatacaaaaaattagctgggcgtggtagcgggcccctgtagtcccagctactcgggaggctgaggcaggagaatggcgtgaacctgggaggcggartttgcagtgagccgagattgcgccactgcactccggcctgggcgacagagcgacgctccgtctcaaaaaaaaaaaaagaaaatcatattttacaactgtattggtataaagacaactataatcgaggctagactcatgattatgtacttattactatattctctttttatctttttgaagaaaacatattgtgggctgtgagcactgtgcctactgtgtctagtgggtaagttagccctggtaatgtcctagattgaggccaggcaggtaataaatgaagaggrttgattcagagtgcatgtactactgtatggggtaaacaggggtgtcatgtggagctgtctcagtggaaggggtatgtagttcctggaaaaagttgccatgcaagaaagagaggtggcctgacrttgccagatctttccatgtttcaggagaagccagaaaaagagattttaaaatttgaaattccctatttttaattgttggatcagttttttaaaaaatctgtgggttggttgtggcctgggggctgccagtttgagaactcggctagcagcgagccccctgaaatggaggctgcccactctgatactccgcaccctggaggaaacgggcatgtggaaggtgctcgtacgtgcttgagaaggaatgaatgaataattgtattttgataagtcaactcattaaaattaggttggaatttatgcataagaaccaagtgaaggtcagaaaaccaagccttgkaatatgctgcaaagaaaaaaaaaagtctgtcttggggttattcacagcaacttaaagcgatttggcaagaataaaaatgtgtgaagaaacctcttgaaactggagtttgtgaactaggtcaggctgccttaatgatgcagtccctaaytagagaactgaagggggtttcatggtatcttgaaagaatattgcattattaaatttcatcttttttttctatttaagccagaaacattgtgataacaacaaccttgaaaaaaatgtgttttgtaactttttggtggggggagcagcaagtacacctcgctgccaaatattcttcatgtttgtccttggcctgtggctgccagatagaggaacgtttggtcagaatccactgggttcacaccgatcaccatggtgagggagggtctgagtcagaaaaaaggacgagaggaggatgaagaaatcaggacggagagatgaggacggagagaaacagctcctcccaagaggctttcctggacttttcactttaatttccagctcttttggctcagaaataaaagcaacagtgatgcctagggcctctctccatagaatgttcccaaagatgtccctccagagcacagcactcagccctctgagggtctggttattgtggtctttatgcttcattgctgcaaaggtgcctgccagctcttctgtgaaaccttggattcctggacttcaaccagcaactgtctttattcccttagagagattgctttttttttttttaaaaaaaaaaggtgataatgacccataactactcagttcagatgatgacagcagaaattattcttttttttttttcacttgcctgaaattgaccacttttggtactgtttttaatttttatcttccttcagagggaccaactttttattttattttattttatttttgagagggaatctcactctgtcgcccaggctggagygcagtggtaccacctcggctcactgcaacctctgcctcctgggttcaagcaattctcgtgcttcaccctcccaagtatctgggattacaggcatgtaccatcacacctggctaatttttgtatttttagtagmgatggggtttcaccatgtttgccaggctggtctcgaactcctgacctcaagtgatctgcctgccttggcctccgaaagtgctgggattacaggcgtgagccactgcaccaggccaaaggaccaacgattttgatattagtttcctatttataggcagagatattaatgagcatgcatatacctatagtgatataaaatgtatgcacatcttcctctaacacacacaaacttactgcccaagataaaataaaaactgaataattaatgaaaaggaaattcartgggtccatagcacagtaaattactcactttgttctcaattttccctaatggtgatttcgatagttgcataasatggagagagagaggttgtgatgggagttatcctgaatcagaagcaatgaatgtgtttgctcttccccatttcacctcagagaacctgagcagtctgaggacccggttcaaaaaaaaagtctgtgttgggatctgggtcatcttttccctagagcctctgcttcctggtcacccagcctcaaccttgcaatgtctgcctagtaataaaaataatggtgtttgcagtaatatttattgaaatattgttatatgctaaataccctatacagtgatccttcagtatgtatagggggttggttccaggaaccctccatggatactaaaattcacagatgcttgagtcccttatatgaaatggcatagtatttgcatataacctttgcacatcctcccatatattttaaatcatctctagattacttataatacccaaaacaatgtaaatgctatgtaagtagttgttacagtatattgtttagggaataatgacaggaaaaaagggcctgtacatatttagtgcagacataaccatccattttgcttcctcaagtattttctttctttctttcttttgtttattgagactgagtctagctctgttgcccaggctggagtgcagtggtacgatctcggctcattgcaccctctgcctctcaggtacaagtgattctcctgcctcagcctcctgagtagctgggattacaggcgtacgccaccatgcctggctaattttcataattttagtagagacagggtttcaccatgttggccaggctggtctcgaactcctgacctcaagtgatccgcccacctcggcctcccaaagtgctggaattacagacatgagccaccacgcccaggcttcttccgcaaatattttcagcccacagttgaatccacaggtgaatccacagttgaatccacaaatgtggcacccatggataaggagggctgactgtatgtattttcacttaagtcccccaacaacactttgatgtagtcttttgtttgtttgtttgtttacagataagagaactgagactaagagacagtaagtcggtatcaccccagctaggaaatggcagaggggcagttccagattccctgtgagctccctcccttctgtgtggaaggagctgacattctccgtgagttcttccagggagctttgattcccaygcctagtaaatgatctccccgacacccggaagagaagctttgtgttatttgagggaaaggaagaggcttcgaagaagagaggaagaagccacaggggaaatcatggaacgctctcaggctgaactagtttatgctatcgaatagttttttctcaagggcttgccttggtatcattgtactgaacaaatattagcagatcaaaaaaatgataacattgactttttttggtaaaatattacacaattgacagctccaaatatagctctccttatacttgagtgtggccacaagtaccagttgccaaacattttcaaaagtggactggaagcagaacagccttagtctttgtcattttctttctcctcccttccccaaaccattcagtttagtcatcttgttttacatgctgttggtcaagagctaggctgtcagcatcatcctatgacagctaagagttcttaactttctggtcatcaagtttttcctcttatcaatgcatctcttttccttcacgagacctcatttcccacaccaaggcatgaggtataagccagagttatgacccctgtcttgtcagtatgaggttctagaatatatgtgtgtattttaaagctcctcagaaaattatgatacaggtagcctggygccagaatggtgtttgggacacccttattttttttttattaatgaggaaattgaggcccagagtgatgagtaacttgtcaagggccttccagttcctaatctagsctctggatgctgaaaataacccagatagaagccagaggaagcccatcggttcagcacaggccggcctcctggggcacagagcagcatgagaagggagggtgtgtgtctgccaggggtgcatggagaatactcagcccaacgtcttccatttccgctcattatcactcatcttccacagccttcagatctatcgttctaaatctgatcacatgatttttttttttttttcagacggagtcttgctctgtcacccaggctgcagtacagtggcatgatcttagtgcactgcaacctctgcctcctgggttcaagcaattctcgtgcctcagcctcccaagtagctgggattacaggcgtgtgccaccacacccggctaatttttgcatttttagtagaggcggggtttcatcatgttggccaggctggtctcgaactcctgacctcaagagatctgcctgcctcagcctcccaaagtgctgggataacaggtgtgagccactgcgcctagcctcacatgaaattctttatggtatcctgttgttctcaagatcagttctatctctctagctacatacaggttgagtatcccttatccaaactgcttgggttcagaagtgttttagattttatattttttcagattttggaatatttgccatatacttactggttgaacatccctgcttcaaaaatctgaaatccaaaatgctccaatgagcatttcctttgagcatcatgtgggtgctcagaaaatctcaaattttagaacatttcagattttcagattagggatgctcaacctatatgagtcccttccagacctggctccttgcctgttttactcccttcattttacccccacagccccctgccctggagccaaaccaaaccacttgctcctgcttgaacacacacagccttcacacctccatgccttgctarcagcagtccctccttcatgagctcatgcttcaggtgctcctgtatacctgggtctctccttcagagtccctgtcacccagtaatgatttgttcartgtttacctagagactgcccatgagtaaagggactacacctatcttgtctggacctggataagagcagttttgattgggggcagctatgaggggagaaagaccaaaacctgattgagtgggtttaagagagaatggaaagagaactgcaaccagtgattagaggcaatattcagtaagtttcactgtaaaggggaatagggaaatggaataggatccaggtggggaagtggggtcaagagaggtttttaaattttgctttttaacataagagaagtaacagcatggctgtaggctgtgggaataatgtaagtatgtggggcggtgttgatgatacagacaggcagacaggaatttctgagtaatgtatgggtaggatgagtggatatgatgcacaagggaagggccagacttaaagagagagtggcttggccatgtgcagtcatgtagcgatcatasagtacccaggctcagatgctggatggtaggtagaggtggcggagcctggggaagttctgatattcttactgaaatcagaagcaaagttatcaggtgagtagggcagggaggtgtcaggggtgaggtgatcggagcaggtatgaggtcaatgtctaggagagagggaccgcatatggatcggggaaatataatatggttgctgggtaatagtaaagcccaattgaggttagtggtcatgattttaaagtgagaccaatcaacatggttgagtatttttctctggttgagttagttgcacagatgccagctgagaatacatggaaagacagacagacacaatccctgccctcctggagatgatgtttcagtaagggcagatagcactggaccagtaattccttatttaataacaacgtgacaattgctgtattggttaacacagagggcaacagagtatctaacaggagtgcctgtctgaagtgagccatgtatatactgaatgaagtcctggaacgatccaaaatcttgccttcttttttgtttgaattacaaactgtgtggtgcagtagcagagtagtaacaacgtatgctataattttgtgtttcttagtgatctgctatgactttcatgcttattgctatataagctgtaaatcaaccaggaaaagtagcagttgcccagtatgttacaaccgtgtaaatggacctaacccaaggcaggaaggacacttgaggaaaataagcaatatgtataaaaggcatgaaatgtatcctctctctctcctgttctatccccttgtcatttaatcttcctagatgtgggcagttgcttaaagattcatgctgtgggatgagagaacatatctttctgcagctcatatgcggcacagtagacgatggcttagtggagggaggtagatggcagagaggagctgccggttattgtaagtataatagaatttagaaggttttaatagtaagaagaaaccctttgcttctcagcttgcagtctccaacacccttgaaaatgttctgattttgaaagaattgttgaaatagtacctacgtggaaatcacctctgaatcttgaaccttgtatacccagacttttcaagggaagatgtaagatttaactgaggttctttgtggtgctattccatgagataagtagccgtagaggtccttgccctgtcactggcagccctttatcagacacacacacatgtgcgcatgcacacacatacacacacattcattctctctgtctctctgatctggctggtcagagaaacactcagggactctgggccagcagcatcagcacctgccacaagctctttagaaatacaagttgaggccaggtgtggtggctcacgcctgtaatcccagcacttttggaggccaaggcgggcagctcacaaggtcagaagttcgagactagcctggccaacatggtgaaacccagtctctactaaaaatacaaaaattagccaggcgtgatggcacacgcctgtaatcccagctactcaggaggctggggcaagagaatggcttgaacccgggaggcagaggttgcaataagccgagatcacgccattgcactccagcctgggcggagcctgggcgacagagcgagacttcatctcaaaaaaaaaaaataaaataaaaataaaatatatatatatatatatatatatatatatatatatatatatatatatatatatgttagttggtccctccccagacctattgagtcagaatctcttgggctggggtcctgcaactgcactttactaagatcccctgccttagattgtatcctggctctatcactgtcaagttttcttcatctataagatggagatcataatggcacctaccccctacacttgtggtgagtattaaatgagttactgtgtataaagtgcttaaagagggcctggcacatagaaagctctcagtcaatggtagctcttattattatagggcacatgaaaatgtgagaatcagtgatactattgatctcacaccatagtcctttgtttccagcttatttatgaaataatatcagaaataaattactcctgctcctagagctccccatgaaactagagaggtgcgaagaatcaaggacaggtgcagtcaaayccagagaatgaacaaggcttggtttcaagaagagctttcctaagaatttagcgattctctaccttgtcactattgacatgtttgacatttagggctggatttttttttttttttaagacaaggtcttactttatcacccaggctggagaacagtggtgagatcctggctcactgcagcctccacctcctgggcttaagtgatcttcctacctaagccccacaagtagctggaactacaggcacgtgctaccacgcttggctaactttttgtagatacagtgttttgccttgtcatccaggctggtctcaaattcctgagctcaggtaatccacctgccttggccttccaaagtgctgggattataggcatgagccaccgcgccatcctggatattctgtacataggcagcttccgtgcattgtgggatgctgagcagcatacctggcttccacccactagatgccagtaacacccttcaagttttgggttgcaacacccaataatgtctcaaaacattgccaaatgtagggggtcacagtggggaggggaggcaaaatctctgcctcctcatcagaaccacaagtttatagtgatgaaaagtgtgggtgtcttcagagtgggttatcgggggggggatcttttcagaaacagagcatggcattcatgcatggggcaataatatgtgccggtgcttactgcttgccaggcacggttccaattttgcatgcagtaccccttttaatctttacaacaaacccaggaggcaggtactattttccstactttacacatgaagaaaccaagctttagagaaattgtcacagtgataagtgatttatcagggattcaatcccagggccattttagccatgatgctgtattgctgagcactacatatatgcacttctctctctctctctctgtctcgttttctctttgtcttgttttctctctctctcattttctctctccctctctccttctctctctctccctccctccctccctctctccctctccaacaatggggctataggcctttgcctatctatcttcagaacctgggaaggtctagagaggagaaacagtcactaattggccagagcccagaactgactttcaaaacacttgaactgactggaaaagcagacatcaaagtacagtgccttcttccatgttccccctcctcaacccagggrtcaccctctcccaagaagccttcaccctctgttggcttccccctcctctcctcagttctctggggaaaaacagctccccactgcacaccctgagccacagcccagcacccagatatcaaagactctgcagctgagagcctakggggcagctctcaccatcaaagggagctggtggggaggtggggcgggtggagtgtgaacaggactctgagttcacatgaaaggatgacattgtctcctgatccgagggtcactttgcatttactgaggccccatggagagtcagcatctggtggtgggttgcagagagcactgctctctggatcttatctctctgtttgtaaatcgagaaggtggggccacatggtgtctaagagagggtgtaccttatgaggcaggagtttctcagccctggttttgcatcagaatcatctgccgagagagagatgcctgctgtctggcccccatttctgatgcagtcagatgtttaagatctcaggtgactgtaatgcacagccagggtggagaaccactgcacttgcctgaaagagcttgaggttggactgatctggtgttggaattctggctttatcacttagaggtcccaaggcatttatttaatgtctctgggtctcagttttgcaaatctgtaaaatggaaatgatgatatctacctcataggagtaaaacaggaaaattaggtacattggtaaagtgacagcccagggcaggccgtcagtgagtcttcactcccttctcgctttctgttaggcagggatgttcctcacctgttgatggacacttggattatttctgccttctggctattgtgaataatactgctatgaacatggatatataagtatctgtttgagtcctatcactgctctcaattcttttgggtaaacatctagaagtggaattgctggaacaaatgataagtttatgtttgatgtttccttccatccatggatcctcttttccaacctgagggctttgcatctgtgagtccctctgcctgatcttgcctcctctggaccttgctcagttgacttcttatcttttaagtgttagcctaaattcttgtttcttctgcaaagccttctttggccccccaaactaaattatccactttttgatctctcttatattattctgttcatttgctctgtagcactttccatactttgtcattatatagcaagtaacttacttttcaaactcctgttaaactcccagttctgagctcagtggctggtacataatagcagctcaatgaaactgtctcataaagtctcataaactggcactcatgtttatgacaagccgaggctgaatgggatgcagaatgatggtgtaggtattacaggcaagggagtaacttggaagggcattaaggaaaaccagaattttgactttcagcttttgttttgagctggctaaaaggacvtgattcattcaagttcctcctgctagaatgaactctgcttccagggcacaggcaatcagcaggggcatttagatgtgggctcttcctgccttagattgtaccctggctctaycactgtcaagttttcttcatctrtaagatggagatcataatggcacctaccccctacacttgtggtgagtattaaatgagttactatgtataaagtacttaaagagggcctggcacatagaaagctctcagtcaatattatttattaatgttcactctgatgctatagagatacagattataagcgagggttagagagctcggccaagtgcttccttctgtcgagcactcagggatggctcttgaagggggctgtccatctctttctctgatcaggtccaggattaagggagttttaacttttgctttttaacattcctctaggactgttctctgtcatatagtcaggagggggtcactacagtcattatcaaaacaatgtaccaaatagggaaatcaggacagataggaggttgtgccttccacacagaagccaaaggagctctggactctgtctcttcccatccctggctgctagatcttgggcttgtggtgcaagcatgggcaacaaggtacttctgccttggaatcctgggtggtcttgatagcttcaggcataggtgtagggtcaaacagaggctcttcttgacctctgtggaagattcaagggtccaagttatgacacatgtctggtggtggcaagtatctaggggtggtgatgcctgtgggagcatcctaggccaatggttggtttttgattgctttgttctgttttgggacgggtctattttattttacagtaagaaaatatatataataacaaaatccaatgggaattcagtaattgtttctttaaataatggatttttgagctataactcatactgtacaactcacctatttaatgtatacaagtcatttgtttttagtatatttgcagaattgtgcaactggccctaaaatacattttaaaacatttttattcatagaacccattagcagccactgccttcttcccctttcctccaccccctaccccatgcaacaccagcctgtttactttccctatagatgataaactattctacaatcaggatttaagatgtaccttccttccatgaatgaaaggttcctgcttatgttttgtattcaagttatctattgttgcataacaaattacccccaatttagtagtgtaaaacaaaacatatttattttcttacagtttttgtgggacaggagtccaggtacagcttagctggatcctctgccccaagatctcccacggggctgcagygtgttggtcagggctacaatcttgcctgaaggctcaactgaggaaggatctgcttccaagctcactcatgtagttgttggtaggatttggttccttgagggctgttggactgggggcctcatttccttactggctgttggctggaggaatcctcaattctttgccacatgggcctccccaacatggcagcttgctttatcaaagccagctcaagagagaatctgctagcaaaacagaagtcacaatcttttgtaaactaatcatggaactgatattccctcaatattgctatattctcttggttagaagcaagttactaatagggaagagactacacaaggccatgcatgccagaaggtggggagcacatggaccatcttggaggtggcatagtagcctgtcctgcaggaccgtccgtgagttctctaggctgctccatatattttttaattcytgcttttgtttttgtttttggcttgagctaaccagaatcaatgactcttgtttgcatccagactgccatacttgtttgttgcttataattctgtcattttgtgattctggtttctattgatttagcacctttctctgtgaggtatgagctacttggtaaagtatttggcattacccattactccttttatctcctcaaagtcacaagttctttgtctgaatatttcattacctcagatgcagctagtaagcatccaactgaacacttgtttgaatatgagtctccacaaggatcatagaagagaaattaagaacagagaattagcactgtcaaaataggaaaactgaatcctgttaatgggacagcccatgaatccttacattcagcccaggctttttgtggtttttcctcatttgggtcatgaccagagggttggtttcctcccaagagcttcagcagaatttaagcgtcagaaatccagtgcaagctagattaagcaagaaaatgaagtctgttggctctggtaactaggacacactgtgcaggctcccaggatcaaaagaagaatgacagagctcctaggtcagcaaccagtggctcaaggcaggtttagctcttgtgggcatcttcattgtcttcatgkctcactttcttggcctcaagatttgctattgtaatcaggttttctcagcttggtaatatgtaatctttggtaaaccccagcttaggctttgagccagaagagggaaaaggattggctcaggtgtttattctcatgtctgggaagacagggcagtatactaggccagggccaggtcacatggccaaattccagttgttagaaggaccatgggaaaccgacagccactactgcacagtacaggcgctgctgtgaaccactgttggtgccatagggatagacagacaaccatgcargtgatccctaaattattggagattcccaaaaggacaagacaatgtctgtggtaaaggtctgactgggaaatgtggattagagtgatccttttttagccaatgtttttcatggagtcttggaattaattttattgcacccaaggtccagcctactggcagaatagaatcacattgaatttttccattctagattttacttgttccctgactacttgctagttgaaaaaaaaaatgttaatagagataagaaggccagggatgacaaggaaaatgactgtccatttcatggactcatgaccaaggttaaattacaataacaaaggaggccagagctttttatttactgcagctttctgtgatttgtgggcagattgttgtttgtgttttgcttttaacctttcaagtaaggaatgatttgtcatgttcatgaaaaccacakgtattcagggaccgtttattcttagagttaagggtaaatcttgtttttagaaccaaataaatatagattgagatcaagatcagtcaaacacttctggaagatgtaatattgtgctctctttaaatatgtttattgataccaataatgggcactgccacttagaaatatgctcttcacataacactcaccctgtcatgtgtgccaattaagaggtgaggtagagctcaatctctgccctgccgagagtgtatgtgtgaaattgaattgcaaatgtacattgacatggttgtgactttgcatcaagactggcaagaaacattagcaaataaaagatttgctgtagggaaggatattcaaaggtcaaagtttgctgaagaaagttctctgcttatgcatggtactgggatgctacaaatcaataaaaaggctgcctcctctcaagttattgattcttcatgttgcagctttcycccctgacaccatttcacgtgtgtccctgttcaggagagaaaaagcatggggggtgtttgaaagctcagggaccattgttgacgttgtccctgcttgtgtcttgcagcctacttctgcttcctcctggccgctctgggtgtgacagctggtgcccatcgcttgtggagccacaggtcctaccgggccaagctgcctctgaggatatttctggctgtcgccaactccatggctttccaggtgaggntggarggtcctctctgtgttgggagacccagtgcagatggcagtatnggaggaggggaaagatgggctgacacccctccacccctgtcctagactcagtgttcaggccccaagcacgcccagtctgtcccaagtttttatctctttgtagcttttagatacagtaaaatgtcccctgggggggttttgtgccctaaggcatgctgaactactgaggggaaaggagactcctctatccagagcccatgctgtgaacataccctgaaagcctcaacatttgtccagccctaaccaggggccaagttctgtgataagcacactggtatgcatatagtatttgatccgcatagtagccctgtgagctagatgttacatgtgtcccattttacagatgaggagaatgargttcagtgaggttaaagaacctgcccaaatcatatgcctaaaaagcagtacattcagggctaggcaaatgcaggccagcctgactccaagtcattgctcttacaacacctagtcccgaggttgccctgcgaggtcatggtggaaagactattccatctgaagtttgaagacgcagggattttactctgatgggtgctrgctgtgaatcacttcctcaacttcagtttcttaatctgtaaaaataagaacaaaacttcattctcagggttgttataaaatcaatgaaaactgcagggagctataaaaatgtaagagacggtcatcactgcactaggattgggccatattctttaagactatcccagtcctagaccattccccacctccttgggtactttccttgggtacttttggtttggtcatggatctctgttttcccaattcctaatctgagtgagaacaacttgttttcaaaacttctgcccacattatgagtgtagatgattctgggccccgtgcattttcactcattgggaaggaatgrtgattgcgaaaagtgctctagagtccagggagacgggtgacccaggagcttccctgtggccctcagacacacagctcatgtggccacctctgccatgggccttccactcctacgagacaacctgatgcggaatatttcactaagtgctcttgtagctcagaattcatttccttattttaggcatctcttacacagtttgacttttcataaggtaaataggatataacacaataggtcaattaggaaacacaattggtggtgtgtatatatactgcttgtmattcaagcacatcaggtattagtactgaggtcctaggaaataagctattaagcataagggagcagttggcagcttcctggttccatgttcatttgttcaccactggcagtgtgaactatgctgcactttattttgacttcagccatcttatttcagtgttgtgctttcaaaataataattgacttaggtcttagatgacgttgaggacctaacttgataattttcatttcttgtgttcaagcaatcctttctttatagcctccaatgacacactcatgtagttataaaacatttctattattggactttttttcaaagataaataacttgtagctgaagcctaaaactctgattttttttctcatgaaactacttgtttataactcaaaatttgaaaacctaagttttcttaacaaaacaccacataacagaatattagactgtgattttaaatttattttagggagaaagtacactgtagatggaagtacccaggtcctagaataaattctttgctctgccatttgctagatgtgagcctttctgcaagtatcagttcctttatctgcaaggggaggataataatatttgcctcacagagttgctaggaagataaaataatgaataaaaagtaccaagcttatagtagcaatcggtgaatattgttctccccttctcttttatgagaattgatatattgtttaattggtttctgtatgctaatgtctgtcatatagaaaacaattaatgattgttaggtaaataaaaaaataaatgaacagctttaaaatgtagttttagaaaccatcaaatttgaactatgcatactttttcaaggcccacatttgtagtggatttttaaaattcattcaacgaatacttattgagcacctactatgtggcagacactgagaaggcacagtgagaataacaatgagcaaagagtcacaagcttcgccttcatggagcttttctstctagtaggatattagaatccccaaagtttcccagtggaaatttcagtgtttcatggacctggggttttataacaatgtcacttagacctaggtggaaggtacctctctaagatcagattagggccagtttccataacatgcagaactgtgtcagtgggagagaactagaacagaactagaactagtcagtgtctagaacaatttatttaaaccacttaaccctatgaggagaacaacctggggaaatgaaaaaatgctatgatctgccagtgtaggatggtgacttacaaccctgacttaatgcagtcattgatttagtttccctttgataatccatgggtttttaaagatagtttcaaagattctctctcttctctccttcaccggaatggtcatgccattggccaaaatggacaagtcatgccatagctgtctctgtttgggatcagcagggtttttgctagatgctacaaacaagaccttgagcattaagaacagtattcttaacgttgagacttaaacattttaaactccttttctttttcttctatagaagatgtatgtatggggctgagaggcaatagtaggaaaggtggagatacttttagtctaaaaaaatgatgatgggctgggcgtggtggctcatacctgtaatcccagcactttgggaggccgaggcgagtggatcacctgagatcaggagttcgagagcagcctggccaacatggcaaaaccccgtctctactaaaaatacgaaaattagctgggcatggtggtgcatgcctatagtcccagctatttgagaggctgagacaggagaatcacttgaattcgggaggcagaggttgcagtgagatgagatcacaccactgcactccagcctgggcgacagagtgagactccatctcacaaaaaaaaaaaaaaaaaaaaaaaaaaaagatgatgatggggcaggaatgcctgataaggagctataaaatcctctgtcccctctgaacctgaacgcttgtattcagcaaagatctcctgagttcctctatggtctatcctccttccttgccagtagggtgaagtcaacctaaagactgcttgcaacttccttataatttgctccaagtcaaagatggacccaggtgagagatgcctgttctccaagagttaagttttcacaaggaagagccaggattcagatttgtgctgtcacgctcatgcatctgcttctgctggctacatctgggtctctcacagacccagtccaaccaaaagcacctactagatgcttcagcccactccctcgtggctcatatttccttatcaagtcatggtaatgaggcattggattgagagctggaagagaactaaagggatttagcttaaattctcatattctacagaggagtaaacagagaataccagtgacttctcgaagttcacacagctaattagtggatagacagactgaaaccccactgtcctgattcaggccacccactggatattcttatgtgctgtcctacagcatgatttctaaacaacatagagtttagtcttttttttttttaatcctctctgacagtctgtcttttaattggtatatttagaccattcacacttaaagtaattattgatatagttggactaatatctaccaagttaccaattattgatatagttggatcaatatctaccaagtttctgttttccatttgctgctctttttcttactttttatttgtgtattctactctttttctatttttatgtggttttaatggaccattttgtataagtctattttctgtcctctcttaacatatgaattatacttctttttaaaaatttttatggattgccctagaatttgcaatatacatttacaactaatcgaaacccactttcaaataacactgtaccacttcataatagtacctgcagtagcacaaggaccttctaacagtgtattcccaatttctccctcctgtcttttacgacattgttgtcattcattttacgtatccataagctataatcactaaacaaattgttactattcttattttgaacaaattgttatgtgttagattaagaataagaataataaaagtttctattttaccttcacttatgtagatccaggtttctgatataatttttcttctctctgaagaactctttttaccattttttgcaaggcaagtatactggtgacaaattccctcaattttggtttgtctgagaatgtcttttttttttttttttttttttttttttttagagacagggtctcactccgtcacccaggctggagtgcagtggagcaatcatggctcactgcagccttgaactcctgggcttaagcgcccctcccacctcagcctccctagtagctaggactataggcacatagcaccacacccagcttgagaaagtccttatttctacttcattttcgaagagtaattttgctgagtacagaattctaggtgggtggatttttctctttcaacacttaaatattttatttcactctcttcttgcttgctggtttctgaagagaaacctggtataattcttctcctcactcctttataggtaaggagggattttttccactctggattctttcaagattttctctttgtctttgattttctgcagtttgaatatgatgatacctaagtattagctgggcatggtgtaaaccctaagtgtagggttttttggtatgtatcctgcttggagttttctgagtgtcctggatctatggtttggtgcttgtcattaattcggaaaattctcagccattattrcttaaatattttctttttcttttttatcttttttgagatggagtcccactctgttgcacatgctgtaatgcagtggtgtgatctcgactcactgcaacctccgcctcccaggttcaagagattctcatgcctaagccacccgagtagctgggattacaggtgcgcgccaccaaacccagcttgtttttgcatttttagtaaagataaggtttcaccgtgttggtcaggctggtctcaaactcctggcctcaagtgatccacctgccttggccttccaaagtgctgggattgggccaggtgtggtggcccatgcctataatcccagcactttgggaggccgaggcaggcggattacgaggtcaagagatcgagaccatcctggccaacatggtgaaaccccgtgtctactaaaaatacaaaaattagccaggcgtggtggcgtgcacctgtagtcccagctacttgggaggctgaggcaggagaatcgcttgaacctgggacgtggaggttgcagtaagctgagattgtgccactgcacttcagcctggtgacagtgggagactccatctcaaaaaaataaaataaaataacaaagtgctgggattacaggcatgagacattgggccattgcactccagcctggggaacaaggctgaaactgtctcaaaaaaaaaaaaaaacaaaaaacaaaaaacaaaattagccaggcatggtggcgtgtgcctgtagtcccagctgcttgggaggctgagacatgagaatcgcttgaacctgggaggtggaggttgcagtgagttgagattgtgccactgcactccagcctgggtgacagagcgagtctctgtctcaaaaaaaaaaagtcattgataatgcccctacaaagtaggtactattattttcctcatttgataggcgagaaaacagaaaagtggttatgtaacctatccaaggacattcggatttatgtgacagaagaggggtttaaatgtaagcatctggactccagaagtcaccctcttactgctgtgctgtaatgcagtagtcctcagcctttatggcactagggaccagtttcatggaaggcaatttttccatagatggcagggtggggggatggttttaagatgattcaaatacataacattcatcattagattctcataccagtccgtggcccgggggttgcggacccctgctctagtgcctctcccagtgtccaaatgcacatttatcctttcattcagcaaacacatgtgttaagcattgttctaggcacaggagaacaagacagacaaggtccctgtcctcataacgtgtatattacagtaggagagacagcaaatgaacatgtgagcaaatgaacaaacaaatgtattcagagagagaaggatataaagaattaaacagagtaacatcacatagaggcccaagatggggcatctttacaaagtgtggtcagagaagaccttgctgaggaggtggcattagtgctgagacctgaaggagaggagggtagaggaagagcatccagagggaggagtcaaagcaaaaccaggaatgaggatgctgtgtccaaggagcagaaagatggccagcgtggctggtccatgtgagtgcaaggccagagtgggggatgggggccacatcagtgcaaggctctgtcaggcagagttcagatattgttctacatatcacaggaagkcactgccaggtcttaggcagggagtgacatggcctcatgcgtttccatggcttgagtaagcctcagaacacagtcaggagaccccaaagagtttgtgcctgtttcaggataatagaccatcccccaaggctgggtctctggggggtgtgcatgtcaaggagggagacttgtgtgcgaggcagcaccctcaagtacagctcatgctgttagcagcagcatgcagtggyggttgtgtagaagagaacaaaacaccagaactttagtgcagctcaggaatccttaaccttatgtggctctctgtgggttctaagtctcccttcagaaatcctgtttcagtgttgccacctttcctagccatgagcctaagcttcagatgcacaacttttcttctgcacatcagaaacakgtttgccttcttcctttcaagatgggtgggtgttgttggttttctcctccatgtaaacaggcagcagcagaagtggtcctgacccagatgccctgacagcttttcctggtgtgattttggaaggtgagatttgcacatcatgcctcacattatcttcttccacagcatttcaccatccagggcacatttggaacatttggaagtcatgagaaaagagcaaatagcttggtcrtcyctaagcagtgaagacggtgatttatcaattcattaaagcattgtcattccatgcatgctgcattgtaaccccttccgttatgcggaatactccgacaaagtggtgcaggtgggaggtggcctagcaggtgagcgagagagcaagaaagagagagagaaaggaaaccaggaaactctccagaggctgctgcgtggggtacggcattttctttctgcacttacctggcaggattaattatactttctaccaacaaaaatgaacctattaaggtagaaaataaaatttccccacccstaagatgccttacttgcttatttgttggggatctaggtcagtgaaagtaggtgagatgagagaaatcatctaagaaaatgaacctcaaggggatgaaaatgtgacagtctgagcaagagggtaattagacagatgaacagaccaaccaacagggctagtctgtttctcacagcaccatctccagatacggtgggaactctttaatgcagatcttacctgctttgtacagtggatatatttctaaccactttaaggcgattagatttttgtaaaccaaaaaaaccgcaatactttaaagagtttttatttgaagaaatagttggtagagataatttttgtaaacaaataactatcagattttatgttaatttagcccggcatctgtattggaagaaagacactgttttgaaggtgaattccgcatgcagtcctgtcaattgggaatctatttggaaacatattttcaagctttgtgtttcatcctgtcttcttttcctaaagatctttagaagtgctgcacacagtgaacctccttaatcaygtattttctcgcaacctttctttktcttagaaccacagaaggttagagctgggatcacaggaggttagaattggggaaccttasaagccacgagtctaattcttttctaacagctgaataaactaaggcccaaatgtctgagcttattttgtttattttcccaaaccatctccaaaaatgtttatggacattgaagaagactgtattgcaatgcaattccttgacaagtcatttctccctgtacctgtcaccagccatgtgggatgagacagcacattgtcattgcatattctttattccattgctagcctgccagacactcttatgctgctgctttctaggtttcccaacccactgattatattgcattttggatkatttctcccccagctgccttcatttgcatttttctgaaatcaaatctcattgtgataatttctattcatatttctaacctctttggatccatctgtgttattcctctttcctcaatgatgtctgcagcacctcctaatttagtaccartcagaaatgttattaacaaaatgtgtaagccttgttcccagacattaatgaagatacgaaatgaaacagatctaacagacacagtgaggccttctgttagtggcctcttccccacccctttattagatattgaaytgtttttcatcattggtccttgtttatcaaagtccaggcttttcaatcatcctgttccaattcccattaatgccagccagcgctctcgtcacgggattatctcaggaatgctgcctcaatgccttatcacrctccaaagatacaatgtctacaggagtcattgaatcagcagttttaattaatgataatatttattgagtttcagatgccaaatggaaatttctagctttgcttttaaaaactctttcagaaggcagaagcatttgattatttttaccttcttccatttgaatatttcatagcttttcatgtaaatctgctgtttaattaccactacatttaaaagtgcataagccactatgtgcttatgaagaacacaagtaatatctaagaagtggcccttggatgaggagcttacaatctgatagagctggctagacttgtgtgcaataaagactcttataaaaagacaatgtggagttaaattgctcaaaagtgtcacactgacttttagggctgcagaaatttgaatatgggctaggatcattggacaaagcctactgcagaaggggagatttgagctgcacatgaagaggatttgtctaggcaaagaagaagaggagggtagggaaaacatctgagcaaaggtagggagagaggaatgattagaacatactgtataaggtcacagcatagttagaaaatcacccagattgaagaagtaagctgacagggtatagtgtgttacaaatctggytacccatgtgacatctcttattggatgtcctaacttaggcttcgcaaactcagcatgccccaaatcaaagttgtgactctaccttctcaccgaaactgttcttctgttcttctcctagctttcccaccagaagtctgggtatcatccatgatttctccatttccctagttatccctcaccaatttttaagccartcccttcagttctatcactaaattacatcttgaatctgcacacttctcatttttaccaccttttagttcaagatcaacttttttcctaggctactgcaaaagcctcctgaactggtcttctgattcaatgcttgcccctctctatattgtagccagagagagcttattggaaattaaacgactctccagctaaataaataaataaatatttcagtggcttagcattgtatttggaatgaaatccaacctcactgttatgttctatggggccctgcgtgatcagggccttgcacaccagtcctctgtgtccaccccaagttggtgtacttcagtgtaattctgacactaaccacccggggttaacatcagatcccacaagttaaaggctgagtgctccacatggctgtccccacttcagacgcctgctgcaagggctgcagaacagtagtggggtccccaggctacctgtacttctgaatgaccagtgataagtttgggggtttccacaatctccttaggtttgataattcactagaacaacatgcagaactcaggaaagtcctatacttacgattacagttaacccttgaacagaatgggtttgaactgcgcagcttcacttaaatgcatggattttcttctgcctccaccacctctgagacagcaagatcagcccctcctcctctcagcctactcaatgcaaagaagacaaggatgaagacctttatgatgatccacttccacttaatgaatagtaaatatattttctcttcttatgattttctttttttttctggatctgcagagttattgattcaaagttgccacatggtgggggtacaaacattcgtcagtcactgtgcatgcaattggtgacattttaatttggaggcaattaccaccacagatatcttctttcattaaaaaataaaataaaattttcaaagcctcttacaggccaaaggtctaagaacaagatcctcactgaaatactcaagagttttcctgaggaaaactcaggaggtggaaacagctttgaacattttcccactggccacagcaaataatgctaaagtcataaagctttggcactgacagcgtcaacatctgcatgggaagtggcccctccgcccagcagaagggaacatgatgcctgtgggaaccgtgggcaagcatctgagaactccagggcctggagtcagcacagggctgctaagcacggtgtgggcttgtgttaaactgaaaaggtggggagtggggatttggagtgaccagtggttcccaccagtcagaggcagcagactcagaactgtgggacccaacatgcctgggtggacagtgtacagaggacggtggcagaggcgcctgcggctaggctgctgcccatgctctggaggttgcctcggacccaagagcccaggacagcagtagcagagtgtgagatgggccatcccagcagccagaccctgcatagggtgccacgcaccctgccctccgcattccctcttgtgactggaggccacctctgtatcctggacgatgggcatcaaagctgtgtccggccggtgtgtgcaatatccagagtaaaaggactcttcccaaatggagtcctcttcagggaggtggcagggctgtgtctatacagcctctgccctcagccccctcagccttcccatgcacccaggaggacctctgtgtccgtctgggggaccccagcactcagaaccagaggctctggctggaacacccctgagcttgctctggacaatgcccagccaggctcggacatgggcttgcctctcaccccaggggtgttccaacacagagccccttagaacataataatgaggttggatttcattccaaatatagtgctaagccactgatttatttatttatttatttattttgctgtagagtaatttccaataagctctctctggctacaatagagaggggcaagcattgaatcaggaagaccagttcaggaggcttttgcagtagcctagaaaaaagttgatcttgaactagaaaaggtggtaaaaatgagaagtgtgcagattcaagatataatttagtggtaggactgaagggattggcttaaacattggtgagggataattagggaaatagggacaggcaatgagagatgtcacaccagcatcttccaggaagaggccagcctagaagctaggcatccagaccccactgctgggcaaggtcaaaggcaccggagctgagtatcaggaggcactcattctgcagacccttgagatgccaactctggccagaaaacccagagcacaggtgccactgcatccctacaatcgggagcagagcaaacccggccctgccctctgtgcctacctcactggttagaagaggccacccccatccaaccagggtgtctgatcagggtcacactgagtccaaagtctctgctcccaggacttgcagggtctcctgatacctggtctcctcctcgcttccccagccccagcctcaaggcttgcctgggtccccctggckcgtggatcctacttatccccagcttcagcctctccctcagggaagccagcttgtgggccaaggcagacctgagaggttggggccaggatttgaataagattggagaaggttcctgagggctgctgttcctcagcggactggagtttgccttctggtgtgtttatgaacacatctcaggttcaggctgggtggtttttgagaggaagtgggaaaagacacttgccttttccatcaccttaaaatcaccggrgacccagcccttgagtgtgaaatycactgtggcaccccccagcagtggtgagccaagtgtcggcctggctgccctgagagccccacgcagccgctgatggagaacctgacacgggataccgcctctccgctcaggggctgcgatgcctgctcccgacgtagggagaacaggcgccagctggcagtcacacatctttttcctccgtggccagctcagaagtgctttggccatggtggggtgtgttgtgtggggtgctggcttctcagggtggtgggtgaagggcacccctgccccaggatggccaggtccaccagcacttgcagcaggcgcagaccaagaactgcatgggcagctttcagcaggaagtaggtggtcccgagggcactgcccttgtcctcatgagtgctctggatgctcatgtcctcaggacccrtggcagtggttgcagtagagctggggcaggtccatcatggcgtcggtcagcatggccaggaagcccagagtctccacaaacaggccccaatcgatggacgagtcctgatctaacctaccatgccggcaaaggccaagacacactccacatagcccaggaaactgctccagtgccaggagtggtgaagatccaaggattttatgcttagctcctttgccatgtagatctcagggcagagtttcaccatcagcaacakggacaacatgattatgctctgctacaagagaggtgactcaaaatgccttccaaaccagaagaatgtctgtaaaatattaggcaccagtaacaccagacacacctagctagagaagccatcggtagtctgagtcctctggatgtgactgcactgcgggatctacagcaccacccctccaaagaccatggccccagcttccctttaggaaaccagctggtgcaagggcatcagaagcccatctaggtctctgcttctatccggaacatttgtgttgccctgttgggcagcygacrcccacctctctaatcacatggctggtctttctggtgatctgctcccatcctgaggctatctaggggcccatgaaagtcacctctaggataagagttgtggaatttcctatcaggaaattccaagggtttttaaacctctgtgccaagaaccaggcasaaagaccagatatattctttattatagcataatgtgtcttagacctcatctcataccaggcttgtcctagcaccatgctacctacacaatggccttttcttagttcctcgattgttccaagtccttccctctacctgagacaattcccctctccctcccrcacttccacctccaactcctctcaacctgaagatgacccagttaagaatggccttgctggccaggcgcagtggctcacagctgtaatcccaacacttggggargccaaggcaggtggatcacctgaggtcrggagttggagaccagcctggccaacatgatgaaaccccgtctctactaaaaatacaaaaattagctgggtgtggtggtgagtgcctgtaatcccagctactcgggaggctgaggcaggaaaatcacttgaacctgggaggcagaggttgcagtgagccaagatcgcaccactgcactccagcttggatgacaagagtgagactccatctcaaaaacaaaacaaaacaaaacaaacaaacaaaaaaacaaatggtcttgcctatattaaggtcctcctttgttcagctcctttattggcttcacagctctaatcccagtctaaaattatttcgcttatgttgacttcatttactttatgtttagtatttgtctcctcgataaactataaactctttgaggacacagcctcaattgtcctgtttgttctttatcttctagtgtgtaccggtcagtaaatatcagtcaaattaaaggataaaatatgggaaagataagaatgagtccagtcaaagaaacctgtctgattttcaagaagaagaaaagtttagattttataagaaaagtaatacacagagattgtcaaataataagcaaaagaatgatagattttggggagtatgaatggaaagaggatgttaacagtatgccgaatgtattgtggrgaggaaaattactataagtgggaggcagttagaaggttattacagcatccaagtaaattgataaaagcctgaacaagggtggtagagtagaaatggagtggaaggggaaaagctgagattataaagaagagtgcccatgaaatttttgtttttagctttcacttttattttgaaataattttttcagatcttttattttgaaacttagagaaaagttgcagaaaatcatgagcttgggtatagccttcacctagattcaccaactcttagagtactgctcatttgctttattcccttgctctttcctctgtacatgcatgtgcattcttacgtgttctttttttatgaatcatttgggagtaagttrtagacatcatgcccctttattcccaaatacctcagtgtgtatttcctaataacaaagacactttcacatagacagaatacacttaccaaagtcagggatttaatgttgtatccaggattctataatagttcagggtccaattgaggattatgcattacaatgagttataatgtctctttagattccattcatctggaatagttccttgtttttttaattttatgccatcaatatttttgaaatgtactggccaattaagttgtagaatgttcctccatttgggtttgctcatgttacttcataattagactcaaactctgcatttttggtgggagtactacattagcattcttgtgtcctcctcagcattgaaaaagaggcacatgacatcactttgtcacattattagaggtatgaactttgatcatttggttaaggtggcatctgctaagtttctccactgtaarattgctatttttattttgtaattattgaattaatttatgcaaagattatgagcctatatgaatattttatcttcatcaaacttttacccaatagttttagcaaacattggggattcttgcctgactcagttattgccatgacagctgcaaaatggtgattttgtaactctattatttcttctacatttgtcaattggtattttactgtaaagaaaagtttgctttttccaatgtatttatagcccatggactgttttttgattacatggattataatccattactgtcattattcattttaatgaccaaattaccccagtttgttcagtgggaggcactacaaatgcctctttttttttagtatttagaaaaaactctttctttttagtgtggtgtcttgctgtgttgcccaggctggtcttgaaatcctcagcctcctgagtarctgggattacagatgcacaccaccacacgtggctcctctgtcatttcgacatgccccatcattttttaagcacttcctttccggcacaacaaaatatactgagctccccgtgtacttttcctaccccagtcctggcaccagccatttctccacactcctgattccttttagtggagaatggtattttaaaaacaagttgtgggaactaaatatgttcattgctattgggttatcattgttttctaggccctttcttccccctcaatttttaactcatggaataaaggagatctagttcaggagactagaataatggtcacatcactgaccaaaarccctccaaagcccaaattggaaagatttccagaagaccaacttatttgccaagatgactgtctatgccattttaaaagtatgtgttaaatatgtggttttttaaaagtgaaaagtcttatttgaatacattctcgttgttaagagatttaaacaaaagagtaatagaagaaaatatgaaacatttctttcctttttttcaaactttaagttttattggcactttttaaactactaaggttgacttttcaacacttacccagcttctaagacctatgtagaccaagtgccacatgaaggcaaggcagcaggtggcaacttgtcctctcaaagccacaatttgccaggtggtgtggactgctgccaggccactcttggggactttctgggatattcttacagattagcctattatctggagagaaataagtactgaccccgtatcaacaatggggaaagcacccaacattgtttttcactgtttgaattggcgtctgaactggaggagattaagtttagaccccagagacagagataaagtctatctctagtaagccttacagtttctaaggagtggagccaccagtatctttttctatttgaccctcttgatagaacagctcctttcccagaaaggatgccattcagacacacacacacaccacacgcacgcacacgcacatgcacatgtacatgcatgcatgcacacgcatattttctactctaaaacctgcctgttcaagctgacatgttgacatgttggtcctggtttctttttcactactgactggaaacaaagatgtgttatgaatacaagtggaattccctttggctatgttttgagactgcttgggaagttttttgttctggaactttaaacagccacaaaattgaattaagggatagcaaaaccatcttggtgtctggttgggagcaagcaactgtttccagctaggctaggggaaaaccaatcaatgattctggtttcagatctgctgaatgggacaagctaaatgctgtttacatttagccttcatcttgctaaccagtggaaattatgtgggccttaatagacagtgtcctctgttgccatttagatgactagattcgagaatttattttgaacataaaaggaagctggggagtagttctgaaggagcaggttgcttcatacctcttttcggtggactcttgagattgatgacctttgctcaagtcccagataacactcaaaggctgcgcgtgggagaaaaatcacctcatggtcaatttcartttctacagtttcagtggagaccccacttaggtatgttatcaatcatggatagtgaagtaatggaggcacaaaatacagaatgggttcaagcgagggcactgccacaccacttgacgtgtgattggttgattagttgctaacgagaataaagatagaagaaggatgacataaaggtgtattaacagactggattgccagatgaatcttaactgcttcatcgaggagaagctgggttgttttcattcaggaatatagaaatgttttcaaaaataacttgtttctcctgtattacaaaagaataatctgtttattataaaaatttacaaaacacagacaaaataaaaaagagtcacccacagtcccaattcctagagagaaccactgcaaacagtttggctaagatacttcttttgtttttcccatgcttaaacttatattttttattaaaaatggattcatagtgttttgagaagtacttttcttctttctttctttcttttctttctttctttcttttttttttttttttcttgtaacaaggtcttactctgttgcccaggctggagtgcagtgacacaatctcagctccctgcaacctaagcctcccaggttcaagcgattctcctgcctcagccacccgagtagctgggattacaggtgcccaccaccatgcccagctaatttttgtacctttagtagagacagggtttcaccatattggccaggctggtctcaaactcctgatctcaagtgatcctcctgccttggcctcccaaagtgctaggattacaggtgtgagccaccctgcccggcgaagaagtacttttcttttaactacttttaccttcatctttctaggtcaatactacaatagcctttttttgttaattagtttttaatacaacactagtagaattctttctaataatttcagagtataggatcaagcataaaagtatttctcctcattcctacctcccaatttcattcccatgaggtaacactaaggctttttctcttactatttctttcatgtatatataagcttttattgtatatgtatacacacacaagtactatttaattaatttatcacaaaatatttaatcaaatcctgttatggggaaatgcagggtctttccaagtttttattgcagttagcatccttgtggttaaatctctgaacacaaccatgatttccttaagataaactccagaaartgaattgttagatgaaaatatatgcacaattttagggtttttgatatgtagtgctcatttgcccttcacacactttctgcccatttcacattctcaccagtaggcagcattgaattcktaattcttcaaacttttaaatttgaagtataatgcacacattgaaaagcgtacaagtggctgggtgcagtggctcatgcctgtaatgccagcactttgggagactgaagcaggaggatcccttgagcccagaagtttaagaccagcctgggtaacatagtgagaccccatccctacaaataataaaaaaattagctgggcatagtggcatgtgcctgtggtcccagctactggggaggctgagatgggagaatcgcttgagcccaggtagttgaggctgtagtgagccataatcacaccactgcactccagcctgggtgacagagagagaccctgtctcaaaaaaaaaaaaagtgcataagccatgagttagacttgcactgctcaatgtggtagtcactagctacgtgtggctactgagcacttgaaatgcggcaagcccctggaggtgtgctacaagtgaaaaatctctaagacttggtacggaaaaaaaataatgtacagcatctcaataatttttatactgattatacattgaaatgataatatttgggtatgttacactaagtaaaatatattattaaaattaattttacttgtttcttttcactttttttgtttttagtttttttttttgtttgttttgttttttgagacagagtcttgctctgtcacccaggctggagtgcagtggtgtgatctcgctcactgcaatgtctgccttccaggttcaggtgattctcatgcctcagtctcccgagtagctggtattacagccgcgtaccaccatgcccggctaatttttgtatttttagtcgagatggggtttcactatgttggccaggctggtctcgaactcccgtcctcaggtsgttcgcccacctcggcctctcaaagtgctgggattacaggcatgagccaccgtgcccagcctcttttcaccttttattttattaattttttctgtagcccaagttcaatcaagggtcatttcactttttagatgtggctactaagaaaatattagttatattatgtggcttgagttatatttctattgcaaagtaggactatagtatggcgtctctgctaatgaagcctaccacctgagctctacactccggatttgttctgttcctactcctctctcgctcgcccacctacctgtgcctcatttatgcccagcgttcttagaactaatgtagctcccttcagtattccaattttttatcaggaataatcaattaacatgtggtgagagtgcacttttaatggattgcagagtaagactgtgatctactggaacctacaattcagtataaactctaagttgcaaatttaatacaataatttggtaattgatttgtttgaatgtttaagtatctaagcttcaggaattactgctgagttcaacatcatgtccctaccagaatatgtacatggaacatgaacagacagattacccatacttgacagtcagttcatgatgggcatttgtcatctctgtatgcctcaatattgtttttgtttcccgtgcagcaaaggtgatggagtggcacacatagttttagacaagagctatcagcaccatgcaaacactaagaggaagagagattatcaggataccgctgggggtatggcttccagtacagttgatctccattcactccccgcctcccaaggttgagatggttgggccatctctccctcctcattaatcctcagctttcccctcttcttgttgctaaagcacatactgactgtaccaaaatgagctctaggtacccaaaccttttcaacacaaatgctattcacaggtaggttctttcccctacccacccactcccaatcactccagagcagacaaaagtgcaggtaagtagggaagaaaggtgattgattgggtgaacatataaatcttgctccctttctgctctattgttgatgcacatcttgttctttaatttctttttttaatttatttattaccaagttcccaagaactacaaaacacatcttattctttgagtcatttttcactggactcagctttacacttgaaaacaaaacaataacaaaggattaaaaaatacatcttaaagtatttttggcttcattatgtgcttgattatttggaatgtgcttcattccactgttatacttgcttcattccactattgcagtcaggtagcttctgttggaaaggtatccaggtgaaaggaatgaaaataaatatctctgtttgaacttttcttcatcatgatgggtcttttcattgttgttgtattataattaattttgtgagaataatgtttctagctatttgaaactcttcacttagagtttctacaagattgcatgrcattgaattaaacagccatgtattagttcattatcacattgccataaataactacctgagactgggtaatctataaagaaaagaggtttaattgactcacagttctgcgtggctggggagggctcaggaaacttccaatcacggtggaaggtgaaggagaagcaagctatgtcttactatggtagagcaagagagagagcaaaggggaaactgccacacacttttaaaccatcagatctcgtgagaactcactcaatatcatgagaacagcatggaggaaactgaccctatgatccaatcacctcccaccaggtccttccctcaacacatggggattacagttacagatgagatttgggtggggacacagtgccaaaccatatcaagccaatataaccttttaacaagatgaaagaaagttttcyataaaagatccctccctgcaacatttggagagtaagggaaatattttgttgatggaaatgtgaactgagaaccaaggaaatgccatcttagttctattatgttttgatttgttggatgaacttatataaatgtcctctaagctttaattttgccatctgtgaatgggggacagagtgttctttctatgtcgtgttcacatgggcactacaataaaagcaataaactaatgcaaaaggaagaaattatttcttagaccacagcagtcttgattgacatttgaaattattttacacctccaaattctgtgattctaaataataaaatgttttcactctgtccaaccaccatgtttaaatacactgtaaaatctaaagacctctttcatattacagtaagccaggctataatttttgatatacataaaccgccatgctcctgytttctctctttatattcaaagctgaacatatgcttgtcggaactttctgcytcctttttctctcccccaaaacccaaggattaggtggatttttaaaattttcgaccagcctggccaacgtggtgaaatcccatctccactaaaaatagaaaaattagctggatttgttggcgcacatttataatcccasctattcgggaggctgagacaggagaattgcatgaacccaggaggcggaggtttcagggacygaagatcacaccactgtactccagcctgggygacagagcaagagtccgtctcaaaaagaaaaacaaaaaattagctgggcatggtggcatacacctgtagtcccagctacttgggagactgaggtgggaggatcacttgagcccagacggtcaaggctacagagagctatgtgattgcaccactgtactctagcctgggcaatagagcaagactgtctcaaaaaacaaacaaaaacaaaacaatttcttcccttctcatcagaaggatgaagccaatctctatgaaatggtagactcctaatgagaacattacccagtattgaatattatggtataaaatattattactattgtcataatcagaaaaggctaatgtaatataatacttaaatttatttttattttcagattttcctatcaaaagcactgcttcccaatttaattcatcttctcaaagttttgaaagcatcatcagatttaaaaaaaaattagtgtaaaaaaacgtctgtagatctcactgactcattgctatagctaaggtctcattaattgtaacagtgaatgccatcaattcttggcccctgatagctcagcccctgacaccctcccgtgtctcccattatgagaagtccaatagggtgtgctccccacatgcactgagccctacttcagctctgtgggctgggcagactctgctggactctgctgcctgtccttctaggggcaccagagtctgtctcagggctccagtgagtgctgccctgttcctcagccactgctgcctctccacttggtggattgccaatacaccaggttcccaaggagccaaagttgtcccccttctgtttctgttacactctgttagagcagtcctaaaatgatgccactggtgccttggtattttgcagagatttggggaagtagccatttgggtttttttaawctrctggcttcctgatctctgtgagtcacacatgaagaacaccaaagtgaggagagaggcagagacatctgggccaagaaccggcaccattcctactcaggactgcccctctcttatgacaaccaagatttcatcctaagaacatctctccctcattttttttaacttttaagttcagaggtacatgtgcaggttagttacataggtaaacgtgtcatgggggtgtgtgtacagattatttcatcacccaggtattacacctagtacccattggatatttttcctgatcttctccctcctcccaccctccacccttgatagccccaggatgttttgttcccctatgtgtccatgtgttctcatcatttagctcccacttgtgaggacagtggtattcggattactgttcctgcattagtttgctaaggataatgacccccagctccatccatgtccctgcaaagatctggacagaactaccattcaacccaacaatgccattactgggtatatgcctgaaggaatataaatcattctattataaaaacacaggcacatgtatgttcactgcagcactattcacaatagcaacatggaatcatcctaagtgtccatcagtgatagactggataaagaaaatgtggtatgtttacaccatggaatacggtgcagccacaaaaaagatctcttttttcttgayataaatgatctaggagacttcagtcgcccccaccagagctttccttcaggtctctgcactaattcacccaacaagcctgaacttcctgcagtgggtacgtcccacacgtaagctgagatccctgctaagtgaagatttactcttgttctgatgaaaaccactccagaccacaggggattgaacttgaggttgagggactgtgggttgaagacaggaggaaagtgaaaccagcagtgaggactggtrggggaggggaggctgggaagcttcccaggaggatgctcggcggtgcggttcctctcttcactcaggctctcattctctctgcagaatgacatcttcgagtggtccagggaccaccgagcccaccacaagtactcagagacggatgctgacccccacaatgcccgccggggcttcttcttctcccatattgggtggctgtttgttcgcaagcatcgagatgttattgagaaggggagaaagcttgacgtcactgacctgcttgctgatcctgtggtccggatccagagaaagtaagtgaatgggcatgacggagagctgtccctcaggggccaggacatagaaacagcacaatgaggtggaytcataaccccatagcgttcttctcaagcatttgccctaacaattttgccatatttataagatttatctctatttattaatttccttttgctcattaaattttgcccattggcacatttgttttgagttataagtttcatttgtaatggatttcctttaagcccagtgtcattatcttcaaactaatcttgcatggctgatttcatggaatctgtttctgtgtttccccactgccccattcatgattctctggagtagcagaaggggggctggcttcattttagtgacacacttgactctacttgactccaaaaggactgaactctctccaggtatcctactgtgtcctgaaattctcttgtagtgaaacctctgccctgcccatcactcatggaaacgttacactagtaggtttctgtgcagagaaaatgagamcattcaacagaaggcctcaaagcactcatatgccctgatggtgtcggctgagcatacccagtcggccagcatttgcaggatgaaactgctttctataagcacatgaagaaagagtgcctacaattgtgctggcaagtagagagcgacctttgttcttgggttggtctgggtctgcaaaatttggctgtgatgagcttgtagcacctaaagcaatagatttatgtgcaaagatgggcaacatatggaccatgctccagttagagccttgagacagcatgttgaataagtggttactagtgaccatctccactgatgggtaggagtcatctgaggacttacctaaacagaatctccttttcagactgaaaatggacatggaggctatgcctttgttcaacacaagaatctttgcatgaaaggaaggatggcttaggactgtgctctttccccccaaagcctctccttttacgctgrggggagcagtagagcatagtgagaaactggcagaccctggagacagactgctggaatcaaagtctctgactcctccacttactagcaaatgaatcaaccactctaagtctcagcttcatctataaaatgggagtaacagtaatacctatctcctacagcttttatgaagatatttttaaaatgcatggaaaatgcctggcacatagtaagagcttcgtgaatgtcagccattattattattacacaggcagttgatagactagagaattctctgtttccatcactgctttctgttggtttcactgtagggttttctctgtacatctcaatacagctcttttaggtgaaaacacccggtatcaattcagctcttttaggtgaaaatacccagtatcaagttttatagcagaaaataacaagatgttttctttctttctttccttccttctttctttctttccttccttctttctttctttctttctttctttctttctttctttcttttctttctttttttttttttttggagatggagtctcactctgtcgcccaggctgcagtgcagtggcgtgatctcggctcactgcaacctctgcctcctgagttcaagcgattctcctgctgcaggctcccgagtagctgggactacaggcatgcaccaccacgcccggctaatttttgtattttttagtagagacagggtttcaccatattggccaggctggtcttgaactcctgacctcaagtgatcctcctcggcctcccaaagtgctgggattacaggcatgagccactgcgcccagccaacaagatattttcaattaataattcaatgatttattgacgttgattttcactatgagtgtaaaatgttgaaggtcattagagaaaaagatgaaaaattcagagaagtagaaagaaaatcattcacagtcttaacagataaacagacactattaatattcagtagtatctctttctatttcatatattttgcatgatggcagtcgtatcgcatatgtaattttatgtctcaccctttacctcagattgtattgtagacaccattgtcaaaggctgcagaagattccatcagttgagcatgtcatagtttatttaaccatcattctgtggtcagctatgtatgtcatttccaattctgtgatacaaatgatgttgctatataattaataatactttgggacaatcagaccttagattaatttgaagagttcagatgagaaggcaaaagattttctgttttattaatgagaaatgagccgggtataatagtctgggtttctctgaccataaaaatggaagattttttttcatcttttctcataaaaaaatgttgtagtctgattcattatgtgtgtattggcggcacatatgtctaaagactatttctaaatgcaggaagaagaacaaagactatttcagcaagttccctgaatagtcatctgagaacatctttcatcaccagtccagtaactaaaggaggctgtggctatcagaaaccattcattcatatcatcatgtcacatgtatcattgagctcctgctgggaatcagtgctgaggatacagcttaaaattgacctcctctcagaactatagtttagaacacgttctaaactatagaggtcacccctagttgcctggtctagccccagaatgattaaggtagaggaatactgctctttgagagtacaggccaaacaggagagagatggctctggatcatgtagtttgcatgttaaaggcatgctcctggctgggccctttattatctctaagaattgcctaggcccaggaaagccaggctctccccaagcagaaaggcttttaagatgccagaacatcctaatatgtgagtgtgtgtttgtgtaatacatcctatgagcaaactagtaaaacgtagatagaggaagccagaagtacatgcatcttagattattcactcaatgttcttgtgattatactttactgtttgaaagaggctacagctgtcttcagatgtgtgggtgagcactgaagtcctgtggtaattatacagcatagagaacatagagatccgtaatccaaaataaggcttagaatcactgaactaaatgaagcaagtttccaacatacacagaggcagtcaactgttcagatattttcatgttcgtgaagctggctttaccggtcctgccagttagacggtggagaggagagtcctcacaggaatcaaagtcattatatgtggggataggagctgaaggggtggatcttggtgtcaggcaccgtcacagcagatctcagttcatgctaccctgggctgcatggagagcttcctgagtaacagaagaaggtgcccagctgcatttggggcccagacttgggtcatttcagtggcacacttctcatgggctgaatctccacctgctcttgtatgactttcctagaggaacagtccctattccagttggaggcaatcagaattcacagctgactccaccacactcccagggtgcaatgtttgtgcagatcaatcagctaagtgcctcttggagagtttactcaaacaggtgatagagactgaggatttagagactcctccttcagtccactcaggacactaacacagatattgcagttgattgataaacttttgctgagccattctaataacaacttactaaagaaaagcttggcagagaggcttaatcagctttccattttacagtctcatggaagagagaaggtaggagcaggaaagcaacacatttcaagctatacttccagaccctaaaagataatcttacgaaggctgtcataacaagtagttaactggactaaaccacattttgctgcactgtcaatgtgtaaattgtgtaaaggcagccattaggaggtgcaagggagagaagccagtggtattgcctttaggctctggcaactagggcccctgtcctaggtcttatgacttaaagggccacacttctctccacaaagtgaggagatcacagggccaaaggaacatggcacctgcctaaatcttccttgacttctgggccakgccctggattcctagggtcctagattcctccctaaatgctctgagctctcttctagagcctatagcagtctcctcctgggatctgttctcccaayaggaaatacatagagcctaggcctgaagagtggccaaggggcagtgttagcacagggacttaagttttaaagtgtgaggtcagatatccacctaatgggacagagcaaaaggggaaaaggaaaaggggtgaaccacaggctagggacttccacctatactcctagcttgaaacctgcaaatgttggggtgaacctatccgtgagccattcataaggttgagcgtggatccatcaagaattgtgtttggcttaaacaagacagaaggttatttctcttatatataaaagaattctggagacaggcagtccagggaggacatggcagcactgcagggtcagtagagaactgggattcctttatcgttctgctctaccatcctcagcaggggactttcattctcagtgtcatttcatggtgcaaactgatcactaaatctycaaccagaaggggaatcagggaggctgaagggagcacattgctgagttgrgtcggtcgcctttaaggagtcttcctagaagatacaacctatccacttgtctctcattgaccatatctgtacccagggaaacagggaaatgtattctcatggttaatgcgttggacccttgaataaaatcttggttttgtttctaaggaaggaagggtgaatcgatatggggtaaacaattagcagtctctgccatagccacacagttgttctgccttaagcagagcgatttgtcatctcatattcctcagtcttattttttgtgaaccaagtgggtagcctctctgtctccattaatgaacagaaactggaatctcaaatcatctttctcagatgacaaaatgaagataaaatccagagactgtttctcctaatgctttgcttattccattgagtcccattttagggaagacattcctctagaggttacatgtaaatgctgtcatgcatttttaaagtagacagggaggatgctagtccagacacataaaaacaaggtccttgccttattgccatggtgatgagataaactgaaagaaaatggatggaatggttcaaaagagcaaatcagttctgttctggtgccttgggaagagatcaaaatgtataaatattgccattccaggaagaaaggcactcaaacatctagaatatttttgaggcctgtttcacctcaattcatcccctagtctgttatctctagtcttctctcccacctcccaagaatgagcatcacatttctcagtgataccctcttttttgttgtttttaaaggctcattattttaaagagcagttttaggttcaatttagcaaaattgagaggaaggttcagagataccccatgtacctcctgcccacacacatgcatagcctctcccattatcagcattccttaccagagtgaatatttgttacatttgttgaacctacattgacacgtcactgtcacccaaagtccatagtttccatcaggattcatgttggtgttgtatagtccatgggtttggacaaatatataatgacaaatgtatccactattgtagtatcttacagagtattttcactgcctaaaaatcctctgttctctgtctgttcatcgctctcttcccccaagccctgacaaccactgatctttccactatctctatagttttgctttttccagaatgtcgtatagttagaatcatactgtatgtagccttctcagattggcttctttcacttagcaatatctatttgtgcttcctccatgtcttttcatgacttcatagctcatttctttttcgtgctgaataatgaccaaaatgtggtccagatctattgaagtttatttatccattcacccagtggaggacatcttggttgcttcccagtttggtaataataaagctagagtaaacattcatgtgcgggtttttgtgcggacataggttttcaactcctttgggtaaataccaaggagcacagttgtgggattgtacaatcacaatatttttagttttgtaagaaacagccaaactgtcttccaaagtggctgtatcgttttgcattcccaacagcaacgaataagaatttctgttgctccaaaatcttgccaacatttgttgttgtctatrttctggattttggccattctaactaatatgcagtggtatctcaatgttgttttagtttgtatttccctgatgagataagcttattgytccatctatatattttctttagtaagatgtttgtcaagatctttggtccatttttaaatcaggttgctttcttcttgtgaagttttcagagttcttcatatattttggataacagtcctttatcagatatgtcttttgcaaatattttattcctgtctgtggcttgtccttttattctcttgacagtatcttttgcaaagtagaaattttaaattttaatgatgtccagcttatcaattctttctctcatgaatcatgccctttgatgtcatatataaattgtcaaacccagagtcatctacattttctatgttatcttctagaagttttgtagttttgtgttttacatttagaattgtgatccattttgagtcactttttgtgaggtgtgtgaagtctgtgtctgaattcattttttcgcatgcaaatgtccagttgttccagcataatttgttaaaaagactaccttttctcyattgtattccctttgttcctttgtcaaagatcagttgactatatttatgtgggtctatttctaggctctctgttatgattcattgatcaattagtctgttcttgtgccagtaccacactgtcttgattactttagctttatagtaagtcctgaagtcaagtagtgcactcttccaactttgttcttcttcttcaatattgtgttggctattctgagtcatttgcctccacstataaaccttgcaatcagtttgtcaatatctacaaaataacttgctgggattttgattggaattgcattgaatatagatccagttgagaaaagcagacattgacaatattgagtcttcctatttatgagcatgggataactcttcatctatttagttcttctttgatttctttcatcagtgttttatgatcttcctcataccgatcttgtacatgttttgttagatttatacttctttcatttttatggtgctaatgtaaatggtattgtgtttttaatttcaaatgccacttgtgctggtatgtgggaaagcaaattgactattgtatattaaccttgtatctggcaaccttgttgtaatagcttattagttacaggaatggttttttattttcaattctttcagatcttctacaaagacaacacatcatctacaaacaaagacaattttatttcttccttcccaatcgatatatcttttacttccttatcttattgcattaggtaggacttccatataatgtcaaaagggagtgataagagggtacatccttgcctttttcctcatcttagaggaaaagtatatagtctctcacctttatgacattagctgtatattttttgtaaatattctttatcattgagaatttactgagagattttatcatgaatgggtgttgcattttgtcagatgcttttcctgcatctattgatatggtcatgtgatttttcttctttagcctgtaatgtggtagattacattaattgactttcaaattttgaaccagccttgcatacctagtataaatcctacttagttggagtatataattctttttatacattgttggatttaatttactaacattttgttgaagatttttagcatctggctcatgaaaaatattggtttgttgttttcttataatatctttgtcttgtttgagtattatggtgatacctcatagaatgaattaagaagtattccctctgcttttattttctaaaaaagaaattctctcttttagaaattataccagttatcatagagaattaaatatatggtcgaattcaccaaaatagaaccatcttggcctggttctattttgcaagggtattaattattgattcaatacacttaataaatataggcctatttagattgtctattttttcttgttttggtagattgtgcctttcaatgatttggtccatttcatctaggttatcaattttgtgggcacagagttgttcatagtatttctttattatccttttaatatccatgggatctgtaggggtgtcccctctttgacttatgatattagtaatttgtgccctacctcttttttcttagtctggctagaggcttatcaattttattaattgattcaaagaaccagcttttggtttcatttatttttaaaattgatttcctgttcataatttcatttctctctgctctaatttttattatttattttcttcttcttactttggatttaatttgctcttctttttttagtttcctaagatggaagcttagttaattgattttagatatttttttcctaacatatgtagtcatgctgtaaattttcctctaagcactgcttttatggcatcccacaaattttgataagttttgttcttattttaattcagtttaaaatattcttaaatgtctcttgagatttttttcttggcccatgtgttatttagaagtatgttgtttgatttccatgtattttggggttttccagttgtctttttttgtttgtttgtttgagacagagtctcgctctgttacccaggctggagtgcagtggtgcaatctcagcccactgcaacctctgcctcctgggttcaagtgatcctcctcctgcctcagcttcctgagtagcagggattacaggagcacaccaccacgcatggctcacttttgtgtttttagtagagacagggtttcaccatgttgtctaggctggtttcgaactcctgatttcaggtgatccatccaccttggcctcccaaagtgctgggataacaggtgtgagccactgtgcctggcctccagttgtcttttattattgatttctgatttaattccattgtggtctgagagcaaacattgtataatttctattcttttaaatttgttaaggtgttttttatggctcagaatgtgctctattttggtgaatgttctatgtgagcttgagaagaatgcatattctgctattgctggatgaagtagcctgtagatgtcaattatatcytgtggattgatggtgttgttgaatttaactatgtctttactgattttctacctgctggatctgtttgtttctgatagtgggctgttcacatctccaattataattatggattcatctatgactccttgcagttttatcagtttttgcttcacatattttgacactctgtagttaggtgcatacacattaaggatcattatgtcttcttggagaattaacccctatatcgttacgtaatgtctctctatccctgataacttttcttgttttgaagtctgctctgtctgaaattaatataggtactcctaccttcttttgattattataagaatggtatatctttctccattcgtttagttttaatctataagtgtctttatatttaaagtgggtcagtttcttgtagacaacatatagttgggtcttgttttttgatccactctgatagtctctgtcttttaatggatgcatttagaccattgatggtcaaagtttttattgatggaaataaattgatatttccatccaattgatatttgccatatcaattgatatggaattgatrtttgccatrtcaattgatatggaattgatatttgccatgtcaattgatatggaattgatatttgccatrtcaattgayatggaattgatatttgccatatcaattgatatggaattgatatttgccatatcaattgatatggaattgatatttgccatatcaattgatatggaattgatatggaattgatattccatatcaattgatatttaccatatttgttactattccatccaattgatatttaccatatttgttactattttctatttgttgcaatttttcttttttctatttttgtcttttattctttttctgccttttgtggttttatttgagcatttcttctcattgatttttagttttggaagtttctattcatatttcgtcaaactcagagattctttcctcaaccatgtccagtctacttataagyctatcaaaggcatttttcacttctgttacagcattttttatctctatcatttctttgtggttctgtcttaggattttcatctctctgcttatattgcctgtgtgttcttgcatgctacctactgtgtctgttacagcccttagcccgttaatcatagttattttaaattcctgtgtgacaattccaaggtccttgctatatctagttctgatgcttgctgtgtctcttcaagctgtgttttgttttgctttggtttttgccttttattatgccttataattttttcttgataactggacatgatgtactgagtaaaaggaactgctgtatataggtcttcagtagtgtggtgggaggtgtgtgggggtaggagatacattctagagccttgtgattaggtctcagtctgttagtgaacttatgcctctggactgtggactccacaagtgtttcttagtttcttctctcctcatttaggtggaacaagatggctagaatgggctggagttgagtattttccctcccccaggttggttaggctctaaataaaaccccagcaggtcaggctctggctaactagtttctcccgaaggtaggtcttgttaagaacagaatactctggtatatttcaaagtggctcttttcccctcctcctggtggaaatacaagggaatttattttttttttctgatacttactctgagaacctggtcaagctcctggaaggaaaagtcacaaaagcatgggggactccctatgactagatcccccttggagattttaaccttcagacttgtccatacctagcctccagcaattcatcaattaaggtcaggttttcctaacacaccactagttcctgtgaaccactccctatgttgtgattctctgtatctgcctgtctgtccaattttgggaacagtggttttccctgtaatctcacatctcttactaatctcagagttgttgactttttttcagtttgttcagcattttacttcttgttagaatgagtggcaacttctgagctcttcatgtggaaccggaaactggaaattgatactttccttttttttttttttaacgttatgtagccatgcctgtctaaaccctaagtgtatttctccattttgagcatcacatatctatccagggcagggtggttagacaaaacaatttttgactcatctttgcttctctaccccaccttcatcttctactttagggattctcartggagtgggatgtatcatctggggatttgcaaccaacctgactccatctcccttgactgaatccgttgctctttgatcatggttttatgtagggctttggggagtctctttttgttctcagtccatttgccatgaaggtccctctacctgttgctaagttaatagaacaattcctccctagatgttagtgcggttgagcacattcaargccttggttggttatctgtattttgtgaaaaactctgtagaaatcatctcaaaggagagaccctggatgatgagacatccaagcatctaaacatgtgtttggaatttggggagagacatggagacaggggcttttaagtacaaccatgctctgccactcccttactactcaattaccctgggtttggtgattgcctattttactcaggtaaaatactggtcctgcagcagggaaaccaaacttggccctaaggtaagcatcacttggccatgctgtaagcagagctcagctctttggtatcctttctgccagctcacagtttaataacagatgccatgaggcatgtggcattttctcagcgaagtcggcttctttctcttttctacatgtatcacttattcatttgacaactatgttttgagtacccactatatgtcaggygatgttcaagatgctgtagattgaacagtgaaaaagaaaataagattctggagagtacttgccctatctttctagagctccccagtttgggtctgggaatgtgggaagaggaaactccagcacacatctgcccaatgcctgactgggcccctctctctacagacacctttgctcctccccattcaatctctcccattactcaatctccgtcccactgatctgtttctcggttcactccctcttgtctatttgcctctttctctccctatagtctttgtcttttcacctgccagacagctttgttcctttttttgtacccttctctgcatggagacattttgcctcatctgtcacactgtgttcttaatgccatgatgttcttcttytctcacagttttataagagaacaaaagctgtttaacctattgctcagcaagactctttttgttgttgtttttggtggggaagtgaggaattttgtcctcttatattctctcctcacttcatcatcctgctttgatttattcttttcaaacattccttgtgaatgtaaatatttcctctccttgaatcttatctcccatttttgagaggcagtatatctttggttaacagcttgagccctgaagtctctgttactctgccctcacctcaaaccactacatcttatcctggctctgcaaaaattttgagaatgtccctgaaaatgacagctactgttaaacaaaaaaaattgagaataaattatttttttcctttgaataattctccctgcatccagctgtagttggcaaaaattaaaattctgaatcttccagtttcaagaacttggtaaaatcaactaaagaggtgtgaactgtgtttaattcgataccttttgttaaaagtaaatggaaaaggtaaaatatcctttaactacttttattaaacttttggcctttctaaagagacatggttgttgtagccaaacagctgaattatattctgggatacaagacagagatgattcaacattgaggttacagcatcaacaccaaaatttccctaatgtagtggttaaaatattgggtgggggaaaaatcagtgtggtacataattcaatagctttttatgasttttaaaaattttccaagtcaaaaatgtcaattttttttgcctctgtaagaggtacttttcctagtagagctttaggagaatttgcatgcgtgcgtgcgtgcgtsygtgtgtgtgtgtgkataaaaatacaccaactgcattagcagtcatttttctttccccactttgaccatcccatttctatgtgcaagaaattcccctggcaagatgaggagacagttgctcaaatttctggaacctgagtacttcactaactagcatggtaaacatattaatcaacaggtgtcaatggattctgggactgctgtttgtaaatattaacttaattgttgatggcaataaaggcatcctcatgcatctttgattcacttcagtagccaataatagctattatttttttaaaatatgtatttattttcccctagattgctatagttgctatttattaactgcttactatgtacctgcattatgtctttacacacattgtctcttatcctttcgataactctgtcatgtagatagtggtacctggaatctggacttgaattctaaatcttggcttcccatagccttgattaaccaagtcaaaagaagaacagtatatgtttgcactaaattattctttctttagtaaaatgctactttactaccaaagctaaggagaaaacctagctagtttttatgcaacatttaaatatttatgtagaagttaaagcaaggttaaattttacaaagatcttttgatgcaagtagataccattctcactaatatttagatattatcgattcctggttctctttctaggctatgtagagtaatcttttaatctacactggacattttctttctttctttctttyttttttttttgagacggagtctygctctgtctcccaggctggagtgcagtggcgcgatccggctcactgcaagctccgcctcccgggttcacgccattctcctgcctcagcctccsgagtaggtgggactacaggcgcccgccaccacgcccggctaacattttcttaaaataaagagactttcaaggaaagtgtatggctgtagctccagggcgtcacccagtaatcaacagtacttataaaaggtttttattcaatcgttattcatgttctaaagaattcaatctattattattggtttatgcatcagagaaaacagctcttcttgcctttttagtgtctcttcttttttcccatatggtaagacataaaaagtagagaaagttttcataacagaaaattcatttttagttattatttcctttaacaattagcttataaaatttctataaccccgcagctcttgaaatctgtataatataaacaaaatataagaataaaattacactttttagcataaaatgtaatataggttcattgtagaaaaatttttaaatgcaaatcagcatcaagattaaaatgaaataatttgtaatccttccacttagaaaaaagatcagttaaaattttgctgtatatttttctaaagttttttatgtatcaagctagctttttaaaaaagtatgcatatcctatatmctatgtaaaagtgattaaagtaagaaatataatttaatatttacctttattatttcatttccagcttctttatttttgtatgtgtgtatcctaatttccacttgatatcttccttctgcctgaagaacttcctttatatttcttgtaacacaggtttatgggcaataaattctcagcttttgtttgtctgaaggtctttattttaccttcattttttaaaggtatttttaccagacataaaattctgagttgtcaggttttttctcttggtattttaaagatgtcagtaccttgtcttatgccttacrtaatttttgatttgtatcattgtgtgatatgtattatccctctgcacgtaatgtttccttttttgtcactgacttcaatatattttatcttcagttttcagcagtttgattgtgatgtatctagattcattttttttttaaggagagaggtattcttgggactctgggcttcttagatctgcaactttttgtcwttcattaattttggaaaattcttagccattatatttaatttttttaacctgtttctstttttctttggaactctttttttttttttttttttgagacagggtctcatcactcaggcttcagtgcagtgacatgatcatagctgctaactgtagcctcaaactyctggctcaaatgatcctcctgcctcagcctcctgagtcggactacaggcacayaccaccatgcctgattaaattaaaaatawawatatatatatatatrtgtgtgtgtgtatatatatgtgtgtgtgtgtgtgtgtgtrttatacatatatatatatatatatatatatatwgagagagagagagagagagagagagagagagagatggggtcttgctatgctgcccaggctggtcttgaactcctggcctcaagtgatcctcctgccttgaccttggcctcccaaagtgctgagattacaggcatgagccacaatgcmtggcttcttctgggactctaattacattttattttaaagcattttatgttgtcccacagatattggatgtgcttcactcctttttatctttatgttttggcttggataatttctattggcatatcttcaagtttactaattctttcctcagttatgtctagactgccaatgaacccatcaaaggcactcttcatttctgattttgtttttatttaccagatttgcattagacattgataaaatctcccatctgttcatgcatgttcaccttttccatagatccctttaacatgttcattgcagttactttaaagtccctacctgatagttgtaatatccaggccatttctgagaatggttctattaattactttatctctggacaatgatttttgttcccccccccttgcacttttgtgtgactcaattttaattgaatgctgaacattatttctgtaagaacagaaagaccaaggtaaatattatttatgcttgagcatgggcacatctctttttctttcagaccttcagtatgtgtgggtggaagaggttggggttgggtcaattaatcagaagttgagctgagtttagattttactgctgctattattatccttagtgcaccacagrcttcactggatggctacccttactacgtgcttagagcctgatgtgccagaggagttttctaagtattcattctgtaccctcggcttttagctgtccctgcacacctgtgtcacaaagtagatctttccctatgctcttgctcctacacawagggtggacttctgttgtttgtgtctctgtgcatggctgtttataagagtagagggtttcttcattgttctggtccagtatcagtcttaggcaasgctcctgtgcctgaaccttggggtcaagggtttcttagcattcctgcagtagccaacctctgctkttgagcagtgcaagatcctgggcacaagcaggtttcctgctcttcctcaaaggggcagaagatttttgcttctgtctctccctcagcagcaatgtttctttgcctatgtctgggggtgagggtttcccaacacctctcccagagacaaacaattttgcttcagttgctctcccagagcaatatacttttgcccagtcctaagggccagaaggtgtctgtattcctccagcagcttaaacacatttatgcctagtgttccattattggaacggtaagcatgtgggagttatttatatcctgctgctcaaggtcatcaccaaggtctgattgcaaaaattcaaaaamttgcaacctcaggcataaatgggttaagattttgctttgtaagagagggccctggggaagaaggcaaggctttgttcttgttgccagtagcagctgatcagctcctgcatgtctatgtggcagagggggtcctgggtctccactctaccctgtccycaaccttccttgtgagcacccagttaggggccctaaagaaaagcttgagtgtgaatacaaactcytttgtgtccgaggcttgaggctatcccatattgaccttcaagaattttgttaaatttttagctracttcttcttatctacttgtgtggtagccatctctttctccttgctttgacaaaagtgaagccattcatattcatgtgtactgtctctccttggatgggtttatgactctttggaattcagattacttagttgccttgtgaccttaactcttgatgagttaaagaaaagttatggttgtgtatattagttagctttttctcattgtcgaggtgacagcaatattccctagtgactttctacatctaagcagacacagaactctgcatcctattttatagtctgcatttttcatctaacagaatactgtaaaatctttctagtttaatggttgcttaatatttcattgtgacgatgtatcataattatttttcatgaacactgaaggatttctaccatgtgtgtttttttttttttttttttgagacggagtttgctcgttgcccaggctggagtgcaatggcgtggtctcggctcactgcaatctccgtctcccaggttcaagagattctcctgcctcagcctcccaagtagctgggattacaggcacccatcaccatgcccagctaatttttgtatttttaggagagacagggtttcaccatgttggccaggctggtctcaaacttctgacctcaggtgatccacctacctcagcctcccaaagtgctgggattacaggcatgagccaccatacccggccccatcttttttttttttaaccattataataatggtatgatgatcaacttggtatataaatctttgaccacagctatgatactttcctttagctaaaatcagaattgccaagtcaaataatacatagaactcttggctttttatacctattttcatattaatttcaaaatctttgattacaattttatgttttgggccatttgtagcattgccttttaaaacagatagctgggcgtggtggctcatgcttgttatcccagcacttttggaggctgaggtgagagaattgctttaagccaggagtctgagaccagcctgggcaacatagatcctgtctctaccaaaaataagaaaattagctgagcacgatggcatgtgcttatagttccagctacttaggaggctgaggcaggaggattgcttcagctcaggagtttgaggctgcagtgagctgtgattgagccactgcactgcagcctgagtgagtgacacagggagaccctgtctcataaataaataaataacatacactgttctgttcactacccatggccaaagacaaagacactgtctcttcatttccctccttttttgttggagagaaaaatctgacacagtggaaacgtccccacgtccctgtccagaaccctgccacctctcagtggaggaagaaggtagaatggtcacaaaatctggtgtctaggtaggtgaattaacagatggggtgtgttgcgtatttctcatgtttactctcttcagctctctgcgctaggacatatgactccataattcatgaatgtcaccttagtgctggtttacaacctgaaagtctctttttctaaagaacctaattaatgctgggctagaaagagagtggcataggagaaaaatttgtttaaacaagaggcatctgaaggcataaatgcatgtacttaaggcaagacacggagtgattagctagaaacacatccattatttttgctgtccaaattgttctttccataagatgatttgtgaggttgatgtccttgtgacagcaattttctgaaaatattaaataaggctgagtcccttttaaaaatcaagagcatgattcatacatatttgtgaaatgtaagtaccttttctctcttactgctgcaaactgctgacagcaatgtattatgrgacccctcgtcagttgacrgttgaagtggaaatattgttgtaagtaatgaatttgttgatagctgttccattacccagaatgaatatttagattagtcatgtgcaggctgtcatgtcagagctaccaggagcttttccttttatctaatttactcttaattcctcagtccccatctcaccatgttatatcctattgagtgtgtcaagggatgattagattgagagatgcaaggttttgttattgacacaatttctacaggagcactagagaaattaaacccttgctgaacaaacctgggtggaactctcagtcattttctttattttttatcagtacacagcacatccagaaasaaggaagagctctcaatcaagaggcagcgtgtgagatgcttcgtgaatggcatcaagggcatatattgaaagtcacccttcccggattacacattttagctttgttacatactcattgtaaccactcygaaaagtgctgcttgatgmtgcgtgctctttctgtgtccctggaggtattctgaaggtcagaagagagatatacaacagcgaggcttggtgataacgtatagaataacagacggggactccacacccaggccttttttaacggtgtgaagcatagacagagctgcagtctgtgctaacattaggttatttattgattcaatcagttgacacaaggaggcagctacggggaggtaaaatatggtcctaaaatcaaaaagatttcagttttgtcattctgtctctgagattctatttccacatctagagcagggtaataatgatacctaccttayaaaattattgggagaatacattagttaatatatgtgaaagtatggaggagatgtgcaataaatatttgtgttattaactacacatacagcactctataggagatattccatttataaaaactttaggttctaaaaasctgtacacgttgattatttttgtaagtcaaaagtgattaagaggagtttaagctatcatttccagatgtatttctataaataaaaacataagtatattcagttgatttggggtggagagttccatagatgtctgttaggtccgcttggtccagagctgagttcaagtcctgaatatccttgttaattttctgtcttgttgatctgtctaatattgacagtggggtattaaagtctcccactattattatatgggagtctaagtctccttgtaggtctctaagaacttgctttatgaatctgggtgctcctgtattaggtgcatacatatttaggatagttagctcttcttgctgcattgatcccattaccattatataakgcccttctttgtcttttttgatctttgttggtttaaagtctgttttattagagactaggattgcaacccctgctattttttttttttttttgcttgataaatattcctgtatccctttattttgagcctatatgtgtctttgcacgtgaggtgggtctcctgaatacagcacaccgatgggttttgactctatctaatttgccagtctgtgtcttttaattggggcatttagcccatttacatttaagatgaatattgttatgtgtgaaaatcaacagaatatacattcttctcaacaccacatcacacttattctaaaattggccatataattggaagtaaaacactcctcagcaaatgcaaaagaatggaaatcataacagtctttcagaccacagtgcaatcaaastagaactcaggattaaaaaattcactcaaaaccgcacaaccacctggaaactgaacaacctgctcctgaatgaccactgggtaaataacgaaattaaggcagaaataactaagttctttgaaaccaatgagaacaaagacacaatgtaccagaagccctgggacacagctaaaccagtgtttagagggaaatctayagcactaaatgtccacaggagaaagcaggaaagatctaaaattgacatcctaatatcacaattaaaagaactagagaagcaagagcaaacaaattcaaaagctagcagaagataagaaataactaagatcagagcagaactgaaggagatagagacacgaaaaacccttcaaaaaatcaatgaatccagaagctgtttttttgaaaagattaacaaaatagactgctagccagactaataaagaagaaaagggagaagaatcagatagacacaataaaaaatgataaaggggatatcaccactgatcccacagaaatacaaactaccatcagagaatactataaacacctctacacaaataaactagaaaatctagaagaaatggataaattcctgaacacatccactcttccaggactacaccgggaagaagtcgaatccctcaatagaccaataacaagttctgaaattgaggcagtaattaatagcctaccaaccaaaaaaagccaaggaccagagggattcacagccaaattctaccagaggtaaaaagaggagctggtaccattccttctgaaactattccaaacaatagaaaaagagggactcctccctaactcatttgatgagaccagcagctcctgataccaaaacctggcagagacacaacaaaaaaaagaaaatatcaggccaatatccctgatgaacattgatgcaaaaatcctcagtaaaatactggcaaaccaaatccagcagcacatcaggagatcaagaccatcctggccaacatggtgaaaccccatctccactaaaatacaaaaaaaaaaaaaaaaaaaaaaaaaagccaggtgtggtagcacacacttgtagtcccagctactcaggaggctgagacaggggaatcacttgaacctgggaggcagaggttgcagtgagctgagatggcaccactgcactccagcctggtgacacagcaagactccatctaaaaaaaaaaaaaaaaaaaaagcttatccaccacaatcaagtcagcttcatccctgggatgcaaggctcgttcaacatacacatatcaataaacgtaatccatcacataaacagaaccaatgacaaaaaccacataattatctcaatagatgcagaaaaggccttcaataaaattcaacaccccttcatgctaaaaactctcaataaactaggtattgatggaatgtatttcaaaataataacagctatttatgacaaacccacagccaatatcatactgaatgggcaaaagttggaagcattccctttgaaaccagcacaagacaaggatgccctctctcaccactcctattcaatgtagtattgraagttctggccagggcagtcagacaagagaaagaaataaagggtattcaaataggaagagaggaagtcaaattgtctctgtttgcagatgacatgattgtatatttagaaaaccccatcatcttagcccaaaatctccttaagctgataagcaacttmagcgatgtttcaggatacaaaatcaatgtgcaaaaatcacaagcattcctgtacaccaatagtagacaaacagccaaatcatgagtgaattcccatttgcaattgctacaaagagaatgaaatacctaggaatacaactcacaagggatgtgaaggacctcttcaaggagaactacaaaccactgttcaaggaaataagagaggayacaaacaaatggaaaaacattccatgttcatggatagaaagaatcaatattgtgaaaatggccatactgcccaaagtaatttatagattcagtgctatccccatcaagctaccattgactttcttcacagacttagaaaaaactactttaaatttcatatggaaccaaaaaagagcctgtatagccaagacaatcctaagcaaaaagagcaaagctggaggcatcacgctgcctgacttcaaactatattaccaggctacagtaactgaaacagcatggtactggtaccaaaacagatacacagaccaatgaaacagaacagaagcctcagaaataatgccacacatctacaaccatctgatctttgatgaacctgacaaaaacaagcaatgggaaaaggattccctatttaataaatgatgttctgaaaactggctaaccaaatgcagaaaactgaaactggaccctttccttacaccttgtataaaaattaactcaagatggattaaaaacttaaatgtaagacctaaaaccataaaaaccctagaagaaaaacctaagcaataccattcaggacatagtcatgagcaaagacttcatgactaaaacaccaaaagcaacggcaatgaaagccaaaatygacaaatgggatctaattaaactagagagcttctgcacagcaaaagaaactatcatcagagtgaacaggaaacctacagaatgggagaaaatttttgcaatctattcatctgaccaagggctaatatccagaatctacaaagaacttaaacaaatttacaagaaaaaaacaaccctatcaaaaagtgggcaaaggatatgaacagacatttctcaaaagaagacatttatgagggcaacaaacatatgaaaaaaagctcattatcactggtcattagagaaatgcaaatcaaaaccacaataagataccatctcataccagttacaatggckatcattaaaaagtcagaaaacaacagatgatggacagggtgtggagaaatagggacacttttacactgttggtgggagtataaattagttcaaccattgtggaagacagtgtggtgattcctcaaggatctagaaccagaaataccatttggcccagcaatcccattacagggtatatgcccaaaggattataaatcattctactataaagacacatgcacatgtatgtttattgcagcactattcacaatagcaaagacttggaaccaacccaaatgcccatttataggctggataaagaaaatgtggcacatatataccatggaatactatgcagccataaaaaaagatgagttcacatcctttgcagggacatggatgaatctggaaaccatcattctcagcaaactaacgcaggaacagaaaaccaagcactgcatgttctccctcttaagtggaagttgagcaatgaaaccacatggacacagggaagggaacatcacacaccctggcctgttggggggttgtggrgggatgctaagggagggatagcattaggagaaatacctaatgtaggtgatgggttgatgggtgcmgcaaaccaccatagcacgtgtatacctatgtaacaaatctgtacattctgcaatgtatcccagaacttaaagtataataataataataataaaatatataagtagtcktatcaaagctttaaaaccaggagtacttgtcttttccctacattctattaaacattttcccctattgtggacctttgatgtctacagtgttttcatttgccacccactgaccagctgatgttctgctgatttgggtggtctctgaacccagcaacttggaactcaaggagccacccttggcttacagcagacatgtcagcaacagctgtttcactgtgcttaggcttaagttcccttataaactcctggccttcaccaacaktagcaaaatgtaggcccagagggtaatgatgatatctatcttacaaaattattgagtgactaaattagttaatacatgtgaaagttaattgttgcaaacatttagctccagtctcaaaaagtttcctttttcattttgccaatycctgttccttcctctttgatcactattcactccttagccttaagaattcttcctgctgtgccatgagccccctgcaacacttggcattctctcatgacttccagtttgaaaaactrtttttacttttgttttcatcctaattatgtgcatctttttagcagcgacttaaagacactcactacttttatacttttgtaactggtgatgttactgctgttcataaaatatctcagaactttagcacaaacctagctaacacacccctgactaatgaacagagtgtggccaaatgcttgcttgtggccactaataccatctgctggtgataggtaaaaaggttaaagcctttttccaccttgctttgttcatacctgtgaacttccttaaatggaaaatttataagtagaggtatttccataatgaggggtatggaagatacaaagggaaaaaragagagtccttgcctttatatatcttgtaatttaattgggaagaaaaggcacatgcttatgaaatagtcagggactcccaaatttgtatacgaaagtgacactgtagtagatgaggatattaagaaccaaaggggattcacaatttcagagggaatgttaagatgaggtccttgaagaagtctacatgaagtgatggttctttctgactggcatggtgagggccttctcttgacggctctcattcttcaggaacagagtttattctcagttaagacttcttttatatatctcagtaaatgttaaaaattctctatgtgtaggtcttacatgtttcttttttggtttatttctagatattctacaatttttgtcattattatcaacaggaatggctgaatttttatcacagacagtgagagggactgtgagtggatgcccagacatccagccttccctcctaggtatcctaggctaacagcgggaagtatcacattgaccagacaagttgcagagtgccactgggagccacctacctggagaggactttatctatgttgttgcccaygggcatgctggccagaggcaaggggtcctgatggagagccaatgtctagatatttgatgtaatcccaccttggaaattagaagttcacattctcccctttttgctttgcttaaagaaatgctttcacgccttcaaaaaaaaatgttttatttaaagtaaagcataggctagctcccttcctggggaaagatatctaactgcaaagggtagtctaagagtcaaattcttagtctaaaatatgaaaattacaaagagtaaaagggatgaattcccagtgaaatagagaccaaagaaatcattgtcaacctaccagctgaagaaaattcttgtcagaaattggctttggacaggctccctgtccaagtcacttacttctcttcacactgcctgttttcctataaaacaataataaatctgtcacacagataaaaagatcctagtgctgagataatgtgatttgtygaaacatgctcattcactttgggaggccgaggtgggtggattacctgaggtcaggagttcaagactagcctgaccaacatggtgaaaccccgtctctacaaaaaatacaataattagccagggtggtggcagacacctgtaatcccagctacttgggaggctgaggcaggagaattgcttgaacctgggagacagaagctgcggtgagcccagattgtgccattgcactccagcctgggtgacagagcaggactccgtttgattaaaaaaaaaaaaaatactcattgactcaactgaagtgtgaggactcttctgccatttgactttcttttataaacctactcttatcagtcttccattttaaagaagagaaaaacaattactcagatgtcctaactatcaagagatttggagaaactatatacatatatggttcttagytgggcataatttgaaagcctatctatctatatctatctatctatctayatctatctatctatctatctatctatctatcattgactttcaaattctgcccaactagttctgccccactaagaacatggatttttgtgataatgaaaactttctcttacaakcagagggccaatatttgctataaaggactgagagagctacatttcatatgtgactgtaataaccaacattttagggggaaaatgtgatgttaagagtcttagaatcccaggtggtagtgaggggatttctggatcctgaaggtcaagtgtttccagagaaaaagaggaatagagattaggaaacaccttctaatgtgggagctcgggcagggagagagtctacaactgtggtagctctatttaatatgataatgcatttctttttctttgtgccctttgcgcctttgctgtttattaactgcaccaactaccaggaaaagagaagagggtgtgggggaccaagatttaaaccattcaaacttcatattgaaagtttggttacagttgtattagaagaagggataattaacttgaggggtctgaggtctttctctttttctkgaaacagggtttcactttgttgccgwggctggagtgcagtggcatgagcagggatcactggagcctccacctcccaggctcaggcgatcctcctgtctcagtccccccaagtagccaggactacaggcacgtaccaccatacccaagctaatttttgtatttttagtagagacagggttttgccatgtgtccaggctggtcttgaactcctgagctcaagggatctgcccacctcagccgcccaaagtgtcgggactacaggtgtgagccaccacacccaactgaagtctttctcttctaattgtcaccagcatctaatgccttgcatatacatttaggcaaaacatttactttgaagtgatccccctcaggtactctttcagaatctttttactcttgaaaatttaaagttctaataagcccagtataagtctacatctagtcttagaataatagtaacagcttctagttgttattttttataatttctataacattctttatcatgttgattttagtgtatcgaggacctactgtgcaccagacacttttatgtgcatatgaaattcctcttccttatctctatgcatggtagaatctgaggctctgagaagttgacttagtaatattttgtaagtggtagaattggaatctgaacccaactctgtcttggtccaaagtgcatactctttctactgagttacactgtcatagtacttatagggaataatgtctttcttcttcctccacttcaccctattgcctgcttactttgctggtatattttatattttacttcatttctgagttattcagaataagaaactgtgcttgcttaattatgagtcagagctgtctcctgcataaaaccttttaacaacttcctcttgggaaaaattgcaactgttatttcaatgccatggccacagwtaccctatctcttggtacttctgttttatacctcgcttcctactaatgccattcccckcacacttcaggctatttcrtgacactgtgcttttgctcatgtttctttggcttagatcctcactcctcgaagtgtagttccaggaccagcagsatcagtgttacccaggagcttgttagaaaggcggaatctcatgccccactccagaccccaggtgattcaaatgcacagtaatggttttgagaagcactgacttagaatgttcttattgttttttacctagccaattttttcttacattttaattatgttttgttttgttttagctcttgtcacccaggctgaagtgcaatggcacaatctcagctcactgcaacctccgcctcctaggttcaagcgattctcctgcctcagcctcccaagtagctrggactacaggcttgtgccaccacacctggctgattttgtattttttgtagagacgrggtttcaccatgttggccaggctggtctcaaactccggacctcaggtgatctgcccacctcagcctcccagagtgctggaattacaggcgtgagccaccacacctggccaattttttaattttttatttcaatcggtttttggggaacaggtggtgtttggtgacatggataagttcttcagtggtgatttctgagattttggtgcacccatcacccaagcagtgtacactgtacttaatgtgtaatcttttatccctcaccaccccccaccctttcccccaagtccccaaagtccagtgtatcactcttatgcctttgtgtcctcatagcttagcatccacatgagtgagaacatacgacgtttggttttccattcctggttacttcacttagagtaacagtctccaattccatccaggttgctgtggatgccattatttctttctttcttatacctagccaactcttattcattcttcaaaactcacctttaagaagctaaggtcagtagttctcaaaatatagtccaaagastcttggtcagtgggtccccaagaccctttcagagggtctgtaaggccctcttgtccaactaccatctgtgtgagacagactttcttcatagacttcaaccaaaacaacatattgcaacagactgcctgcagcatcagataggtgaatccagctgcctttcataaagccagacatccagaagatctgcaaagataccacacagtgtcattcttcacactaaatatttttgttgcattgaaaaatagttatttttcctaaaaatatgtaatttatttaccatgtaataggtttattattttaatgaattgatatatttaatattaattttatattaacaaataygcatatattttatatgtaatctatatataattaacatatattaacatttgatatttaatcaattaataaaacatttcccagttttaatttcccatacagtaaatagcaatagctctaaccccatgaacaaaaggtctttggcattctcaataattttttttttttgacacaagttcthtgtcacccaggctggagtgcagtggcacactcatggctcactgtagcctcaacctccccaggctcgggtgatctcctgcctcagcctccagaatagctgggcccacaggtgtgtaccacaatgcctggctaatttttgtattttttgtagagacgcggttttgccatgttgcccaagctggtcttgaactcctgggctcaggtaatccactggcctttggcctcccaaagtgctgggattacaggcatgagccactgtgcgtgacctcaaaaatatttttttaatgtaaaagggtcctgagaccaaagagctttggatccattttcctggggtgaatgaagtgccctccttagcaggtctgtgatatcatgggcataactcaccgttatgcttatcattttatattaaaataatctgctcatagagctctctcattagactataagcttcatgaggactatgtcctattcatctttctatttactgagccagwtgaactacctaacaacccctcccactcccatcaaaaaataattgaggactaaggagtgtgtctactacctagtttatagagagcactagacaacctacggctgagacctacagctttagcagggatgaagtgtgcataatgctgaaggaagcagcacgtggacatcaccactcgtggagtttcatcccctcaaagtgtgtttcaccagcctggagttctgtctcccgggatgaggcagggaagctctgtgagcacactgtccattcatgcacaatcacgccagacgaacagtaatctccagtattcatgctgccttcaaaggcccggtgaccctcaaagatacagggagagaactacctacaaagatgtggatgtttcaacaggagacccatttggccatgtctgctgtcaataaccttggccaactccagtgtaagaggaggaaggcatgggtcttccctacaccagaatcccatgttgtcagaacaaattctactgcaagtagcagtctgagacttgatgaagacctacctctgccctttggacaccctgacagcccyttgcatggaagacatgataamggtagtctcctaagggcacacacagctcaccttctattcagaatccagccacagaatcctgtcagtggtggcacacaggatggagcaaggccctaggtaatgcccctctgaaaaatgtttgctgctgggaggtacccatacagtatttttagccaatccaaatattttgaacacctttattttaccagtgaaaattcatttcccttattataattacaaattctttaggggtgattggagataaaaatagttgaagccttgtcacagacctctggtacgtgaactgattagcttgtcaggtgctcactaagcatacctgaaatgtggatttttttattacagtacttcatatgttaatgaactgcctctaaggtgaagaatctcacacacacacacacacacacacacacacacacacacacacccctctcaccctatttatgctggagaatcttcaagtaaatcacaagcagtataacaatgtcattaagttcaaatacacatagyggagtgaaaactaaatgtagtagtgtctcactactcagctatctagtaattkcatttaactggaataaaccaaggacctgtaaataaacaaagagaaccattattagacactatatgccagaatgatatacatttttgcatggaatcctcgaaaygccaaagcacatgttccatcctgtacctccatagaaagagatcttcgaatcaatgtcatgatcctcataattttgtactcttagtctcggcacgaccgactccttcaggtctcaccsagagcccatgtgttcttgatttacacacaaattgaatagtcttagttgtctggttttcaaacccttcacagataaagagaaacaagttagaaggaacaaagaagcaactgctggtggcaacactgacaaacagaaatgacagctgctcagggtagacctgaaattaagggatgggccagcaaaatttaataagtaaatataaggacccagttcttacagtaactgactcatatataatgacwcagacaagaccgagactcctacctcaatygaccctcttggaamaacacagagcatccactgttgtttctcragatcatgctcatgccatgagatacctcttaggcaccactgcacactctctctggacttcctctgtcctagggcatttggccatttgctctgagsasctctctgtgcactccaactggctttggtaggttcatcccaacacaccctcttcacacctgcgtgtgtgggcctcctgccttgggacttctctgttgatgctggagcctgagacacctctcagcctccaggtttgcaatccagaagtttgcatgtggtggaggggctgggatgaaaggtgggagctggtgagacattcttcccccaaacatctcccagagggaatgtcctgaggttcagtggctcagatggcctcttggaagatggtccagcccgactgagatagcaaatagtggccagtgcagtaacacactgtcctgttagctgcctcacctcccctgcctcccacactctctttycgtggacttgagctttgtttataaaataatagcacataagcttttgcctcgagtcctgccatctggggaacccaggttaagacattcctcactatcaaggaaggtcaagtttgtttcataaactstgattaagagggcaaaaaaaatgrgtaatgatttccatatacaatttatgtatttattttctactcctcttactatcattcccaacataaacaatttttttaaaagtccgggtaattgaacatgtatatcttcaactaggaagaaaactcagctacttaaaatgattatcttccggagtttttacagcacggttatactgaagggacatcaaataatgcaataatcatagttgagaggagatctatcagggtaggctgtctggagcaaatcaatcttgagctgatttctgaagactagagagcttgaggaggacaatgcagcttgaatacaggaagggacccacgtaacctttagagcacattgttgtgcacaagggtcatatcttttacaggagaaatgaagaagctgtgttatatcagcctgttcatttttaccctcaacaagaaaaatsgtcagcccatctaatccattcagctacctcagctgatattgatcatgacggtggctaaaataactccattggctcttttcccaaatggaggctgattggctgctggtgtgtagcttattattgagttgttaaagagttttggagttaaacttgctcccttgaatggggtggaggattgtactctgtctgttgtcctttcagcacaagatctacatatatgtaggctaaaacaatcaggggaacacacttgcacacatacgtgaacacacaggcacatacrcacatgtatacatgcactactatctagtgtcactgtcattcctttacaatttttgctaccaaaaaaagtagagatggctgagtgtggtggctcacacctgtaatcttagcactttgggaagccaagatgggtggatcactagaggccaggagttcgagaccagcctggccaacatgttgaaactctgtctctactaaaaatacaaaaaaattaactgggcatggtggtgcatgcctgtaatcccagctaatggggaggctgaggcaggagaatcacttgaacccaggaagcggaggttgcagtgacccgagatcacaccactgcactccagcctgggtgacagagcgagactccgtctcaaaagggggaaaaaagccaaagccagagaaaaatatcttttctctgctgcatttcaaggttctgaagaagatgcttttgtgaagcagtggtctgccctctgcttcctccacaggggaggagatgcatccagaagatgcaggccatgcatctggatgatccaagtgaaaggttttcttctacagaacgcttatcatggagtagcacaggggaggagatgtcaagactaattcagggtcaaagccagctctagagtagttcgattacaactttcagagaatacttcaaacaaagcaatcctaagtgctttcacttaaagacactgcacacaggagagagaaaacccattttcaacttaaacaattcaaaaagtttggaagattttcggcgacactccacagagctaccccaaaatgggcctccattttcagatgtgcatccaagtgcatcacatatttcamttccctgtgggcaatgccagaggagacaaaggaagggggagagaatgttccatgcatttgcaaactgtcagggcatatcatttgtcctctaaataagtgtttactaagcatccacatgatttttccttgtcccctgcaaggtgcaaaaattgtagggaaaatgaatttctggccaggctttaagtgaaataaaaatccaaacakgttaagtcaagatgccaggaacagctcatcactcatcattacagtgcatttgtggggctgtaatttctttctcacccgttgtggtgtttgcttcttttcacatttcctcaggctggcccccttggaagtcggcaggtcatttcccccccttcatgctctaatagatttcactctcaagatctcacacaccaccagctctggactgctgtgtttagggttagcaaagcagtaggaaaacgcttgcagacagagaacggtgatttctttttcatccaaagaaaaatgagagtttgaagatgcttatcacacccagatttggggaaataaaaagaaatcccaaatcctttcttctccacaaaatacattttttgtttcaagactattcttagtgtttcagttctctttattgatccagtttattggagctgaagtaattgaaaagttagtacccatatctggatttgtgttctgtgaccaaggcttacttggattggggcgctgttgtgtgcaatggcatttgattgtgtaaaaatggactccttgtccagaattaaatgctgaggaacgtcttcccaattgtggtattggtgcgatgagaatttgagaggggtgggtagtggaagggcttacagcatctgttgtggacctgtccttgtcagttgtcaccttcaagctatagaatgctgctctagaaataacctgtaaagtgagtttgactgcttttgcctttatgtttttgacaaatatttgggtctgtgttctcaaatctgtggaggagagccactctatttcttgggtcgttcttgggttgatcccaccccttccctctagttcttcctctttcttttgcctttttttttttttcttgagacsgtctcactctgtcacccaggctggagtgcagtggcacaatctcggctcactgcaatctccacctcccgggttcaagcgatcctactgcctcagcctctctagtacctgggactacaggtattcacytccacacctggctagtttttgtatttttagtagagatggggtttcaccatgttggccaggctgctcttgaactcctgaccttaagtgatccttccaccttggccttccaaagtgccggaattacaggtgtgagccaccggtgcctggccactcttttgctgtcttgatgagtttaggcaccttctcctatcccagagtctgagtgttcatagatasgcagagaggaagtcactcacattccaaaccaagactgaacctgttagagtggttgttaatcttaaatattgtcaacattttaccataattggaagctcagggaatgacctaaaagctcatgctcagaaattgttcatttaaactgggggtagaaaccctcacagtgaaatctgttgataccagggattgggtcctgacgagcaagaatgtctttaattaagttcttggctttatgtgcacaatcctacatgggcaccaatccaagaggtaagcatcttatgaagaacccaaaagcagtctgcacagttattgcatgattgtggtttttgggaaaccttgggattgtatcgtactccttgccttactgaaatcactgtagtgtttttattttcctgggaaaccaagactcatcatttattaaccaaaatatcattcagttagtcattccacaaatatttaggagtgcttgtcatgtgggattctctctgtgagaccttggagagttggcctttctgctgaattctgccagcccagcagtgtatccatgtcatagttctggttaccttagaagctggctctgagatggagattacattgtagaaagtttactggagcaggtccttgggatcaatacatgtggaagaaggggcagaagcaagatgggtaaaggggagaagctgggctttgaacagtctcagtggagacattcgtcagcccagtggggaccaggcctggacaacgggcttctctggtcagtcaccgatgtgcagtcattaggggaggggcatkacctcaggcaaggcagctctccatcagaggcagcactgtcagctactgggagagtaagtcctttaatcctaagtggggacctgggtggcacatcacaatgtccactacggtgtgctaagatgcttttagctactctacagaacatcttgactcaactggcttcaacaataggacatccttgcatctcaaagtaagacaccagggataaagcacctccaggattggttagttcagtggctcaacagcttatccaaggagctctccatccatctgctctgtcagcctgaagaggcaactttgcttctcaggcttcttcctttcatagtcacagatggctgttgccggactgggtgtcactgcaggaaagagaaatgatttctkcccctgtgctctttctattgttgaggaagatatttccttgtatttctctttctttattgtggtgaaatatacaaaagataatattaatcattgtaacctctcataagagtgcaattctgtggcattaagtacactaatgatactgtataaccatcaccactatacagaaaactttgtcatcattcccaataaaaactctgttctcatgaaataataactttctcttcacccscagctcctggtaatttctgttctcttttctgtcgctatgaattttcctgttgtaggtgcctcaagtataagcatacagtatttgtcctttttgtctggtttattttactaatcttaatgttttcaaggcccatccatgttgcagcatatatgaaaatcttattcctcttcatggctgaytagcattctattgtatatatgtacagcattgtttgtctactcatccactgaataatgttgctaccaacatgggcatacagatatctgttcatgtccctgctttttattcttttggatatatacctaggagtgaaaatctgggtcatatgataacttgatatttaacctttggagaaaccatcaaaccatttcctgcagtggctgtgccacttcacattcctccatcagtacctgaggagtccagtatttctacatccttgctaacatttacttcccttttttaaaggtatggccatccttcccctccagtcttattggcctctatcatgtcacatgcccactcctaaattaattatttgcaaagtgaaggatattaccaaaattgccttaaaccaatcaggaccagggccctgggtagggtytacattaccctaaaggacatggctgcaaggaggacagttagatacctgaacaaaatccagacattccagccagaaagaaaggatgggacgaggaagaataaagggaagctaccatcaatgtttgcaacagggtggctttaaaaatagaaatgcccagaccagagattctgattcacttggtctgcagcagtgggtgctcagcatcagtcacttttaaatgttccccaatttattctaatgtgcagtcagggctgcgagccctgatctagcaggttaggctgcccrttaagccagctcgtgtgaatactgagagatgagaaggacaacatgctacaggaatgctgtgcagtgcacctcgcctgggggactgatgaaaacccctgagaggaagtgatgttcagactgatgcttggaagaggcaagtcagccagggctggggaagagtgtcatagacacgggacagtatgtggttcagtttaagaagaggaagaagctcattctgtctagagtgtacacagtatccacttcaaaycctgaggggacaatatttttactcaaatatatgcaacttatggggccaggtctatgttcaacactccagccgcgtttatctctgggtaagtttccctctctgtgtgccatgttcttggttggctgagtgagcagcaggttatactagaggcatcagacattcagggtttaagaattgagtttgaaacctgcccatgctgtatacaaccggtgtggctgtggggaaggcccaagacatctctggacctctgcacaggtcctgcaaaagaggttataaaaactacrtcatagggccattatggaactcataaaaaaaaatgtatgtgagcaacatcataaatatgctgatgagttgcaaacttctactcccgtccccatctctctctagggcacatctcaactccagacctatatgttgatatccyctacctggcagccccatttggatgtatattgggcatctccckcttaccgtgtccaagacagagctcttcatatgccactcctcctccattctcccctacatcggcttagggcatcttaatccttggtgtcatccttgactccactctttctctctaacatggagtctgttaacaagtcgtgccactctactttagaaatatacccagattctgaccatttctcaccacctccatgactatccaggttcaggccaccatattctttaacctggatcatgtgacagcctcctatgagaccctccaaacttgatcccccattattcctactttatctcctacaaccctccctcttgttcatctgctccagccccaagtctcatgcagccccagtctgcatggcttcagggccttgctatttgtgggtacccctgcccccagttagccaaatggctaacttctcacttccccaagtctttagtcaaaaaccatagtgtcagcaagccctcccatagacaccctatttaaaatttcagtgcctgcccttaatatatcatattctccttctctgctttttttcttcctggtatttaccactaatgtgctctacaatttgcttatttatattgttcattgtcttccctgccagaatataccagatatatagatctctgccagtatacccctgctccacaaagccagggattatctgttttattcaccttcttttttttttttttttttttttttttttgagatggagttttgcttcttcgcctaggctggagtgcaatggcatgatcttggctcactgcaacctctgcctccyatgttcaagcaattctcctgcctcagcctccctgtagctggaattataggcatgagccaccacgcccggccttgttcaccttctgtctcagttctagggcatgtagtaagcacccaatacatttattagcacagcattttacagaagagaaacctgaggctcagtgtgattaaataattcattcaaggtcacacagctagaaggcgttgtgtagttgaatgttctgtggtgcttttcaacaacagaaaacccatttagcaaaaagacagggcagcatcaatgactcctctccagccctcctccctatcaccaaatgacgaaaggaaatctctaaaatgaggaaggagtaggtgcaagagggcgtcgtggagttgctctgtggccccttggccagaccattcatgtttgagtgttattagatgaggaagctggggagccatctcagtgcttcttctgaagcacaaaggccagtgactgttattaaaaggagaccagctgctcgaggctaaaagtgcacaggaggaagggatactccctacttgggaaagatttgctaagtcggcttgagatagtcagggaggatttttagactgtgttcagcatccagacccatctcactggctatcctacccagacttactgtgccccctaaaaattccttctttcatccattctactgaacatacaaagaggaatcctagccgattacagggaagacaatacagagaataaccccagaagtagatctctgcagcatcattggaatgaggacagtgatttttttttaagaatgtcttttttgaggaagaggcaatgtgcctggaccatagtggttctagttggggaagcccgggccttttcctccttacccctgggaaaccacatcgctagtgctgtccgtccacagggacccacccacttggcagggtagagcttctagaaccagagccaaggcaggcaggagactctttaaacagttcagagggaggaggcaggagcagggtctgagtggaagctgggtgctgcaggctgtggtcagaccagagaaggccgattccacaggactggggtcagagagcaggggtcagagagcaggagccagagcgggcctcggcctctccctgggaggccacggcacctccctgtgcctggggccttcatgactcgagggtgtctaccccaaagctgctgcaagcattcagagagagaagtgcccagggcccagcagagagcaagccctccacacgtgtttctctccctcttctttcagaagcaagatgggggtggggacagtggctcagagcaggactgggagaggctctcttgaaaggcctgggttgtaatccaaagagcggaggaaggagaggaagctgctggagttgcaagatggcttctgttgccattgttcagttgtttgctttcctccttagaggtgcggacaagaagtagcagagccaaggctctgggtgcctcttccatgttccctccatagtcctttcctcctcacatgctcaccaccagctcccaggtcctcagcctgtgcagggcctgtgtgctccacacagacgtcctcttcagatgatgctcccacgtcttggctgtggtcctttctggaaattssccttggccacagagagctgcctcgcccaagcrtttgccctcccaggggctccctgaggccaatgcccagatgatgcaaggataatacctttcaatttcatataggtcttaagatcatctggcccagaacgccccatcggatccactgaaactcattgtgggtgaccttctccctccacccagtgctgccttcttcccttactcgcagatcatctggagagaactccctaagagccttctgcccatgactctagaaggccacctctaaggccctgagtcccttagttgtctttggtctttgcccctccaaacacagcccactcatttgacttcctaggcacccactatccactaaaatgcagccatcctgtatcccagtgactagaaaatgggtgctgatgggttaatatggtgtccaataaaaatatttaccatgatgggagctgacacatgcacagctagcagtctgcaaagcacattgacgtatgttttttcagttgcaaggcagaatagcatggtggtttctgaagtgactctgcctgaatttgaatttctgtcccaccacctatgagtcttgcgactttgggccagctacataaactttctgttgctctatttccctatctgtaaaatggggataatagtcccttcttcagagaatgtttgttagaattaaatgagtcaatacatataaaggtctcagaactgccctggcatatggtaagcacatagtgtgccttagctgttagtatttgatcctcacaacaaccctgtagtactacaatttctacctgtgttgggtacttctcaagacactcatattctcagcccagcttttcaccccagctgtttgttcagccacctgctggcacggatgtaacagcgccttgctgagctgtgtggcttctcttacttcctgcttgagatgcctgcagagcccacttggctgttctgacccaagcagacctggaagtgtgggggagctaatatcccatgtggcaccccttgatgccaaggaggtattggagccaatggaaaaaccatcccttcttttattccctgagaagataatccagaggtatattgtgacccatcaaaatccaagttcagttgccccagcagtagccactccaktaatgcatgcagtcatggccttcccccattccccatttccttgagcccatttgcccatccatgcctgtcaatggagctcacgtcccagagtaaactgcccagacaccggccgttgcctcgtggtctgcttttttttgggggggcagggcagggggcggggcatctaattgtgcataggagaagggtaaaagaataaaaagaggcatgtcctaaacaccatggaatactatgcagccataaaagggaacaagatcatgtcctttgcagggacatggatggagctggaagccattatcctcagcaaattaacacaggaacagaaaaccaaacaccgcatgttctcacttataagtgggagctgaacaatgagaacacacggacacaggaaggggaacaacacacactggggcctgtcagtggggcagggaggggaaagcatcaggataaataggcgatgggttgacaggtgcagcaaaccatcgtggcacacgtttccctatgtgacaagcctgcacgtcctgcacatgaatcctgggacttaaaaatttttaaaaagaaccatacagtagaagaaagaaaaaaaaagaggcatgttcaacatatataatcagatttggactcaagtcagagtcttccacctaccaaatttcatgccctcacactgtgcctgcactcccagttgatacatatgcatcttaacagaggccttccagaagcttgattaggctgcgggaggccaaggaggaacacactatgaacaggtagcttcagttactttgatgttcctgcccttctcctgcccctgcatagaggcaatcctgcatggcaagagggcggtgagcagtggctccacttggctgaagcctgggtcaggggcttcacctaacttgtctttgtatcgccagcacttagctcatgcatcagtaacactcagggtctggcacatagcaggtactcagtaaatgtttgctgggtacataggtccagaactcaaactatgggtgatttgcttcttaatgattactttctatgtggccatgcctgtttctatacttattatttttttgctggtttggaacgtaatctctgatggacagagaacttgtttttgggtggaagattgtctacctttttaccaaggtgagttagtacagaattgtgtamctaaaattatttaagaagcattaactatttctcaaaattatttgagaaaacctgaatatcaggttgattgatgaaagaaatctctaggtgctatcttgaactggtggcctgtgggataaatgtagctctaagatatatgggttggccagcacagtgttgattatactgaagttattctgaggtatgccacagggcctaccacttcctatagcattctacctgtcccaactctcaaatttatgttacctgcctagcccttgcaggtatatgggtcttgtgacccctacacaacaggcttccacatatagaaagcgttgaaggagctgactggcacagttctctccctgggcttttttctgacttttcctgtgacttgctcagcccatcctctctcccatcagcgggtcctcatggtgatatggtgtcttgccctgtaggtactataagatctccgtggtgctcatgtgctttgtggtccccacgctggtgccctggtacatctggggagagagtctgtggaattcctacttcttggcctctattctccgctataccatctcactcaacatcagctggctggtcaacagcgccgcccacatgtatggaaaccggccctatgacaagcacatcagccctcggcagaacccactcgtcgctctgggtgccattggtgagtaggggtgttgagggccaatggggagaatggtggcccaggttttcttggcctctcagtagttttgtggaatcagtaaagagaagcagtggagtggaatggagttcagtgaacttgagctttttttttttttttccgagatagagtctcactctgttggccagtctggagtgcagtggcacgatcttggctgactgcagcctctgcttcctgggttcaagcaattctcctgcctcagcctcctgaggagctgggattacaggcatccaccacyatccctggctaatttttgtatttttttttttttttagtagagatggggtttcaccatggtggccaggatggtctcaaactcctgaccccaagtgatctgccctccttggcctgccagaggagctttggctttaggatcctgactcttggacaagtcatgtgatctctctgatttacagttttcctatctgtgaaatgggactagcaatgcttacgtcacaggaatatgtaaactgcttagtacagtgcctggcacgtagtaggtgatcagtaactagtagttattcaccatgaccatggaaatgttctaaaggagaagcagcagttgactcttctctcaaactgtcctgaccattctagcctcagctgtccaatcatttggcagagcttaagaaaaaaggccttcaaacaaagacatgggaaggaatgagacttggcatttcacgggaccatgaaacagttaagagygaggcctctggagtcagcgactttggttgagtcctggttcctccacttactctctgggcaagtcactcgttcttctgcctttcgtgtccctatctgtaaagtgggggtaatactagcacttacctcctcctgggtcattagagggctaaatgagttgatacagagtgttcctaccagtgcttgtatgaaacaagccttcgtgatgttgcttttttttttttttttttttttaagacggagtctcgctctgttgccaggctggagtgcagtggcgtgatcttggctcactgcaagctctgcctcccaggttcacgccattctcctgcctcagcctcccgagtagctgggactacaggcacccaccaccacgcctggctaatttttttgtattttttagtagagacgggatttcaccgtgttagccaggatggtttcgatctcctgacctcgtgatccgcctgcctcggcctcccaaagtgctgggattacaggcgtgagccaccgtgcccggcccgtgatgttgcttttattgctagtcatgtgttcttaggcaacttacttgtcccttctttgcatttatctcctcgttttaatcatagcagggataatcatagcagttacttcagaggcctcaggctaaaaggagttaatacctgtcaaagcaaggtgattaagaaatattagctctacctttgtagaagcaactcagacttcttggtaagctgagccttgagcacagagatcaaacataggaaagttcctactgttaagtagaaatggtctctgtgtcactcagtgatgagattctgcatcacttcattagggccatctgtttttcagaccccagggatcccaaagttcttgtcaacttgcactgatggcagcaatagaaggtggagtgaacactacatttagccagggaataactgcataagcagggagaaagtgccttggaaaacaggaggggcagtgccccaacccttcctatggctttcccctcctcttgccctgcatcttctgaaaggactgtaatgagggaagccrtggccagtgttgattctgtgagtagacagaaatggggacaagatggtccgtcaccatgtagggatggatgggccaggaaactcaagcagtatggccatgacatgggccctaaggagctaggtattggttataagtctatccagctcaacactggactcccagacagtttgcctcccaaaagtccttggaaagctcttgccatatccagttgtgcagtagagtggggagtacatcataatgtctgtttctgaaaatagggtgaagaaacttttccataccgctctttaatccaggaaaaacactaaaaatgatgrgggggggaggtggtgtgcagggtagggatggcataaatttaaaagaaaattgcagaccacagatggatccatcttgaggtactcgttatagagcgaaatcctttaaacatggtcagtggsagaactatgtgatgactagtagccacttaagaagtaagaaaagagtctgacagtttctcaaacagttaaaaatagttactatgtgatccagcaactccactcctacatttataccaaagagaaatgaaaacatatgtccacacaaaaacttgtatatsaatgttcatagcaacgttattcataatagctaaaagtggaaacaacacaaatgtccatcaactgatggatggatacgtacaatgttgtacatccatataatgaaataccgtttggcaataaaaagaatgaagatctgatacttgatacaaaatgaatgaaccttgaaaacattttttatgtggaagaagctagtcacaaaggactacatattgtatgattttatttwtatgaagtgtctgaaataggcaaatctacacagatagaaaacaggactgggagggagtaggaggcggttgggggtgatggctaaggcatgtgggtctttttggagagtaatgaaaatgttgtaaaattgattgtggtgatggatgcataactytgtgaatatattaaaagccattaaattgtatacttcaagagggtgaattgtacagtaagtgaattttatctcaacaaagctgtttatgaaaatcaaatgaactaatcmttagagaaatgcraattaaaaccacaatgagatattacctcacacttatttgaatgamtattatcagaaggataaaagataacaagtgttggtgaggatgtgaaaaaagggaacccttgcacactgttggtgagaatgtaaattagtgtagccattatggaaaacagtatggaggttgctcaaaaaaattaaaaatagagctaccatatgatctcgcaatcctrcttctgggtatagatccaaaggaaatgaaatcaggatgttgaagagatatctatactcccatgtttaaacaggattattcacagtagccaagatgtgcaatcaaattaagtgtccatcaacagatgaatggataaagaatatgtatcacatatgcatcatggaatactattcagccttaaaaaagagaaaatcctgtcatttgccacaacttgaatgaacctggaggacattatgctaagtgaagtaagccaggcacagaaagacaaacgctgcacgatctcacttctatgtggaatctaaaaaagttgaacgaagtagagyagaatggtggttaccagaggctggggcaggggggttgttgagagatattggtcaaagggtacaaattttcagtctgactagaggaacaagttcaagaggtctactgtaaaacayggcgatagtgactacagtcaataacaatgtattgtattcttgaaaatcactgagagagtagattttaagtgttcttaccacaaaaacataagtgtgtgaggtaatgcacatgtcacttagctcaatttaactattccaaaatttatacatatctcagaacccggtgttgtacatgataaatatatacaaattttatttgtcaattaaaaaataagtaaaagaaattwaaaaaatcaaatcagagaagccatgagagctctcatgagtacatcttttaaaaaaagtgagagagtcatgcaaatcaaaaccacaatgagataccatmtcacaccagttagaatggygatcattaaaaagtcaggaaacaacaggtgctggagaggatgtggagaaataggaacacttttacactgttggtgggactataaactagttcaaccattgtggaagacagtgtggcaattcctcaaggatctagaactagaaataccatttgacccagccatcccattactgggyatatacccaaaggattgtaaatcatgctactataaagacacatgcacacgtatgtttattgtggcactattaacaatagcaaagacttggaaccaacccaaatrtccatcaatgatagactggattaaaaaaaatgtggcacatatacaccatggaatactatgcagccrtaaaaaaggatgagttcatgtcgtttgtggcaacatggatgaagctagaaaccatcattctgagcaaactatcacaaggacagaaaaccaaacaccgcatgttctcactcataggtgggaattgaacagtgagaacgcttggacacagggcggggaacatcacacaccggggcctgtcgtggggtggggggaggggggagggatagcattaggagaaatacctaatgtaaatgaccagttaatgggtgcagcaaaccaacatggcacatgtatacatatgtaacaaacctgcacattgtgcacatgtaccctagaacttaaagtataataaataataaagaaaagctacatgaaaaaaagtgagagagtaaaagctgcccactggccactggaaggggtagaataatatataagtacattctagatatttaaagatatttaatttacttacctatttgaatgattctcatttgtctctcttgagctcttccaaaaaaggattttttaatcactccagcccacagagactattttttaaaaacagttgtacatcaaaacgatgatctgttatcagccatttagcatttaccttaagaaggatagctctgaggtcatggtatcatgtctgcagttcacataggaaagttaatcttgtgacgatttattgctattttttctgttcatattgtttgtctagctaactaagtcaatgcctttggagkcagtaaccaagtcttttgctcctcacagaggctgacaccatgtcytgcacatggtaaaccctgaaaaaataggtgattcaaaacatctatgcagagaggtggtgattgaattatatcaatgcccgctttgtcttccaggtgaaggcttccataattaccatcacacctttccctttgactactctgcgagtgaatttggcttaaattttaacccaaccacctggttcattgatttcatgtgctggctggggctggccactgaccgcaaacgggcaaccaagccgatgatcgaggcccggaaggccaggactggagacagcagtgcttgaacttggaacagccatcccacatgtctgccgttgcaacctcggttcatggctttggttacaatagctckcttgtacattggatcgtgggagggggcagagggtggggaaggaacgagtcaatgtggtttgggaatgtttttgtttatctcaaaataatgttgaaatacaattatcaatgaaaaaactttcgtttttttttttgtttgttttgtttttgagacagagtctcactctgtcacccaggctggagtgcagtggcgcagtctcggctcactgcagcctccacctacctggttcaagcaattctcctgcctcagcctcctgagtagctgagattacaggagcctgccaccacacccagctaatttttttgtatttttagtagagacagggtttcatcatgttggccagactggcctcgaattcctgacctcaggcaatccacccgcctcggcctcccaaagagctgggattacaggcgtgagccaccgcaccctgccgaaaaaaacttttttttttttgagacggaggctcgctctgtcccccaggctggagtgcagtggcgagatytcagctcactgyaagctccgcctcccgggttcacgccattctcctgcctcagcctcccgagtagctgggagccagcgcgcccagcctaaaaaacttttcaagtcaatattactacgatttaacattagagtgtggacatgtgatttaatcgctatagctaaaatacgtcaaatatacgttgtcatgtgcttgaacatgatgctaaccctgacaggatgaaggaaagtaatattctttcagtgtagttcaggagagcatttgttttcttttctaccaattaacccatcattgcttttaaacaaccatctgaaggagcagagaggcagggtagaagacagaagggggatctatgtggtaactaaagaatgtttctgttttgttaattattgtgtgtgtgtggttttattgtttgcttaagagaatcaaaaactgaaaaaaatgagaatacaggaaatggctcttgtttatttttttgctgtgtttacagcttgttaatgctctactgtctttgtttcaagagagatttgttcactgcccagctcgttttgtgtcctgagccctatgsccagcccaccttataaatcatgcctgtttagatgtttgattttgttctgtttgctattgttatcttaaaggtgtataactctgacatgccagacatcaaattaagctcaaattaagctctcgtttaaatgtttaarcacctaatttatattctaattgatcccagccactgatgcatgtactttagctacttctgctaaataagcatattaattttccacatcagrccatcagatcttgagaaccaacagttatctagaattccgtgtctactaatgtttcacctgcatgcagccttcattaattttgtagcaaaatataaagtgatcattatgtagyttctggattaaaaaaatttgtgtgtgaagttgctttgtaaagtgcatgtggaattaatgggacagtgtgccctttgtgttagatgttagagcaaaagaaagggcttatagtgttagtattggagcactttgaagatagatattttcagaaaagatgtaggatttaaaagttaaattttaaattttagaaaaagatatgatggcaattggaaatagtcacaatgaagttcttcatccagtaggtgtttaacagtgttattttgccactggtaatgtgtaaactgtgagtgatttacaataaatgattatgaattcattggtgttcttgtccagatacttcagtgctgtttagagaatgttctttccagagtgcttggtgcctcatgatgattgtatgactcacattgggatttgggctctgggctaacaacagcccctgagaccagcccctgagaccaggcctgtcctatcctatcggccttagscaacagccagaggaagccagcaagttttatttggaatgtagaactcccagtggtattgttccctgattctcactcaccagcagccactgggagtgcttatagatgataattgggaatctactcctatatgtcacccaaaggagcatgaaggacaccttcccctctccaggccccaccaatagttaccagaggtgggggagatggactcctgttttcactctagtcctgcctctctcaacctcacctctgcaccaccaaagtctccacccatcttttgccccaaagcagctgtggctgtactgtcaggtagaagcttcttaacgtgtctgcagttgagtgggattctagccattgatgggtaccaggctagatcacatcatgtaaggaccctttggatgtgaccgtagcatttttcagctgcttcatatcccagtcacacattgctaagaccttgtatagagcgcaggtggagggtagtcacattccaagataagtttgtatcagcatgatgtgaaatggcccttaattgggaatgtatatgtgaacctttgactcctaaaagtactaaacttacttacttgtccattagtcaaaaagatgacatttggaacagctatttggaatctttttacaaaaggagggtatttcccagctagaccaaataaatctagaatctccttcctctgaacctgagtgccatctttttttctgcagcagagccatgaatgacctcggattggaatgatttggaggaagagktggacaaaggttagattgcactagtgtcttccctgttaacattcctttcaggtctcagcagcatcttaacagaaagtagctctgggagttatttcccaaacctatccaaggtggccttagactgatacattgtttgaaagtttcagtttaagataaaaaaatggtccccccatgtccagtctttaatctcctcatcctcacaaggcttatttcagaagcacccacccctgcatctaggtgaagggagcccagggaaagcaattccaatagcatgtgtcccacaggcgtcatggcagagtcatggagccagcctgggacagtggagccaactcaagttcacctcgagtccccaactctgctactggccagctctgtggccttgagaaacrtcagcctttctggattcagtttccttctctgaaaagagaggactcttctctaaggtccccttcagccctaacattcgaccacagcaacagagatgagtcgggcgtgttctcatatgcctgacttcaaattcgaaacacctctcaagttagcactcatcctttctggacatagaaggtcaaaaattgggagtgggagggagtaagtgaatctgaatgggagaacacagactgaggctggaaggatagaatgttcttggttttaaaaaatctgcatatattttgtgcattcctaaaatgcaataaagcaattaaatataacccatcatgaaaaacaatttaatgagagaaattattacagaaagctctacagcttaatggggtagtagaaatagcactggacttggagtcctgagacctggatttgaactctaactcttgatctgactggctgtgttacctgggactcaggttaaggctgaaatatgacatatgaaattgtcatttactagcctgcggagcctctctgagcctcagtgtccttgtctacacgacaggaagagcaacatttatgtgtattagatgaatctggaagcctcatcccagtgcctggggcattgcagagccctgggagacatcagttgagggtgagtagcatgccccacacacaagccagagactgggatatggtgcagagagccatagaccagaagtgagccagcttctgggcctggttttgctaactaaccagatggctctaacctctgggaactttggtttcactttccataaaggaccaactggattgggttaacctgtccagctctgccgttctggggagtctttgcaaccgtgtgcctccatcagttccaggcctccgcgtggccctctgcacccctggcctccttactgtgcctcgcacctgtgtcaaaggacaggtctggcctgcaatgtccctatgcttcagtcagctcatcaggacctggaatagatttgtggaggggagaggttgaaactcatggatgagagtaagcattggggattatctgtgaggttcatttgtccatttcactcctgtccccaattacaaaggggactgaaaaccagttgtgttctcagtggctgaaagaaatctcctaacctttataatcctttcttaaaaaattttcccatttttggccaggtgtggtggctcacatctgtaatcccagcactttgggaggctgaggcgggcagatcacgaggtcaggagatcgagaccatcctgggtaacagtgaaaccccatctctactaaaaatacaaaaaactagccgggcatggtggcagatgcctgtagtcccagctactctggaggctgaggcaggagaattgcttgaacccagaaggcggagcttgcagtgagccggattgcaccactgcactccagcctgggcaacagagtgagactctgtctcaaaaaaaaaaattcccatttttagcttagggtgttaatcaaactccttccccttcctctacgtcaaggatgtgctataaatgaactggaaactcctttccttgttccctctgctacttccctgtggactgtagagtccgaagcccccatcccaccccaaggatgttcctgacttctacatttgcaacatcagaagcaggaggagggaaggcctgtctcagggcaacaagcccggctgtcccagcagcttctgtgggctccgacacagccttctttccctctccattcaccccccgaccccgtggtgccacgactccccatctggaagaacagtcagccrcatcctgcctgtaactgcttcacaggatccaaaaggaaaatatcagctaacagcagcctgggctagctggggctgtgaagactttgccctgcaaaagagtacccttccttacagctgctggcctaggtttactatggaaaaaagatggcattaccttcaaccagccatctgaatccctcacaactagggatctactaatagctgccctcctccccacttgttctcaatcctctatgaggcaactctcaatgttaccattgaatctcagaagttgcttgcttgcttgctttctctttctttctttctttctttctttcctctctctctctctttttctttcttacaaggtctcactctgtcacccaggctggagtgcagtggcgcaatctcagctcattgcaacctcccctcactgcaacctccacctcctgggttcaagcaatcctcccacctcagcctccccagtagctgggactacaggtgcatgccacgatgcccggatttctgttgttgttgttgggggtagagatggggcttcaccacgttggccaggctggtctcaaaactcctgacctcaggtgatccgcccgccttggcctcccaaaatgttgggattacaggtgtgaaccaccatgcccggccagaagtctcagaagttgctttcttctagaggtaccaactgtgagacagagctggcaacccctgtgctgtgggtggacaaaatgactgggcccaccacagcaagggtgtgtttgtagttttatgaccagatttcacataagcctgtgctcacagcacatgtatcgcaaaacacaggagctgtgtgtaagggtgcgttcttattctgagctgtgtggccaagctgctgcgtggggtcrggggagctccctataaagtacatgatgtgagcattggtggagatgaactaagctaactgggatctccaatgtctcaaagacagcatgtgtcccacaggcgtcatggcagactcatggagccagcctgggacagtggagccaactcaagttcacctcaagtccccagctctgctaccggccagctctgtggccttgagaaacatcagcctttctggattcagtttccttctctgaaaagttcctgacttctactctgcaacatcagaagcaagaggagggaaggcctgtctcaggcaatgtaggcaatatcttccagttccagtaaacaggttctgacacccgaggcagagggataaggaagattcacttcagctccttcctggccctgcaattgctgcccatgaatccaagaatggcttgatcagagctgactgagtgccttctatttcctcctcggaactaaagggcactttcatttctagcatcataaagtgcttatttcggatgtgccaaccaatgagcacatctgtctgcactgttgtccacagctcctgctagactgaactatttgcaacacatgggatccaaactctttgagtcagtgtgttagaatgtgcacacagctgcaccatggccaaccagtggacaaaggatctcaaagtgggtattttggcctggatggtttcaaataattaacagtgaatatctttttttttgagatggagtttcgctcttgttgcccaggctggagtgcagtggtacaatctcggctcaccgcaacctctgtctcctgggtccaagcgattctcctgcctcaggctctggagtagctggggttgcaggcatgcaccaccacacccagctaattttgtatttttagtagagatggggtttctccatgttggtcaggctggtctcgaattcccgacctcaggtgatccgcccgcttcagcctcccaaggtgctgggattacagacgtgagccaccatgcccagccaacagtgaatatcttgattttgcctctatgtagaaaatctttaagcaatggcccttttcaccaccttttcaatccatttgaagccagaggcttgggtcagtcttaagacactgaaatggacaggcctttttgacgtagttttgtttatacattacctgattctttggcctacctctacaccacagaggaatattcggattgttaccttgttaggagacaaacagccaaaggaaaaatattgaaacctctgttccatcatctatgtatgtaagaactagaaccagtgactgctttgttctcttcttctattaaaaactatgggaatcagtagcaaacaagcttagaaaatgcaagcttctgctttacccaagcaaaagatatggccagaagctataccagcgttatatcccataaaagaaaaaaaactggccaggcacagtggccatgcctataatcccagcactttgggaggccaaggcgggtggatcacttgaggccaggagttggagatcagcctggccaacatggtgaaaccctggatctactaaaaacacaaaaattagctgggtgtggtggtgcgggcctgtaatcccagccaccggagaggctgagaatggagaatcacttgaactgggaggcagaagttgcagtgagccaagatggcgccactgcactccagcctgggcaacagagtgagactccatctcaaaaaaaaaaaaaaaagaaaaagaaaagcagggaagaggctcaaggtcattgtgccgagggatgctcagctaacctgccccatgtcaaagcctttctttatgtaaacagctgtagattgacatagaatcatgaagctggtagatattcatggcatgccatttggatggctagatagttctaaacagtatcactttttgtttttgttttgctttgtattgttttgtttcttaaatttctatctaaaagatgtccttaaaatgagcattgctatgtccaagaagttgcagcattataattcttggaagt

SEQ ID NO: 93897 - DNA, 99609 bp, Homo sapiens
  misc_feature (1)...(99609): n = A,T,C or G
ataaatagaaaaatatctttatatgtgttatgtatgtgtgtgagcctgtgtatgggatgagtttgtgtgtttgtatatgtataaagtgtggaaagacatacaccaaaccattaacactgctggggattgggatatggagtacgtatgcatcaaggaacagagaaaattactgtttgttatttagtttgttgcaaggaacttgtattgcttttgtaattgagaaagaaattcaaataaagtaatggctattatctgaattaatctctaaatgaatatatctttttaaaattaagatggagttggccgggtgcggtggctcacgcctgtaatcccagcactttgggaagccaaggcaggtggatcacgaagtcaggagatcgagaccatcctggctaacacggcgaaaccccgtctctactaaaaaatacaaaaaaattagccgggcatggtggcgggtgcctgtagtcccagctactcgggaggctgaggcaggagaatggtgtgaacccggaaggcagagtttgcagtgagccgagattgtgccactgcactccagcctgggcgacagagtgaagactccatcttaaaaagtaaataaataataataataaaataattcagattgaggtttttttgttttgttttgttttgttttgtttttgctatgttgcccaggctgccagtctggtctcaaactcctgtctcaagagatcctcctgttagctaccatgcccggccatataaatgaatatgccaggcactactccaggcatataaagatgggaagaccggccggacatggtagctcatgcctgtaatcctagcactttgggaggcggaggcaggatgattgtttgagcccaggggttttagaccaatctgggtaacatggcaaaaccctgtctgtattaaaaaaaaaaaaaaaggaagacaatgactttgtcttaaaaggagatcataatctaaagaaagacacagaacaacaatgacagaacccacaatgatgttgaaatgtgttaggtgctgatagaagcatgaagaggcagccccaggagcataggaaaggagtctctcttttattctcaaaaagtgaaagaatgttttctggaggagctgcttaagttggagtttaaccttgcatgactgttttccaggtggagaagggtttgaagagtattccaggcagtaggaactaaattttggaagacagggatgcaagaaacagctagaagcctttagaaactgctagattatgtgagggtgttggcacaggccatatctagaacggactgatgtgctaagggaaggagttcaacttaatgctagagggtttgaacctccttcatacaacaggggaggggagtgacgtgattagatttgtatttttaaaagattattcattctagctgcagagtgtgcagaatataggaaacactaggaaggtagtagttcctgcactcaaagagctaatagtttactttggaaaagagacaaatgatagccagcttttatcaagtgctgactttgccagacactgttctgagtatttcacaaacctatcctatggtaggattttgattcctactttgcagagaaggaaacagacacagaggagtcaaatgacttgcttatagacacccaggcagctagatcaagaacttaattggcagccaggcgccgtggctcacgcctgtaattccagcactttgggaggccgagtcgggtggatcacgaggtcaggagatcaagaccatcctggctaatgcggtgaaaccctgtctctactaaaaaaatacaaaaaattagccgggcgtggtggcaggtacctgtagtcccagctacttgggaggctgaggcaagagaatggcgtgaacccaggaggcggtgcttgcagtgagtcgagatcacgccactgcactccagcctgggagacagagtgagactgtctaaaaaaaaaaacaaaacaaaaaaaacccacaaaacttaattggatgcttcctatatgatacggctcttagatttatagtgtagcatgttaggttctaaggataggtgtcttggtgaccatctgacctgcactagagaatcgggtgaggcttgtattccagaggaagtggctcctagcctgagatcagaggcatagagttgatgtggaggacagtcaggaagaaccctctggggaaagaaagcagattgttaaaaggctctacgctgggaaagaatatggcatattgaggggagctgaaagtcattcagcatggctgggtcatagagaatgaagcgagtagtggggagacggggtggtgaagtgattggggaccagagttaaaaaaactctggtgcattggctcacgcctgtaaatccaaggccttgggaggtcaaagtgggaggactgcttgaggccaggagttcaaggccagcctgggcaacatagcaagaccttgggtctaaaaaaatttttttaaacttttttttgggccgggcatggtggctcacgcctgtaatcccagcactttgggaggctgaggtgggtggatcacttgaggtcaggagttggagaccagcctggccaacatggcgaaaccctgtctctactaaagatacaaaaaaaattagctgggcatggttgtgcgtgcctgtaatcccagctacttgggaggctcaggcaggagaattgcttgaatctgggaggtggagtttgcagtgagccgggattgcgccactgcactccagcctgggtaacagaatgagactccaactcaaacaaaacaaaaaacttttttttttttgtagggacaggggtcttactctgttgcccaggctgttcttgaactctttgggctcaagaaatcctcccacctaggagtcccaaaacactgggattacagaggtgagccaccacatccagggggataaaccttttttttttttttttggacttcattctaaaatcaaggagaagccattggtgaattcaatgtagggagtgactagttttgcagttttttttttttttttttttgagatggagtctcgctccgacgcccaggtgggagtgcagtggcgcaatcttggctcactgcaagcaccacttcctgggttcaagcaattctcttgcctcagcctcctgagtagctgggactacaggtgcctgccactgcacccagctaaattttgtattttttttttttttttttttttttgagacagagtctcgctctgttgcccaggctggagtgcagtggtgtgatcttggctcactgcaagctccacctcctgggttcacgccattctcctgcctcagcctcccgagcagctgggactacaggtgcccaccaccacgcccagctaatcttttgtatttttagtagagatggggtttcactgtgttagccaggatggtctcgatctcctgacctcgtgatccgcccgcctcagcctcccaaagtgctgggattacaggcgtgagccaccgcgcccagccctaaattttgtatttttagtagagattgtgtttgaccatgttggccaggctggtctcaaactcctgacctcaggtgatccacccaccttggcctcccaaagtgctgggattacaggtgtaagccaccgcacttggccacagttaattgtatttttagtagagacgagggttcaccatgttggccagactggcctcaaactcctgacctcaggtgatccacctgccttggcctcccaaagtgctgggattacaggcatgagctaccgcgccccgagtgacccgcctagttttgtagtttagattactctggctactatgtggagattggattaggaagtttaggcctgcaggcctgagatcagttaaaatgtagcttgtcatctagctggccaggatttagggagagggacaactgcttgttaaatggctcttatgtgaattaaattggcatatattaaaggtgatctttgtaaggagcacatgatgctgaagcagttagcacacagtatgagactcacttgtatatgaatgaaatgggcaagcattaaaaaaatgaggattttggagctatacagatatgggttaaacttatggctctgccattcactagatctgtagcctttatttatttatttttgagaaagagtctcaccctgtcacccaggctggagcgcagtggtgcagtctgggctcactgcaacctctgcctgtccggttcaagcaattctcccacctcagcctccggagtagctgggactacaggtgtgcgccaccaagcccgactaatctttgtatttttagttgagacggggtctcaccatgttggccaggctggtcttgaactcctgacctcaagtgatctgctctccttggcctcccaaagtgctgggattacaggcgtgagccaccacgctcagctagatctgtagccttcaatgagtcatatgcgcatcaatcaagtaaaagctctactcttctcaatctggtctgagctaccattattcccagaccagaatactatagtattccgtattttgactggcttctctgtttctggccttgctctcttgctcgagcttcacagagtgtccaaagtaatacttccgtaccacccggcccggcttttttttttttttttttttttttttttaagagacatggtcgcaccatgttgcccaggctggtcttgaactcctaggctcaagcaatcctcctgcctcagcctcccaaagttctgggatgaaggcgtgagccaccatacctggcctgagtgcagtggcgcgatctcggctttcagcagcctcgaccttccaggctcaagcaatcctctcacctcagcctcccgagtagctgggactacaggcgcgcgccaccacgcccggctaatttttgtattttttgtagagatgggatttcactattttgcccgggctggttcccaactcctggactcaagcgattcgcccgcctcagcctcccaaagggaagtgctgggatttcaggcgtgtgccaccgctcccaccccaaagtagtatttattgtaattattattattattttgagacggagtctcgctctattgccaggctggagtgcagtggcgcgatctcggctcaatgcaacctctgcctcccgggttcaagcgattctcctgcttcagactcccaagcagctgggactacaggcgccccccaccacgccaggctaattcttgaatttttagtggagacggggtttcaccatgttggccaggatggtctcgatctcttgacctcgtgatccgcccacctcggcctcccaaagtgctgggattacaggcgtgagccaccgcgcccagcctattattatttttttaggcagtgtcttgccctgtcgctcagggtgtagtgcagtggcgtgatcacgactcactgcagccccgacttctcgggcttaagttatcttcccgccgcagcctccacgcccggttagttttttgcattttttgtagagatgaggtcttgcttttttgcccaggctggcctcgaactccttggcttaagcgaacctcttgccgcagcctcccaaagtgttgggattacgggcgtgaaccaccgcgcccagcctactatctttatcttacagaaagaaaagaatggaggaaaccgaggctcggagacagtaggtaatttccccaaggttccacagctaatgagtggagcggcgatttgtggaacgaaatgaatgaaatcgatgtggcagcgggcccggacgggtcggtggcgtagacgcggagcgcgcagctcacacctggcggccgcggtttccaggaggaagcaaggatgctttggacactgtgcgtggcgcctccgcggagcccccgcgctgccattcccggccgtcgctcggtcctccgctgacgggaagcaggaagtggcggcgggcgtcgcgagcggtgacatcacgggggcgacggcggcgaagggcgggggcggaggaggagcgagccgggccggggggcagctgcacagtctccgggatccccaggcctggaggggggtctgtgcgcggccggctggctctgccccgcgtccggtcccgagcgggcctccctcgggccagcccgatgtgaccgagcccagcggagcctgagcaaggagcgggtccgtcgcggagccggagggcgggaggaacatgacatcgcggaggtgaggagccccgaggggcccggcgcgggcctcggcccggccaccgccgcgttcggttagccccgtccggaagggggcgccccggccgggcttcgggctcccgccccgggtcggggttgggggccggttccctcctcgtcccctcgccctccaggggccgggggccggccccaccgcgcccccacccctcgggtccccattcatttcctgcctccccgagttccggctgcggcagccccggggatgcccgtcaggcccggggcaggtagagccgccgagggaaccacgggtgccagcggccaggctcagcgccgcattcctgacccattgcctcatgagaattgcctcatggtgattccgaaataaccctgctcacttggggaggctccttgggacacgagaggggagttgcgcggggccgggcccccagtggtctagtcgttctggctcactgtgccactttcgtgcatttggggacttcacgcaggacccctgacccttttatatgcctctttgtgtcttcttttcctcctacccctcacgtgccagaaatggaaaaactgactgtatctgcagccactagaagtatttccttcctctgcgatcttcgctttgggagatggaaaggaagggagccgcatctcgttatttaatccttcactgcaaccttaacagtcaggtcactttactggtacccgttttatggatgaggaaaccgaggcccagaagcaacatgctagtaaatgacaagatttgaaacttaggaggattagtgagttaatgagatcctttgaaaggtcagggtaatactactactaatagctaacatttgcttagttctgaccacagccctatcagatggctactattatccccattgtaaagatgagtaaaccgagtttcagaggttaagtaaattgcctaacctcacagctagtaggtggtggagacagaatccctacttttaatcactatgttgcttctattattttgtaactattgctaaccatttgtaagccttaattttgttgtcaaacagtagtgtgacctgttgttttcagatagtgatcctgctattttgtatagtcactctatataccactcacacttaagacccattgtctattcttttccatgattgttcaattatggtcactgtctcagacatttaaaaaacgattcaagctattgaggctatttgaatgagattttcttttctttttttctttttttttttggagacggaggctcactctgttgcccaggctggagtgcagtggcgcaatctcggctcaccacaatctccgcctcctaggttcaagcgattctcctgcctcagcctcccaagtaactaggactacaggcgcaccactatgcccggctaatttttgtatttttagtagagacagggtttcactatgttggccaggctggtctcaaactcctgacctcgtgatccgcccgccttggcctcccaaagtgctggaattacaggcgtgagccaccgtacccagcctgaatgagatttttcaaaatattaggaatgtctcctccaaacacacctggcatgttattcatacatggatctggaatttaaaaaggggagaaaaagaaaactgagaactcgtaggaagtgagtgacttggacaggtcggttggcaagtgcttacagatctgggtaatatataactgcatttcaacagaacagtgtatagcctcaaatgttctaattctttagggagcttttaaataaacagttgtctattctttaatctgtcaaatagtcattgagccttttgttcctggtgtctgctcttccagacaagtaaggatctgctgctttaggagacatcagacggggctgggggttgggaaaaggtctgggtagtaatagaccctacattgtccagtttgttcatttagaagcatagaagtgtgggcatagtcaaagtagcaagtggtaaagatgacagtttgaaatggagtaattccttctcccctccagccctggtattatgcaccacccaaaaagccgggttatgaacataatacacataattttgaatgattcattattttttggattataagcctgttttatttgttaaccagccttaatgaggtataaatgacatgcaattaattgcatatatttaaatgtacaatttgatcagttttgacatacatatacacttgggaaaccaccaccatagtcaagataatgaacacatctatcacccctggtaattttgccttatgttctttataatccttcctttgttcttaggcagccactattctgctttctgtcactatgtattagtttgcatttcctagaattttatttttaaaaattttaaaattgtttgaatagagatggggtctcactgtgttgcccagggcagtctcaaactcctgggttcaagtgatcctctcaccttggcctcctgaagtgttgggattataggcatgagacaccctgcccagccctagaattttattattattgttattattgtgtttttttgagatagggtctcactttgttgcccaggctggagtgcagtggtgcaatcactgcagccttgttttcctaggctcaatccatcccccctcctcagctttccggttactggggctacaggtgtgcaccaccacacccggctaatttttgtatttttttatagagacagggttttgccatgttggccaggctggtctcaaactcccgggctcaagcgatcttcctgcctcggcctcccaaagtgctgggattacaggcatgagctattgcgtcccgccttcaaattactttaacctagtattaattcattcaacaggaagttaatgagccaggcaggataaagcagtaagataggaaaatattgctattttcatggctgagagagagcagacaaacacatgactaaatagggcaatttcaggtagtaataaattctaggagggaaaaaatcccacagaaatgtgaggatgggagaatgcagttagttttgataggtggtttagagaaggtgatcgtgtgagctgacacctgaatgacaattagtagtctgaattttgttttgcttaattatcaaaataactcctcttgggttcggcttttatatgcatccagtaattaaaatgtaagtatattcaatgtactgatatctctcagcatcataggtaggaaaactaaggcattcagcaattaagtgactcctcccttgatcatgtagcagtgatagtactggatttagattttgaggttgcttctctgcccttttctgcctttgtgaaaccaacaaagctgcctgtattttccaactcttccttcagcatgtggtacctcctttacatctgtttttgttgctctgaaatccatacgcgacgatgagctgagaggggcagaaaattgagcttgttctgagactggaggcttttggtttatctcttgcaggtcaagtacattttgtcctgggctctccctggtggccacgtttgtttatctcctgcgggagtaaataaacttgccttgctgaaaaataacagttctgtgtctttgcagtggaaactgggatgtctttattaacgttaggtcctgatgtaaggccaagtttttggttagagttgctcaagtgcagaggccactgctaagatgacttacccctcgtgtccatggtcaatgtggagactgttatgagtggcacatgatgctggaaaagcagagccaactcatgtttgtaattgtcctagcaggccgtggtgtactttgttaggcagccacagaacaatagagaaactcagcttattccccttccctctgggaaacacagacagtacttgccatccaacgccaatgtttttaaggaagaaagaggcaaaaagtgatgttggcaaggtctctgggagttgtggaccccaaccaaggattggagaccctgaaatggattcagatgccctaaaatgcagcccagttcattactatgaattttggaggactttgtgccttgagcaaatgtgtatatgtgacgctctttgacaacactgaaataggaaaaatactatccatgttcgcgaggagcactgaatttagagagggagacagacttttatgccagcatcaaatgaatttgataaagctagtaccaaaatgaaatttgaaattttttttttttgaaatagagtcttactcagtcacccaggctggagtgcagtgatacaatattggctcactgcaacctccacctcttgggttcaaacaattcttgtgcctcagtctcctgagtagctgggattacaggtgcgtgccaccatgtctggctaatttttatatttttagtagggatggggtttcaccatgttggccaggccggtcttgaactcctggcctcaagtgatctgcccaccttggccttccaaagtgctgggattataggcatgagctaccacacaagcctgaaatttgaaatgtattggtatagaatatactgtttagaatgtatgtgtatatatgtatatttgtatactcatataaacacaaatacacattgtatgtgtttctgtaatatgtatatctgtctacacatacatgtatatacacacatacaatgtcttttttttttttttttttttttgagacagggtcttaccctgttgcccaggctggagactgcagtggcataatcttggctcactgcagcctcgacctcctgggctcaagtgatcctcccatctcagcctcctgagtagctgggactgactacaggcacgtggcatcaaacttgtccaatttttctatttttttgtagagttagggtcttgctctgttgcccaggctggtctcaaattcctgggctcaagctgtctgcctgcctcggccttccaaagtactaggattacagatgtgaaccactgtacctggcctttacaatgtctattttaaagataatggttcaagtttttatcatcccactggcctactctaatgaaacatctatccattcattgaagaattatttatggtgggataactctgtgccaggtaccgtgctaggcattgagtattccaggttttaggaaacagcacatgcaaaagtgctgaagtgggagaagatctcggagtgattgaaggctaggagagagcaagtgtgggagctgtgaggctgggaaggtgggaggtaggtgggagcagaccacatagggattcttaatgtctttagtgtcatgtggaccatggagaggagtgtagattgtatttttagagcaatgcaaaatcatagaaggatgtgatcgggggagtggcatgagctgatctatttaaaaatatttctctggctgctgtgaaggaaggattgtaggaggcaggagtagattcagggagatgagacaagtgatgagagaggctttgaacttgggtaaaagtagtttgtggaaagtcttttttggaggtagtttttgtttattgccttgtcatcaaagcagagatgctgaccaatgaaactccatgagaaaatagtgatttataaagacatatctatgcactgccattaaaaagctgcttggaaaaaaaggataaaaagctgctttaacaacttttttttttgagatggggtcttactctgtcacccaggctcacgacctcagctcactgcaacctctgcctcccaggctcaagcattctcccacctcagcctcccgagtggctgggactgcaggcacacgccaccatgtcaggctaattgtgtgtgtgtgtgtgtgtgtgtatgtgtgtgtgtgtgtgtgtgtgtgtgtgctgggactgcaggcacacaccaccatgtcaggctaattgtgtgtgtgtgtgtgtgtgtgtgtgtgtgtgtgtgtgtgtgtgtgtgtgtatgtagagatggggttttgccatgttgcccaggctggtctcaaaatgttgcccaggctggtctcaaactcctgagctcaggtgatccacccgcctcggcctccaaagtgctggagattacagacgtgagccactgtgcccacctaacaactttaaaaaaattttgacatttagtaggatatttattgcattattgttgagatggcaaaatattggagacaactgaaatgttcatcagtggggggggctagttaaatgaaatacagtgtagcatgcattagaacacttttcaagaatttaactttttttgtagccttttacttataatgcttgtccctattgatgccttttttttcagcatgacttactcttttactataggatattaaaatttaattagattagaaatgaggaatattcttgtaatctgtagaaagtaacaaactataaacttattccccaagaacaaatataataatttttctggagtagcaggtaagaaagatataaatttatatgtatacaagaaactgaaattagactttatacatttaaaggttacaagtgcagttttattacatgaatgtattatccagcattgaagtctgggcttttagtgtaaccagcacctgaataacatacattgtacccattaagtaatttctcatccctcaaacccctcccaccctgaaattagactttggatccctagtttaaattccacccctctctttttttgagacaaggtctcactctgtcacccaggctggagggcaatgttgcaatgatagcttactgtagcctcaacctcctgggctcaagggatacaccctcctcagcctcctgagtagctggaactgcaggcgtgcaccaccacattcagctaattttttgatttttttatagagatgaggtcggaactcctgggctcaagcgattctccccaagtgctggggttacacacatgggccactgcccccagcctaaacctcctttctcagtatagcagccttgagatgaagttcctgaaattactggccagcttgactgtttccccacatcactggaggagggggatgcatagataaaacaaaatattcagcatcattgtattttctttttgtttcatcagcatctttttttaaaactcacttgacataagtccctagcctcaaagagtaaagcctttgcagaatctgcattcagatttcgggtgtgatttcctgacagatagttcaggtttgtaaactcttttttttttctttgagacagagtttcactcttgtagcgcaggctggagtgcagtggcaccatcttgcctcactgcaacttctgcccccttgattcacgcgattctcctgcctcagcctcctgagtagctgggattacaggcatgcgccaccacacctgggtaatttttgtatttttagtagagatggggtttcaccatgttggccaggctggttttgaactcctgacttcaggtgatctacctgcctcagcctcccaaagtgatgggattacaggtgtgagccaccgcagccggccaaaactttgttttttttcctctttttgttgctgagaaatgtaaactcttacagacacaaattatgtctcccattttttaaaacccactcaacacaggggtcatgtgtaataggccctggagcttattttagacattgatttgaggctcttttccccaagtgctggtttgtgtgtgtgtgtatgtgtgtgtaagtctttctatgagatgagtggtacctacctgggctgtgtgatcttttttattttatttattttatttttgtagatacgaggtctcactatgttgctcaggctggtcttgaactctggggctcaacctatcctccctccttggcctcctagagtgctgagattacaggtgtgagccactgcacctggccagcgatccttaataaatatagataatggccgggcgtggtggctcacacctataataccagtactttgaggggccgaggctggcaggtcacctgagctgaggagtttgagaccagcctgggtaacgtgggtgaaaccctgtctctacagaaaatagaaaaattagccaggtgtggtggtgcatgcctgtagtcacagctacttgggaggttgagacaggagaattgcttgaacctggaaggtggaggttgcagtgagccgagatcgtgtctttgaactccagcctgggtgacagagtgagaccttgtctcaaaaaaaaatatagatataggctgggcgtggtggctcacacctgtaatcccagcactttgggaggccgaggcgggtggatcaggaggtcaggagatcgagaccatcctagctaacatggtgaaaccctgtctctactaaaaatacaaacaattagccaggcctggtggtgggtgcctgtagtcccagctactcgggaggctgaggcaggagaatggcgtgaacccgggaggtggaggttgcagtgagccgagactgtgccactgccctccagcctgggcgacagagcgagactctgtctcaaaaaaaaaaaatctatatatctatatatctatatctatatagatatagatatagataatgccagatgatggctggttagaagggattgtcaggggctggcaggttttgcaggtgttagaatgagcaagatgaggagaaggatgcttacttccctctccttgtaactctctaccccctcccctcagtgtttttttatttttatttttatttatttattttttttgagacaaggtcttgctctgtcacccacactggattgcagtgatgcaatcatagctcattgaagcccaaactcctgggctcaagtgatcctcttgcctcagcctcccaagtaactgggaccacaggtgcgtacaactatgcccagttaagtttttcattttttatacagacggggtcttgctatgctgtccaggctggacttgcacttctggcttcaagtgattctcytgcctcagtttcccaaagtgctggcattatgggcataagccactgtgcctagcccatcagtgtctttttatcctttactcctatcaaaattcattcactcagcagccattgatcaagtgcctactatatacatgttgaggactggaaatttatttgtctcttctcatcttatctggaccctctgtgttaattgtaattaactgtaatcattctgtattaattgtaataaacttgttgataaactcaaatgaggccataccgttttgccacttcccctccttccaggttatatggatgtacttacattgcaggtttcatttgttggttcagtttttaaactaagccctattgtgtcaaattatgctaggtgtgagatggggagttcaagctgtgtgttgtctttttttttttttttttttttgcctcacttactaatatacaagcgcttataacctttgaggctggccctatacattaagatttttattaattccactgttctttatcttctcttactaagttctcagggtcgaatgaactctaactgctccttgctagtgataagcaagttgcaaattacagaattgtcagtgattgaatacacgtattaaacctgtaactgggaagcatttttggtaattatgaatacttttggaaaaaaaaaagctatggaaggaaagtttaaaatctacgaaagctcaagtagatggtcatggaatagctatttcaatttctaactatatattacttatttatttatttatttttgagacggagtttagctcttgttgcccaggctggagtgtaatggcgtgatctcagnnnnnnnnnnnnnnnnnnnnnnnnnnnnnnnnnnnnnnnnnnnnnnnnnnnnnnnnnnnnnnnnnnnnnnnnnnnnnnnnnnnnnnnnnnnnnnnnnnnnnnnnnnnnnnnnnnnnnnnnnnnnnnnnnnnnnnnnnnnnnnnnnnnnnnnnnnnnnnnnnnnnnnnnnnnnnnnnnnnnnnnnnnnnnnnnnnnnnnnnnnnnnnnnnnnnnnnnnnnnnnnnnnnnnnnnnnnnnnnnnnnnnnnnnnnnnnnnnnnnnnnnnnnnnnnnnnnnnnnnnnnnnnnnnnnnnnnnnnnnnnnnnnnnnnnnnnnnnnnnnnnnnnnnnnnnnnnnnnnnnnnnnnnnnnnnnnnnnnnnnnnnnnnnnnnnnnnnnnnnnnnnnnnnnnnnnnnnnnnnnnnnnnnnnnnnnnnnnnnnnnnnnnnnnnnnnnnnnnnnnnnnnnnnnnnnnnnnnnnnnnnnnnnnnnnnnnnnnnnnnnnnnnnnnnnnnnnnnnnnnnnnnnnnnnnnnnnnnnnnnnnnnnnnnnnnnnnnnnnnnnnnnnnnnnnnnnnnnnnnnnnnnnnnnnnnnnnnnnnnnnnnnnnnnnnnnnnnnnnnnnnnnnnnnnnnnnnnnnnnnnnnnnnnnnnnnnnnnnnnnnnnnnnnnnnnnnnnnnnnnnnnnnnnnnnnnnnnnnnnnnnnnnnnnnnnnnnnnnnnnnnnnnnnnnnnnnnnnnnnnnnnnnnnnnnnnnnnnnnnnnnnnnnnnnnnnnnnnnnnnnnnnnnnnnnnnnnnnnnnnnnnnnnnnnnnnnnnnnnnnnnnnnnnnnnnnnnnnnnnnnnnnnnnnnnnnnnnnnnnnnnnnnnnnnnnnnnnnnnnnnnnnnnnnnnnnnnnnnnnnnnnnnnnnnnnnnnnnnnnnnnnnnnnnnnnnnnnnnnnnnnnnnnnnnnnnnnnnnnnnnnnnnnnnnnnnnnnnnnnnnnnnnnnnnnnnnnnnnnnnnnnnnnnnnnnnnnnnnnnnnnnnnnnnnnnnnnnnnnnnnnnnnnnnnnnnnnnnnnnnnnnnnnnnnnnnnnnnnnnnnnnnnnnnnnnnnnnnnnnnnnnnnnnnnnnnnnnnnnnnnnnnnnnnnnnnnnnnnnnnnnnnnnnnnnnnnnnnnnnnnnnnnnnnnnnnnnnnnnnnnnnnnnnnnnnnnntggggctggtcttgaactcccagcctcaggtgatctgcctgcctcagcctcccaaagtgctgagattacaggtgtgagccacagcgcctggccatatattgcttttttcttattatcagagccagttcataattgtggaaaaatagtgtttgtaacaatgtaagtatggataaatcatctttttaattttgtgattcatataggtttgttgttgttgttgttgttttgtttttatcttgagacagagtcttggtctgtcacccaggctggagtgtaatggcacaaccatggctcactgcagcctcagatgcctgggttcaagcaatcctcccgtctcagcctctagagtagatgggaccacaggtgtgggccaccatgcctgggtaattacaaaacttttttttttttttctagagatgaggtctcactatgttgcccaggctggtctcaaacctttgacctcgcttcagcctttagagtagctatgactataggcatgtgccatcacccagctaattaaaattttttttctttttttttttggtggagatgcggtcttactttgttacccagactgcaagttagtttcagatatcaacatttggtgtttccaaatgcacggggaggctttggagcaagtttttggctcatatgcataggtgtcctagacattcactttgcaaattcttattaaaatgactacagtagcatacagatagggaaaaatatccttgtcagtaccaccgattgggtgagaagagactgtatattaaaaacaatgaccatctttttgccacataaattgctggtggggccagtttgaagagggctttgtcagctgccttctgcctcttcctcttgagtacgtggagttggagtcatccttgacagcctcctgttgacaccacccgggtcacagatgtgaaactgtgtggatgtaggagagagcagtgatggggcttaccccaaggttgctcttccttccctctggccacaaatgtttagtaaggaactgctctgtattaaccatttgctaggggctgcagatacggtggtgaagaaatagacatgttcctactcgggatgctgaggtgggaggattgcttgagcccaggagttggagctgcagtgagccatgatcacaccactgcactccagcctgggggacagagcgagaccctatctctaaaaaacaataaaagaaatagatgtgtccttcaccctcatggaactgccagtctagccttcaacctggtgactgtagaaatgtgtgattagatgctatattgccatgttgagtgtcacccctgagaagcagggttttttttgagaaggtaggatgggggatctgactgtgggaccaccagagggaaaagcacatgtaaaagctgcgtgtaccaactggaggaaatcggagacgtgatcagagaaccagagtcaaccaggggccatgccgtacagggtcctgttaagatctgtgacttttttctaaacgttttcttctggataacatctaaatttctagttccaaatgtgaaactccaagggcgttctgtgctaaacattttgcatgtattaattaatttccaccacacaacattgctgtgaattaagacagtttctaagcatggcaagaaacccagaaatcataatggaaaaatctgataaatttaacaatgccaacatgaacctctgtaggaaaaaaaataccacagactaaaaaggggggaaaaaaaccagagacaaatatttgcaacacatacagtaaagggtaattttctggttatatcaagagctcctacaaatcagtaagaaaaaaaatctaataggaaatgagcaacgacaaactgacaactcatagaaaaggaaacacaagtggtctgaaaacatgaaaaagtgctcagtctcacaaagaaatgcaaactaacatggtaccattttccattaatcagatagacaaagatgaaagagtttggtaatgtatgtagtattggcrcaagtgagggaaaacaggggatttcacactctatgcccgtccaaaccagtaccttattttgagggtggtttgacaatatttgtcaaaataaaaaaattatatatagtcatttgccacataatgatggttcagttgatgatggacggcatacataatggtggtcccataagaatataatgggctgggtgcagtggctctcacctgcaatcccagcactttgggaggccgaggtgggtggattgcctgaggtcaggagtttgagaccagcctggccaacatggtgaaaccctgtctctgctaaaaacatacaaacaattagccaggcatggtggcgggtgcctgtaatcccagctactcaggaggcagaggcaggagaatcgcttgaacccggaaggcggaggttgcagtgaggtgagattgggccactgcactcccatctagatgacaaggcaaaactccatctcaaaaaaaaaaaaaaaaaagaatattatgggcccagccacagtggctcacacctgtaatcccagtactttggtaggccaaggcaggagaatcatttgaactcaggagtttgagactagtggggacaacatagcaagaccccatctcaaaaaaaaaagattatggtggagctgtcctgtatagacataccatttttaactttttttttttttgagatggagtcttgctgtgtcacccaggctgatgtgtagtggcgtgatctgggcttactgaaacctccacctcctgggttcaagcgattctcctgcctcagcttcctgagtagctgggactgcaggcgcaggacaccatatctggctaatttttatatatttagtagagatggggtttcaccatgttggccaggctggtcttgaactcctgacctcaagtgatccgcctgcctcagcctcccaaagtgctgggattacaggcattagccaccatttacaggcacctggccaccatttttaatcttttatattgtatttaaactgtaccttttctatgtatggatgtgtttagatacacaaataccattgtgttacagttacttacagtattcagtacagtagcatgctgtacaggtgtgtagcctaggagcaataggttataccatatagcccaggtgtgtagtaggctctgccatctaggtttgtgtaagtacgctccatgatgttaccacagtgacgaaatcgcctaatgatgcatttctcagaacatattcctgttgttaagcaatgcatgaccgtatcttgacaaagccattttatttctaaaactttaattttacagatttatttgtaaaagtatgtaaaaatgattgtaaaggatatgttctgctgcattatttgtaataacaraaaaccagaggataacataaatgtcctataagaagggttagattatggatggcacattcatacaatggggtattatgtagccattgaataaaagggtactggctgggcgcagtggctcatgcctataatctcaacactttgggtggccaaagaaggaggattgcttgaagccaggagcttggggccagcctgggcaacatagcaagaccctatctctacaaaggaaaaataaaacaattagccaggtttggtattggacaccttcatggtcccagctactgaggaggctgagattggagggatcgcttgtgcctggcaggttgaggctgtagtgagccatgattgtgccactgcactccaggctgggagatagagtgggaccctatctcaaaaaaacaaaaacaaaaacaaaacctcctgtaaaatgtcaagaagtcctagatgtgggccaggtgtggtggctcacacttgtaatccctgcactttgggaggctgaggccaggagtttgagaccaggcagagcaagatagcaagactccatttctacaaaaaataaaaaaaattagttgggcatagtggtgcattcctgtagtcccagctactcaggaggctgaggtgggaggattgcttgagcctgggaggttgaggctgcagtgagccatgatcacacctctgcactccaacctgcgcaacagagtgagaccctgtctctaaaaacaacaaccaaaaaaacccagcaaagtactgataaagatctttggctgggcgcagtggctcacacctgtaatcccaacacttcaggaggctgaggcgggcaggtcacaagatnnnnnnnnnnnnnnnnnnnnnnnnnnnnnnnnnnnnnnnnnnnnnnnnnnnnnnnnnnnnnnnnnnnnnnnnnnnnnnnnnnnnnnnnnnnnnnnnnnnnnnnnnnnnnnnnnnnnnnnnnnnnnnnnnnnnnnnnnnnnnnnnnnnnnnnnnnnnnnnnnnnnnnnnnnnnnnnnnnnnnnnnnnnnnnnnnnnnnnnnnnncatttgtgtgtgtgtcgagtgtgtttcacacaggctcagagggagtagtgtgtatatgcacatgaacatacgtgtcagtgtatatatgtatatatacaaggttgtgggtttgtttgttttttttgagacagagtcttactctgttgcccaggctggggtgcagtggtgcaatcttgacccactgcaaccttcacctcccaggttcaagtgattcttgtgcctcagcctcccaagtagctgagactacaggcacgcaccaccatgcccagttaatttttgtatttttagtagagatggggtttcatcatgttgcccaggctggtctggaactcctggcctcaagtgctctgcccgccttggcctccgaaagtgctgttgcccaggctggagctcagtggcacaatcgcagctcactgcaaccccgacgtcccaggctcaggcaatctttccgtcttagcttcccaagtaactgggactacaggtgtgtgccatcaatgccccaccaattttttaattttttgtagagatggggtttccctacgttgcccaggctgatcttgaactcctggtctcaagcaatcctcccacctcagcctcccaaagtgctgcgattacaggtgtgagccaccttgccctgccctgtacaaagatctgcataaaagcagttaataatactatgtttgaggctgccatcacaggggtgaggtcaaggacaagtgtgagaaattcttttagaatctattttaaaaaaagaagagatgacagtggtgacagtcagggaacagataagcaggtagattgtgggggtctaggctgtctaactggtgtttaaaatgaagcaaccgctgagcctgctgtatttcatttaatggagactagtaaaacaacagccagaaattcttcactttccatctaagagaggcaaaagttattttcccttcaataacctgggactgtaggattaaggtttttttttttttttttttaaatactacaatatgactaccagtataatttaaaaatgattagaattctatttgagtaagaaataggtgtctgcctgaagtagacagtcactgaagtcactaagtggcaaaagacagaaaaaaaattgaaagtaggaaacaatcagcagatatgataccaaacatgagctgtcagtgataatggattaagtccttcaataatggctgagccagatggaattaaaagaaaaaatccaggccgggcatggtggctcacacctgtaatcccagcactttgggaggctgaggtgggaggatcacttgagtccaggagtttgagaccagcctgaacaacatagtgggaccccatctctattttataaaaatattttgaaaaaagaaaaaaaaattcagttgtgttctgctttaaaaagacaaattggcacagaatgtcaaagaataaataaaacaaacatgggcaaaagagattcaggtggtaccaatatcgggctaagtagcattcaagataaagattattaaataataagttagttaatactagagtaattgcatattaatgaaacataatctatggtagagatattatagtcaataattgttttatgtattcattaaggtaacaacaagcaaacaagctttaatagttttaaatgctttatatgctttatagttcttttatgtgcattaattcattaattctcatttcctatgaggtaaacactattattatccacattttacagatgtaaaaaccgaagcagagagattaattagcttgcccaggagatgtggcattctgggatttgagacagtggtttggctctgtaggttgcttcaataaccaagagatgcttcaaatcagatttttaaaatatgtttttcagaagcattttcctgatacttctccccttacatgggtgttagtcttttgggttgaaaaacatgagtaagtgctagaagagcaaaatatgcatccagatttaatagtatgtctgtttttctgagccttggcatttcattgcttttataatagaaatgaaggcttttttttttttttggctgagaatagcactgaactcagtgggagggactgtgggttgtaagttgtccgcctctgaatggagttgaatttaagtttcttggtttccaaagaatgattgatttaaagaccctcaaattgcaagttagaactgacttcagtccttgaggttttttaccatttaatgaataattaaatttatggtaataaatggtaataaatggtaaaaatggtaataaattttaccatttaatgaatttttcttaaaaagcaattgaattgttgatgaaaggtgatgttaaaattatcccagatttatcaatcttttttttattgcccctggattttgagtcatagaaagcctttccttattctaaggttaacaagacattcacccatgttttcctctagtattgcattgtttcatcttttacgtttattatttattttattttatttttttgagacagggtctcactgtgtcactcaggctggagtgcagtggaatgatcttggctcactgcagcctctgcctcccgcctcccgggttcaagcgattctgctgcctcggcctcccaagtagctgggattacaggcacctgccaccgcgcctggctaatttttgtattttttttttagtacagatggggttttgctgttggccaggctggtctcgaactcctgaccttaagtgatccacccgccttggcctcccaaagtgctgggattacaggcatgagccaccgtgcccggcctaaaatttattctgatatgtgatatgatgtatggttctaactactttgttacggtgcattattttctaaatgtggtattggattcttttatattttgtttagaagttctgcatcaatattcatgagtaccattggtctctgttgtttttcttgtgccatctttattggtataggtatcagtgttatatttagtttgtaaaaggaagttggaagttttcctttctttttagtactcaggaatgattttaagaattgagactatttggtctttgaaggtttggtagaagtccattgggaatccatctgggcctggtgattttctgtgcggtagttccttaattgttttccctattttttcttatttttaatcaggtagcctctgaaccagaataggttcagagaggctccctctattttttttaatacaagttggtctgcctaagttttcttactctaatgggttaatttttgtagactgcatttccctgaaaaattacacgtttgttctaggttttctgacttatttccacaactttttagtctttccccctggaatcatgcccctttccataaacaggactctgatgtacctgaagtattttcacacttcgggtggactttctgtttctgggggtggttttagagcaattttaggcctgccactagctaccctgttctctacaccatgctgtttttctcagaatgctcttcttttgcacaaaggcttggagtaggaggttgagcagtcactcactgacgtttggtatattttcttttttttgcttacaggtaatctggaagtttgggcattctctttaagttgagggtgtggttttcatgtcattttatttgtttattgttttcttgtgtgtgtttcttagagacagggtcccactcttgccctggctggagtgcagtggcgtcttgatcatagcttactgcatcctcaagctgctgggcttagatgaacctcccacctcagcctcctgagtagctgggactacaggagcacaccaccatacctaatttttttttttttgagacgaagtcttgctctgtcccccagattggagtgtagtggtgcaatctcggctcactgcaacctctgcctcccgggttcaagcgattctctcacctcagcctcccgagtagctgagactgcaggtgcatgccaccatacccggctaatttttgtattttttagtagaaacagggtttcaccatgttggctaggctggtctcaaactcttgacctcaagtgatccacccaccttggcctcccaaagtgctgggattacaggcttgagccactgtgcctggtccctggctaatttttaatttttttgtagagatgggatcttgctatgttgcccaggctggtcttgaacacctggccttaagcaatcctcccaccctagcctgccaaaacactgggatttacaggcatgaaccattgtgcctggcttgttttgtttttaattctatgttgtttttgaaggatgtatggggagagatggatttaggcaatcatcgttgtccttggctacctgaaagtccaggcactcttctagatactttataaatattaactcattttatcctctcaacaacactatgacatgggtactgttacaccttccattttataggacttaacagagaggttaaatatgtagcccagggtcacagagagctgggcttcagaccaagacaatctggcaccagagtctatgtggctacccctaaggctttgccaccatgtgttagtgattctcagcctgtcatttggggaggggattgcccttttttttaaactttttaaaaaatttattcttattttattatatttttgagacagagtctccctcttttgccgaggctggagtggagtggtgtgatttcagctcactgtaacctctgcctctggggttcaagtgattctcatgcctcagcctcccaagtagctgggattacagttgccagccaccatgcccagctaatttttgtattattattattattatttgagacggagtctcgctcttttgttcaggctggagtgcagtgctgtgatctcggctctctgtaaccttcgtctcctgggttcaggtgattctcctgcctcagcctccggagtagctgggactataggcgcgcaccaccatacttggctaattttttgtatttttagtagagacggggtttcactatgttggccaggctggtctcgaactcctgacctcaggtgatctacctgccttggccttccaaagtgctgggattacaggtgtgagccaccatgcatggctggattgtccttttttaaaaaaaaaaamaaaaacaaaaaaaaaaacccaaaccataaacccaatattctgaaagatttggtctccacacctgtgttatataataattagtttttccatttttttcctcttggtagaaggcacatatgccactcagtttccagttgccacacccaattaacataattgttttgcagccaaaagcaaaagagagttgacattttaattagcttatgtaggtagacaaattgaggcctaatgtaagagtttcattatacctttttgaaaaactataaatagctagaagccagttgtcattactttttgattccttagaattctgggcatctttcatctggaaccacagatgaaagaagctgcaaggaaggattttttttcttaacggaatagtttaaccattctgaatgcaaaagtattggatgctagaataataggtatcacataaattgaggttgacgttttcccgggtgaaattctattctgtctcaattttcctttttttttgagacggaatcttgctctgtcgcccaggctggagtgcagtggcatgatctcggctcactgcaagctccacctcctgggttcatgccattttcctgcctcagcctcccgagtagctgggattacaggggcctgccacaacacccagctaatttttttgtatttttagtagagacggggtttcccaggatggtctcaatctcctgacctcgtgatccgcctgcctcggcctcccaaagtgccgggattacaggcgtgagccactgtgcctggccttttttttttttttttttttttttttttaagacagagtctcgctttgttgcctaggctggagcgcagtggcatgatctcagcttattgcaacctccgcctcccgggttcaagtgattctcctgcctcagcctcccgagtatctgagattacagatgtgtgccaccatgcctggctaatttttgtatttttagtacagatgaggttttgccatgttgcccaggctggcctcaaactcctgacctcaggtaatcctcctgcctcagctcttcccaaagtgctgggattataggcatgagtcaccgggcccagactcaatcttctgacaagctctcagagagagtaaaaagcaaatgaatatttcattattttgatctgagctttacgatttttcttttcttttcttttttttttttttttgagatggagttttgcgttgttgcccaggctagagtgcagtggtggcgatcttggctcaccgcaccctccgcttcccgggttcaagcgattcttctgcctcagcctcctgagtaactgggattacaggcatgcgccaccatgcccggctgattttgtatttttagtagggacagggtttctccatgttggtcaggctggtcttaagctcccgacctcaggtgatccacctgcctcggcctcccaaagtgctgggattacaagcatgagccaccttgcccagccttttttttttaaatctgagaagaggtcttgctcgattgcctaggctggagtgcagtggtgcgatctctgctcactgcattctctgcctcccagactcaagcaatcctcccaccttagcctcctgagtagctgggactacaggcatatgccaccacacctggctaatgttcgtatttttttgtagagacagggttttgccattttgcccaggctggtcttgaactcctgacctcaggtgatcctcccaccttggcctcccaaagtgctgggattacaggtgtgagccactgtgcctggtctccttcactgttgtaagatacttgaattgggtcaatatttgtggagaagtctcttaaaagttcacttgattgtcagtactagaactctacatttaatattgacatattcctgggagcatttcagagcattctattagcttagaaaggtccaggataatttgactttagaagttactgttaccatgaatctcaatgacttttgaaatccatgaagaatatcttttttttttttttgagacggagtctcactctgtcgcccaggctggagtgcagtggtgatctgggctcactgcaagctccgcctactgggttcacgccattctcctgcctcagcctcccgagtagctgggattacaggcacatgccaccacgcctggctaatttttttgcatttttagtagagagggggtttcactgtgttagccaggatggtctcgatctcctgaccttgtgatccgcccgcctcggcctcccaaagtgctgggattacaggcgtgagccaccgcgcctgcccaagaatatctttttgctggtaactagagaggactcctctgaagcagatgccattcatgatggatttcatcatttatgggttttaaaaaacattttattttgaaataatttcaaatttaaataagagttgcaaaatagtacaaataattcgtgttaacttttcatccagatttacaagtcaaccttatacaggttgagtatcccttatccaaaatgcttgggaccagaagtgttttggatttcagattttttcgaattttggaatatttttattatatacttaagcatctctaatccccaaatctcaaatctgaaatatctgaaatgctatgatgagcatttcctttgagtgttatgtgggcactttttaaatttatttaattaatttattttttgagatggagtattgctccatcacccaggctggagtgcagtgagcgatcttggcttattgcaaacttcaccttctgggttcaagtgattctcctgcctcagccccctgagtagttgggactataggcgcttgccaccacggccggctaatttttgtatttttagtagagacagggtttcaccgtgttggccaggctggtctcgaactcctgacctcaggtggtccacctgcctccgcctcccaaagtgctgggattacaggagtgaaccaccgcgcctggccatggattttgcagcattttagattnnnnnnnnnnnnnnnnnnnnnnnnnnnnnnnnnnnnnnnnnnnnnnnnnnnnnnnnnnnnnnnnnnnnnnnnnnnnnnnnnnnnnnnnnnnnnnnnnnnnnnnnnnnnnnnnnnnnnnnnnnnnnnnnnnnnnnnnnnnnnnnnnnnnnnnnnnnnnnnnnnnnnnnnnnnnnnnnnnnnnnnnnnnnnnnnnnnnnnnnnnnnnnnnnnnnnnnnnnnnnnnnnnnnnnnnnnnnnnnnnnnnnnnnnnnnnnnnnnnnnnnnnnnnnnnnnnnnnnnnnnnnnnnnnnnnnnnnnnnnnnnnnnnnnnnnnnnnnnnnnnnnnnnnnnnnnnnnnnnnnnnnnnnnnnnnnnnnnnnnnnnnnnnnnnnnnnnnnnnnnnnnnnnnnnnnnnnnnnnnnnnnnnnnnnnnnnnnnnnnnnnnnnnnnnnnnnnnnnnnnnnnnnnnnnnnnnnnnnnnnnnnnnnnnnnnnnnnnnnnnnnnnnnnnnnnnnnnnnnnnnnnnnnnnnnnnnnnnnnnnnnnnnnnnnnnnnnnnnnnnnnnnnnntcaccaaatgtatattataacaaggactaccatcaaatccttatatctctttcaaattgttttagtaatatccttatagcaaaagacaaaacaacaacaaaaactgttcccttttattttgtttgttttggtccattatatgtccaggttatgcattaatgcattgtgttacttgctaagtcttgttactggcctttaattaggatatttctttgcatcccgccaaactcctcttcatggttgtatctttttttttttttttggagatggaattttgcttatgttgcccaggctggagtataatgatgcgatcttggctcactgcaacctccgtctcccgggttcaagcgattctcctgcctcagcctcccgagtaactgggattgcaggccygcgccaccttgcccagctaattttggaattttrtgagacggggttttgccatgttggtcagactagtctcgaactcctgacctcatgatccgcccgccttggcctcccaaactgttgggattacaggtgtgagccactgtgcccggtctttttttttttttttttgagacagggtcttattctgttgcctggcctggagtgcagtggtatgatcttggctcactgcaacctggacctcctgggctcaggcgatcctcccacctcagcctccttagtagctgggactataggcacacaccaccatgcatggctaatttttatatttttttgtagagactgggtttcgccatgttgcccaagctggtcttgaactcctgggctcaagtgatccacctgccttggcctcccaaaatgctaggattacaggtgtaagccactgcgcctggccctaatttttgcattttttgtagagatggggtttcactatattgcccaggctggtcttgaactcctgggctcaagtgatcttcccatcacagccccctaaagtgctgggattataggcgtgaaccactgtgcctggctgaggattaagtttcaacctcaggggagcggcattcaaactatagcattgtcctttagtgactggcttagttcacttagaatgtttgtctattcatccatctrtagacactgttttctttcaccttttggctttgcaaataatgctgctgtgaatatgagttatagaaaaataccaatttgaatccgtgttttcaattactttgagtatatacctggaagtggaatttctggatcatatggtacttccaagttttttttttttcttttttgagacaaggtctcactctgtcacccaggctggagtgtagtggcacgatcttggctcactgcaacctccgcctcccgggttcaagcgattctcctgcctcagcctctcaagtagctgggattacaggcacgcgccaccacgcccaactaattttgtatttttagtagagatgggtttctccatgttggtcaggctgctcccgaactcccgacctcaggtgatctgcctgcctcagcctcccaaaattctgggattacaggtgtgagccaccgcacctggcctccatgtttcaatttttaaacaaacaattagttaaaaaaataggaaactaagagaatgaactatttcctgttttattcagtgggttataatctgttactatcattgtttattttgaggtacaaattgtccctactttggccagcagaggatcctgcagtttgtctcctgtgtccttttcatagctccttgttggaactcttactggcccacaataggatgttccaagttcatcttcttacttttactgccccaacgctgggatcagccatttcttcaaggaggccagttcctttcattggagaatggaaaacccaatatgtagaaaccaagatagaggtgttaggtgtgattgctactggagtgtcattgcttccaaaccctttcagaagagacctaggaaatgtgtgtgtgtgtgtatatatatatgtgtgtgtgtgtgtgtattcataaaagcacatacacatacacataccccgaagcatgtatttctgtattattattatttttttgagatggagtcttgctctgtcgcccaggctggagtacagtggcacgatcatggctcactgcaacctctgcctcctggattcaagcaattctcctgtctcagcctcctgagtagctgggattacaggtgtccaccaccacgcccacctaatttttgtatttttagtagagatggggtttcaccacattggccaggatggtcttgaactcctgacgtcaagtgatctgcccgcctcggcctcccaaagtgctgggattataggcgtgagccactgttcccatccagaagcatacatatctatttctatatctacatttctgtctttacatgtatatattaaaaattacagtttgcactaatacctccaattacaatctaacatcatgggatttattctggctttctcccttctcatatttgtgtctccccaacagtgagaaacctggcttgctatcctcaacatggtaacttatttattaagaaacttattctttttttttttttttttctgagatggagtttcactcttgttgcccaagctggagtgcagtggtgtgatcttggctcaccgcaacctctgcctcctgggttcaagcgattctcctgcctcagcttctcaagtagctgggattacaggcatgcaccaccatgcccagctaatttcgtatttttagtagagatgggtttctccatgttggtcaggctgctctggaactcccgaccccagctgatctgcctgcctcggcctcccaaagtcctgggattacaggcgtgagccaccgtgccctgcctctagtttatttatttttattccatgtgctcagtcttgcgagcacgtggtctgttttcttgggcctggccccctcagtgcactgtcttaataccctagcccccagtccctctgatcatatccccagacacccctactgaatcccaggtctctaccaagggaaaggcagggaggaggcattgaccaaggagaagagggggaagggacagggaaggtcttgatttgtattttctaaaattttctactctgctcataatgcgtcttagctgtgttgttgtggaaagtagtgctgacagtgtcttgtttttttattacttactttgtctttctttttaagatggtttcacccaaatatcactggtgtggaggcagaaaacctactgttgacaagaggagttgatggcagttttttggcaaggcctagtaaaagtaaccctggagacttcacactttccgttaggtaagttggaatgaaaagagaggatcctgagagtgttttctaggtaggaagtggtaaaaccatgcttggatagcttgctgcctgcatttcgagtttgaaggccttatctgagccctgggctgccttcagggtttggggagtggcctcctggacatttagcagaagaggagtaaggagggcccttcttctccctctgagacctcatggaaggtgagttggagcaggtcatagaagttcttaagccctccagtgcttgagacttgttccacacatcttgaacctggtttctgcatttttcttttccttcctgttgatttatttaaaaattttatttcttttcaatttttttttttttttaaatagaggtgggatcttccaatgttggccaggttggccttgaacttctggcctcaagcaatcctgcctcggcctcccaaagtgttaggattacaggcgtgagccactatgcctggccttctttttttgagacaagctgttgctctgttgcccaggctggagtgcagtggtacgatcacagcttacagcagccttgaactcctgggcttaagtgatcctcccgcctcagcctcccgggtagctgggactccaggcttgtgccaccatgctcagcatttttaaaaaatattttttgtagagatgaggtctcactgtattaccaaggctgatctttaactcttagcctcaagtgatcctcctgcctcagcctcccaaagtgttgggattacaggcatgagccaccacactcagactttgttgacttcttaataagaaaaatacttgttaagagtttcttcagatcactttcctttatcaacaagtaaaacatgactgaggaagttgtggtcccctttgcttccctgcccaggcccgtttccctccctctttccccagaggaaaccaccaagaggttggcatatattcttcctgaacgtgtttttatagttgtactgcacttgtactgtgtatgaacaatataaagttggtttgtgtgtttaaaaaattcacatacatggatttataatgtatgtatcattttgcaacttaaaaatttttttttgagctccatgctgattgataacgatctattttttttttttgagatggagtttcagtcttattgcccaggctgaagtgcaatggcgtgatctcagctcactgcaacctcagcctcctgggttcaagctattctcctgtctcagcctccggagtggctgggattacaggtgcatgccaccatgcccagctaatttttgtatttttagtagagatggggtttcaccatgtcgaccaggctggtctcaaactcctgacctcaggtgatctgcctgccttggcctcccaaagtgctggaattacaggcatgagctaccatgcctggcctttttttttttttttttttgagacaaagtcttgctctttttcccaggctggagtgcagtggccacaatcttggctcactgcaacctctgcctcctgagttcaagcagttctcctgcctcagcctcctgagtagctgggattacagacatgtaccaccatgccaagttaatttttgtattttttgtagagactaggttttaccatgttggccaggctggtcctgaactcctgacttaaagtgatccatctgccttggcttcccaaagtgctggggttacaggcatgagctatcgcgcctggcctgagaaatctcattcttactcctactcccttgcacactatctccattctgtaggtagccatttctattaatttcttgtttacccttctgtgtttctttcattctttttctttttttcttttttttttttgagacaatcttgctctgttgcccagactggagtgcagtggtgtgatcttggctcaccgcaacctccacctcctgggttcaagtgattttcatgactcagccacctaagtagttgggattacagcgcctggtgtacactaccacacccagctaatttgtgtatttttagtagagatggggtttcaccatgttgtccaggctaatctccaactcttggcctcaagggatctgcctgtctcagcctcccaaagtgctgggattataggcatgagccaccatgcctggccctatgtttctttttataaaaataagcaaattaatatttttattactattttccttttatttttacacatcaagtagaacattaaatatatttctctgtaatttttttcagttacctaaatcttttagtgatctctctcatctttttaatcagctggatcgcattctatcatgtgaatattttataacttctatatactgtcaccagcaggtagcgatttagttgtgtctaatattttaaaatgatatataatgcctcaatgaatatagtaaccttttgcatatattgttttgtgctttgggataacactacctcgtattggaaactgtgtcattacatgtgtctttaaaattacatgtgtctttttatttttatttttattttttttgagtgggagtttcactcttgttgcccaggctggagtgcagtggtgagatctcggccgactgcaacttccgcctcccgggttcaagcgattctcctgcctcagcctccccagtaggtgagattacaggtgcctgccaccacgcccagctaatttttgtatttttagtagggacggggtttcaccatgttggccaggctggtatcggtctgctgacctcaggtgatcctcccacctcagcctcccaaagtgctgggattacagacgtgagccaccatgcctggccatcacttttttttttttcttaattgctgcatagtggccgggcacagtggctcacgcctgtaatcccagcactttgggaggccaaggcaggcggcggatcaygaggtcargagaccaataccatcctggctaacatggtgaaaccccgtctctactaaaaatacaaaaaaatttagctgggcgtcgtggcgggcgcctgtagtcccagctacttgggaggttgaggcaggagaatggtgtgaacccgggacgtggagcttgcagtgagccaagattgcaccactgcactccagcctgggtgatggagtgagactctgtctcaaaaacaaacaaacaaacaaaaaaattgctgcatagtattccattgtatgagtagtaacacaacaatttttataatgcatagtattccattgtatgaatagtaatgtagcactatttgtttatacatttttatgattaaaaaacaaaatgtttttctattatgaataaagtggcaatgaatatttttgtacaagtgttttggtagctatacagttattgtcacttaatatatgcaattcgataggccagtcattcaaaatagaagatatacaaggtaggccgggcgtggtggctcacgcctgtaatctcagcactttgggaggccgaggtgggtggatcacctgtggttaggagtttcagaccagcctgaccaacatggagaaacctcatctctactaaaaatacaaaagtagctgagcgtggtggcgcattcctgtaatcccagcttcttgggaggctgaggtaggagaatcacttgaacctggatttataatgtatgtaaatccaccgcgaaggttgcggtgaaccgagatcacgtcattgcactccagcctgggcaataagagcgaaactccatctcaaaaaaaaaaaaaaaagatatgcaaggtaaagatactaataaagacctttgtgttgagttggttgacatgtggttatttcacccatcgtatttcttatagggaataggtaaattcgttccttgggtttctttcaacacttaggtaaaatccgacgtggaagatgagatctgattttactggtgtaactctttatttgtccccttgcctccctttccaatggactattttagaagaaatggagctgtcacccacatcaagattcagaacactggtgattactrtgacctgtatggaggggagaaatttkscactttggctgagttggtccagtattacatggaacatcaygggcaattaaaagagaagaatggagatgtcattgagcttaaatatcctctgaactgtgcagatcctacctctgaaaggtcagtaacattttagtgaccacaaagtctgctgctcccttgtgccctgagtgtcagaaatgcatgacggtctgtgtatgactctctgactccaaaggcttgtgactgttttttgagctgtaatctttaaagaattactaaagtgagactaatagcatcaaattattttcagagtacctttttcctgcaaaagttttaatcagtgttacttacactcatcctataggggttgcataccattcctgcatatacttggtacgtgtattagttttaagacttattgaacttcagcagataatctttgagagttattagaggaaaacaaatgataatggagacaccaaaatagcagcagttttctatggtggctctcgaccagttattcagcaatgtcaccaacagatgtcagtttaagctcagaagtggaaaagcagagagctcagagggtcagctttttcatcagttcttttaatgttatcaccacaattatgtgagaatgaccttgcttagagaaaattatgttattttcgagatctttccccctgtgttggaactaggctgatgaaagcatgggcttgacttatttattgattgtattcgttttgtacattcccaatctcctctctgacttggtgcaaattcaggatctcttagttagtttgtatattttgtgtcttcaggtatgattttttcagcttatacctttatgtcagtgctattatgtgctgataatttgtttctctagctaccaccgtagcttcaggcaaaaggctgtcagccaactctgtacagtttatttctaaattttactgttttcagttgagtatggatgaagaataactcaaagtttattcttttgatgatgagcccttaacaccacctgccatgatagtacttgctttctgaccaagatcctgagggaaaaagccactttattattagaactatgttaagatgcttcccaaaaaacatggagcagtattgtctcaaagtctgtccttggatggctttggatgcctacatcaggactgtctgatgtgctggttaaaatgcagattcctgggcctcattcagacttacatgtattgatattgctggttgtggagcctgggaattcatatttttagcaaaatccctcatttttactccaagtcttatgtgcattatacagtttgagatgatcacccaggatatagtccaaagacactggaggctgttgaagtataggttgtatatatggaaaaggttggaatgtttgaattaatttataatgaagatcctttttaattgagtgttcacatgccaaggcaaggacaaacattcaaaatgattttctgtctctgttacaactttttctttcttttttttaatttatttatttgagatggagtctcactctgtcacccaggctggagtcaagtgacgcgatctcggctcactacaacctccgcctcccagattcaagtaattctcttgcctcagcctcccgagtagctgggactacaggcatgtgccaccatgcccagttaatttttgtatttttagtagagacagggttttgtcatgtttgccaggctggtctcaaactcctgaactcaggtgatccgcccaccttgacctctcaaagtgctgggattataggcgtgagccaccgtgcctgtctctattacaactttttattacaacttctttattttgactttatttttacaaattatttatttattttttttgagatggagtttcgctcgtcacccaggctggagtgcaatggtgcgatctcagctcactgcaacctccgcctcccaggttcaagtgattctcctgcctcagcctcctgagtagctgggattacaggcacttgccaccacacccggccaattttgtatttttagcagagacagggtttcaccatgttggtcaggctggtctcgaattcttgacctcaggtgatccacctgcctcggcctcccaaagtgttgggattacaggcatgagccaccacgtccggccgacttttatttttttttcttgagacagggtcttgctctgtcacccaagctggagtgcggtggcatgatcatagcgcactgcagcctcgacctcctggactcaagtgatcctcctgcctcggccttgtgtatagctgggattacaggcagttgccaccatgccaggctaatttttaattgttttgtgaagatggggatttcactgtgttgcccagactggtcttgaactcctggcctcaagtgatcttcctgccttggccttccaaagtgttgggattacaggcataagccactatgcatggcctgtaacttctttaaatggctataattaaacagttggtccttttaagattgggcaatggacgaatggcaaattgcatttttaaaagaggagggatttaaaaaaaaacaggaaagattggggcatttgtctctaaaggactgtggrctcatttaagaagtttagtggtcattcttaccatctttgtggtttttcctgcctgcatgggatgcagattttctgtctcaggtgggattgatcaatcccttggaggaatgtgtctactttttaattgtgtttaggagagctgactgtatacagtagttttgtgaaagaacaacatgaacccatagtagagctaaattcttttttattttttaaaaactttaggtggtttcatggacatctctctgggaaagaagcagagaaattattaactgaaaaaggaaaacatggtagttttcttgtacgagabagccagagccaccctggagattttgttctttctgtgcgcactggtgatgacaaaggggagagcaatgacggcaagtctaaagtgacccatgttatgattcgctgtcaggtaaatctccagttgaaaaatgggtctggcaagatgttacctttgggtgatttttctgctgacagaagacagacaccattacattcaaagtcagatwgtcttttatttatttatttatttatttatttatttgagacagggtcttgctctatcacctacagatggggtttcaccacgttgggtctggtgacccaaatctttgggtgatttttctgctggaagaggacaaacaccattacattcaaagtcagattttctgttttttttttttttttgtttttgtttttttaatattcatttgtttattcatttgagactgggtcttgctctgtcacgcaggctggagtgcaacctccctgggctcagttgatcttccctcagcctcttgagyagctgggactacaggtgtgtgccaccatgcccagctagtgtttgtattttttgtggagatggtgttttgccgcattgcccagtgtggtcttgaactagtgctcaagaggcctgcctccttcaacctctcaaagtgttaggattacagatgtgaactactgtgcctgatccaaagtcagattttctttgcttacttagtcaagttcgtctatgcttttattatacttaatatattagtatagttactgtattagtatattagcatatttaatatattattatacttatcatacttgagtatattgagtatatttacacttttagtatatttgtatacacacaccacatttttattatttatcttttttttgagacagagtctccctctgtctcccaggctgaagcacagttggctcactgcaacctctgcctcttgggctcaagtgattctcgtgcctcaccctcctgagtagcagggattacaggtgtccaccaccaagcctggctaatttttgtatttttagtggatatggggttttaccatgttggccaggctggtctcgaactcctgacctcaaatgatctgcccgccttggcctcccaaagtgctggaattactggcgtgagccactgcacccagcctattatctgtcttttgatggacatttaagttgtctctatatactagctattgtgaataatgctgcagtgaacatgagagtgcttgaaaacactaatgtaacataaaggtaacaaataataaatgtcatgtgtttatcttgaaaggaactgaaatacgacgttggtggaggagaacggtttgattctttgacagatcttgtggaacattataagaagaatcctatggtggaaacattgggtacagtactacaactcaagcaggtgagcagattggaaagctcaagctttctccttaaaaacttaaaacaaatcctaatagagaattttgcaaacatacagaggtagacagaatagtatcatcagcctccatgtacccattgcagcttcaactatcaaatctttttttttttttttttttttgagacagtcttactctgtcacccagtctggagtacagtgttgcaatcttggctcactacaacctctgcttcctgggttcaagcgattctcctgcctcagcctcctgagtagctgggactacaggtgcccaccaccatgcccggctagtttttgtgtttttaatagagatggggtttcaccatgttggcctggctggtcttgaattcccgacctcaggttttctgcccgccttggcctcccgaagttttgggattacaggcgtgagctaccacgcccggccctaaatcttttcttattatgattccactcactgactgccgctatagtacttggaaacatattccagatttatattattcccatatttatctgtaaaaggcattacagaggttctttttttttttttttttttttgagatggagttttgctctgtcgcccaggctggagtgcagtggcgtgttcttggctcactgcaacctctgcgtcccgggttcaagagcttctcctgcctcagcctcctgagtagctgggattataggtggtgccactacacccagctaatttttgtatttttagtagagatggggtttcaccatgttagccaggctggtcttgaactcctgacctcaagtgatctgcctgcctcagcctctcaaagtgctgggattataggcatgagccactgcatctggcctaaggctgtacagagttttaaagcaagttttcattatagatccacttctggttacctttaggtaacctcacttattcactttggcattgttgctatttcaaatttcacctttatgatagtggaaaatgatataatctctctaaataatgtggtctattcataaagaaaaataggcttgaatttatatcagcagagtaaagtgtatgtgaagactgaagaaagatacattttctggctgaacagaaaacacggtgaaacgatttgaaaacttttattgtgaattacagggtcctatgaaccctctgtccgtgcctttatgaatatcaacatagacatgtttttttttttttttttgcattaacaccgttttctgtaatattttctttattttacatcaactgctgtactcgatcagccccttaacacgactcgtataaatgctgctgaaatagaaagcagagttcgagaactaagcaaattagctgagaccacagataaagtcaaacaaggcttttgggaagaatttgaggtaagttattaaaaaactgtttttacgtgagttgttatatcctatttttagtggaggagaagttgctcttgtgtttggaattggacctgagagacttgaaactgacgtccttttttaattcggccattgattgacacggagcaagttgctgagagggcttcttcgaaacagaagagcattgtgttctgagggaagggagttggcagtgagtagtcaatggatgtgctagccgctccatttggctcttttggtttggactggtggcaaaatctcagagaaacaaaaggatctaatttcttcgaaagatttccagcatgcactggggtctttagaaacaatctatagccttagtgcagcaaatgagtatgagtaaaagagaaacaccttgtggtggcttttttttttttttttttgagacagggtctcgctctgtcgccgaagctggagtgtagtggcgtgatctcggtttactgcagccccgtcctccctgggctcaagtgatcttcccatctcagcctactgagtagctgggactacaggcacatgcccctatgcctggctaatttttgtatttttggtagagatgaggttttgcagtgttgcccaggctggtcttgaactcttgggctcaagtgatcctcctacttaagcttcccgagtagctgggactacaggcacacgataccatgcccatctaatttttgtatttttttgtagagatggggttttgcagtgttgcccaggctggtcttgaactcttgggctcaagtgatcctccagctttgacgtgccaaatgtggtggctttaatttcagagttcaaattgataactctggtaagttaagtgaactgatttcttttttttttaaattatttttgttgattatactttaagttctgggatatatgtgcagaacgtgcaggtttgtacataggtatacatgtgccatcatggtttgctgcacacattaacccatcatttaggttttaagtcctgcatgcattaggtgtttgtcctaatgctctccctcccctttaatgcatcagtgaaaaagtgatgataggctgggcgtggtggctcactcctgtaatctcagcactttgagagggtgaggcaggtggaccacttgaatccaggagtttgcccccatccccagacagtgtgtgtgatgttcccctccctgtgtccatgtgttctcattgtttggttttctgttcctgtgttagtttgctgagaatgatggtttccagcttcatccatgaccctgcaaaggacatgaactcattctttttttatggctgcatagtattccatggtgtgtatgtgccacattttctttatccggtctatcattgatgggcatttgggttggttccaagtctttgctattgtaaatagtgctgcaataaacatatgtgtgcatatgtcyttatagtagaatgttttataatcctttgggtatatacccagtaatgggattgctgggtcaaatggtatttctggttctagatccttgaggagtcaccacactgtcttccacaatggttcaactaatttacactcccaccaacagtgtaaaagcattcctatttctccacatcttctccagcatctgttgtttcctgactttaagtgaactgatctctttcctgaaactaacttgggttggagaatgtccctgatgggaatgtgctgtgttcccattgcactcttctatatcacttacccattgacaatgtgatctctttcattttctcctcatccatttgacagaaaacttcaaaaacaaggattctggcatatttacctttgcagttgtccccagcatgtagcacggtgcctagtacacagaagaaactccataaatgtttgttgaatgagatttacatttaactcatgtttacatcattttattttcctgttctgttttatgggaatgattattctatgctttttgaggactacaatttataaatatttgtggattgaatgaataagtgaatactgggcaaataaagtccttttagccagagtatgtctgaacaacttgctgagatagatatgatttcccattttccagctgaggggcctaagggaggttaagtaaattattcaatcttcataccacagtttttgttttgttttgttttgttttttttcctcctgagacagagtctcactttgctgccatactggagtacagtggtgcaatcatagctcactgcagcgtccaacttctgggctcacgccatcctcccacctcagcctcctgagtagctggtactacaggtgtgcaccaccatagccggctaatttttcattttttgtagatatggggtctcactgtgttactcaggttggtcttgaacttctgagctcaaacaattctcctgtcttggcctctcaaagtgttgggattacaggtgtgagccactgtgcccggcccataccacagatattgattgaattccagcagtggggaggagtgtggaatagaacattctcagtccttgctcaacattactgaacagagacttgaatttgagtttattctctcatcccaggcttcgcgttaggctctgaagacactagtgaacaagacagacagggttactgcctttaaagggagcttttagttgagagaaggaaaacagtgatgaaaagcatcagtgaaaaagtgatgataggctggggcgtagtggctactcctgtaatctcagcacttttagagggtgaggcaggcagctcacttgattccaggagtttgagaccaggctgggcaacatggtaaaaccccgtctctacaaaaaatacaaaaagtagctgggtgtgggggtgcgcacccacagtcccagctactctgggggttgaggtgggaggattgctcgagcctgggagattgaggctgcagtgagctgagatcacgtcactgctctccagcctgagcaacagagccagaacctgtcccaaaagaaaaaaaaaattgatgataaacatagtgagacagaattttgaaatctcagcctcactgttgccttccttgtcccctgcctgcctaaataataaaaggcagcatttcagcagtcattcatttcattactttcacttcatttcaccttcataaagcctcatgaggtaagatgggaagatacagaagttttagaaaccgctcatcaaaattgaatggaaagccgattgttccaaaactttttagtgtggaaaatttctattatatgcaaaagtagagagaatgggatagttatagcagtatacctgacacccagcattaacaactgttgataatatggccaatctttttcgactctgccccactcacttccccagccctgacttgtcttgaagcaaatactttttttttttttttgagatagagttttgttttgttttgttttttgtttttgagatggagtctcactctgtcccccaagctggagtgctgtggcttgatcttggctcactacaacctccgcctcctgggttcaagtgattcttgtgcctcagcctcctgagtaactgggattacaggtgtgtaccaccatgcccagctaatttttgtatttttagtagggacagggttttcactatgttggccacgctggtctcaaactcctgacctcaggtgatccgcctgacttggcctccgaaagtgctgggattgtaggtgtgagccactgctcccggccttgaagcaaatcttaacacatcatttcgtctgtaactattttatttcaaaaaattataacctgaatagcattatcatatctaaaactattaacagtatttccttaatattaacacatatcagtcacattttcctgattgctacacacacacacacacacacacacacacacacacttgcaatttgtgtttttttctttttagatggatctcactctgttgcccaggctggagtgcaatggtgcattctcagctcactgcaacctccacctcctgggctcaactgattctcttgcctcagcctcctgagtagctgggactacaggtgcccaccacctcacctggctagtttttgtatttttagtagaggtggggtttcaccatgttggccaggttggtctcaaacttccgacctcaggtgatccacccaccttggcctcccaaagtgctgggattacaggcatgagccactgtgcccagcagcaatttgtttgaattgggagtgctttcttccaccttgattatgaaaaaatttcaaatgtgtataaaacagattcatataaaggatcctgatatgccattatcagctttatcaattatccctgtcatcatattttttatttataaatatttcaatatttgtggaatccttaaaaatgcatcacataacccaacattgttcatattataccaattgtcttataatttaaaaatattttgttcaatcatttttcagataagcttcacacactgtggttggctaagtctcataatatttctgttgtaaaaatcttaagtctgggcgtggtggcacacggctgtcattccagcactttgggaggctgaggtgggcggatcacgaggtcaagagatcgagaccatcctggccaacatggtgaaacccggtctctactaaaaatacaaaaattagctgggcgtggtagtgcgtgcctgtagtcccagctactcgggaggctgaggcaggagaatcgcttgaacccagaaggtggcagttgcagtgagccgagatcgcgccactgcactccagcctagagacagagtgcggcttcatctcaaaacgaaacaaaacaaaacaatcttaagtctcttagaatactttgatgccccttccatctctctttttctgtcttccttccccctctccctgtcttttctgctgttgaagaaagcagatcatttgtcctgagagttacttatagtctgaattttgctgagtgcctctctgtggtggacttaagcatgtatccatcccttatatttcttgtaagttgatatatctagagacttcattggatacaagttttctttggcaagatagcatgtatggtggtgtatcaggaggtgtttatgtcctgttgtttcttctctgattttcttagcagctcctgatcattattacttagatccattaattcataagggactatatggtagtgatattgtaattttatcattcttcttcatttgttaggttggcatatttctataaaaagcttttcatcgccgagggttgattttttccttcttactaagcagttttcttttctttttcttttttttttttttgaggtaggtctcactgtgttgctcaggctggtgtgcagtggcgcaaacacacagttgcgaactcttgggctgaggtgatcctcctgcctcagtttcctgtgtagttgggaccacaggtgcatgccaccatgcctggctaattttttgattcttttgtagagatgaggtctcactttatttcccaggctggtcttgaatgtctgggctcaagcaatctttctacctcagcctcctgagtagctgggactacaggcacataccaccatgcccagctaattttttaatttttatttttagtagagatgtggtcgtattatgttgctcaggatggtctcgaactgcagagctcaagtgatcctcctgcctcagcctcccagtgtgctgggattataggtgtactacaggcaagagccaatgagcctggtcagatttttttttcctgatttgaaatctgttatgggttcaattgatacttccaaatcaaactcagggtttcaggatttttactaacctcattgatcttacccatgtatctcctttctctaatgccaaaaatcctacttcttgaagccataataagattattcatttgttttatcccacattacacacaacaatcttagaataatgacttcccaataatatgattactgaaaacagtttaattttttttgcgcttttcaaaaaaatccttcagagatgtgtagtcaagttactgtattctgctgggcacagtggctcacgcctataatcccagtactttgggaggacaagaagggaggatcgctggacctcaggagtttgagaccagccggggcaatatagtgagaccctgtctctacaaaagaaaattaaaaattaaccagacatggtggcatgtccctatagtcccagctattgagaggctgtggcgagagtaggcttaagcccaggagtttgaagctgcagtgagatacgattgtgacactgtactctagggtgacagagcagggaccctgtttttaaaaaaaaaaaatgaaaaaacttcctgtgccttagactcatttgtaatcgtccttctctctgtgtggctatatgctaactgggtatatggttagtttatttgtttcatttaaaaaatctctttctgttaagttttatttataattacacaaatactggctttgatagtcaaaytgaaaaaacaaagtgtattcaaagaagtctaccttctatccttgtcctttcctatgttttagccatagtataaaaagttatggtttatcattatatttcaaaaatataagaagatattcccatatcccactttttcttaaacagtagcataactttacatacttttttctaaccttgcttttttaaatatcctggacatcctggatatccataatagtgtctagagatagtcttcattctttttttactgtatagtaatccactgtgtacttgtaccatagtttattcaacctattgatgggcatttgggtagtttccaaatgtatcacagagaggattacagtgaatagccttgtgtatgcatcctgctttacttttgctgactactggtaatattaacattttttatgttctgtatttaaaaaatggtggttattattcatctataacttttattatacatgactttggttagcatgctttaaccttttagcataacatttgcaagctacttgttttaattaaaattttggttaaatgtaaaaaatagtgagctattttgtaatctagattcaatagaatcttatacttcctttacaaatgatagctgagttgatcatttgtgtaaatgactgtgaacttaaaaattacagcattttttaaaataaatttttttaacattttaaaattatttaaaataatagacacacaaagtaaaaagagaagaaaaaaaaaagagacagggtcttgctatgttgcccaggctggtctcaaactcccaggctcaaatgatcctcctgccttggcctcctaaagtgtaagccaccacacttggcaaaaattagtttctttaaaacaaaaacattacaggttatctggtaccatggtagcttctttaacactaggttcacttagaacaaagcttaggaacaaagtcagactttcacaaagagcttgtgtggcaatggggtattttttgcaaattccattggtggggtcaagatgtgagtttagaaggaactcttagcctgactcttctggccatggaaaaagatggttgcttctaaatgctgacctggtgattttacactgtcacatctcaaattgtggtcatcttttatacattattaacaacaaaagggaaaaattgagttgactttaagaggaagtggaaaataacgagatcacatctgtactctacaggctctccacagaggtcagactgaggtggtaaaattgttgtgcactaaattagggcattaacgtttcatggaaactgaagctatatctaaatagctgatggcctgctttctagatctcctatatacctgcttctcaaattcagtctgttttaaaaaattgccctttgaggttggaaccagcgaaataaggctgaaaacagaataagccattattgaaaaaattaggaacttggaagcagatactcataatctaaatcctctgaagctaaagtttgatccacaatagcaaagcattatcattttagtgattgtaccttagttgtttcctggcaggtgataaatttgggatcactttcttcttacagtgtgctctgatagtctttaaaacaaaccagagctctaaattgtaatgccattggtaatttaactctgatttgtctctatgcctgtctcctggtgttctgtaaaattctacacgtcatttcaggtatcactatccagaagacgttacttttgcctttgatgcactttaaaatgtgaagtctcttgtgaagctctttggttattttctcctttgctgctgaaataaattcaggttgatgattttcttgtaggatatgttgtgtgatctagacattgcaaacccaagtctttgatttttttttccctacagattgcctgtttcttttttattttaatttttattagttattattatttttgagatggagtctcactctgtcacccaggctggagtgcagaggtgtgatagctcactgcaacctccacctcccgggttcttgtgcctcagccacccaggtagctgggattacaggcacgtaccaccactctcagctaatttttttgtatttttagtagggatgggatttctccatgttggccaggctgatctcaaactcctgaccttaagtgatcttcctgccttggtctctgaaagtgttgggattacaggtgtgagccactgtgcctggccagttattaatttttttaaagagatggggtctcactatcttgcccaggctggagtgcagtggctctttacaggcactgttgtagtgcactgcagccttgaactcctgggctcaagtgatcctcctgagaggctggaattacaggcacacaccactgtgtccaacagattgcccatttgtgatctgtgtaaatatctctcacttcctgcagtatctctgctcaagaatgtaaagagatggataatatttttagatttgttgaaacaaagtaaagttctgctcaaatgagaatgacactaactaaatgaaaaggccggttataattctgtaattttgtgcctgcaatgtgtgtgttattgtacacttgaatcggccctgtgcattgtggcgaggtgcatattgcatggttgtattgaaaaggtgcttgggccgggcgtggtggctcacacctgtaatcccagcaatttgggaggctgaggcagctggattacctgaggttaggagttcaagaccagcctggccaacatggtgaaaccctgtttctagtaaaaaatacaaaaaattagctgggtgtggtggtgggtgcctgtaataccagctactagggaggctaaggcagggagaattgcttaaacctgggaggcagaggttgcagtgagctgagattgtgccactgcactccagcctgagtgtatcacaaaaaaaaaaaaaaaaggtttttgccctctctctgtgcctgctgctccctgttgagtcctataggcctgagctgccagggggtactgtgggctgagactggacattgcaaccgactgcaaggcaccgtgggacccaggttgtggatggactgtctctcgggctttcttctttccattcatcttcctcctctaactcccctctgtatccagtatccttgctctccatacacctgcttcattctttttccttcagtagatttttctgcttcttgacttacaaaccctacttctagcccctttcagatattgaaactagcaactttcaggctttgtaccaaagtctcagagattctcattgactcggatgccatccatctctagtccaaagaacaatgtcaaggacatgaacatgtggaacaaaagtgtctgctgtggacacctttggggagaaatagttttcagtgatgagggttgtagtgagttgggcagatatcccaaaaatatctgccaaaaactatagacacttctggttgcagtgacttattccttccttcattcagcaaatactgattgaacaccgactgtatgtctggatctattctaggttttgggggtggagcagtgaacaaatcagtctttatctttatagagtgtacagtcaagtgggagagacaggcagtaaacaaagaaacagttcaatattcaatctgtgagatggtgataagtgctacagagaaaacaaactagtgtaagataaaaagggtgttttgataggcctttactatttaggtctctttgataaggtggcatttgaacaaagctctgaaggaaataatggagccaaccatgcatataacctcagggagaacattctaggtagagggaacagcaagtgcaaaggccctgaagtgggggtttgtttaccttgttgcacaatctgcacacaggccagtacaattggaatggatgggaaatgtaaaagagagaagttgaaaaggccaggtgcagtggctcatgcctacaatcccagcattttgggaggctgaagtgggaggaatttgagatcagcctgggcaacagaaccagacctcgggctaatttttgtatttttagtagagacagggtttcaccatattggccaggctgatctcaaactcctgacctcaggtgatcctcctgcctcagcctcccaaagtgctaggattacaggtgtgagccatggcccccagccgtatctttgtcttaaaaagtaatctctgtgcttggtaggccaagaatttaaaatataaaaaatttaagaaagaaaaaaaataagtaaagtaactatacaggttggtctggccgtaatggtgagtgtcattatttttcttccctaggtattttggctctgttgctcagagcagtgcaggcgaaatggtcattagggcatcgtcatggtgcctggggatgcctggctcagccagtttattttctgtctgcctctctccttggtccttttcctccactttcattcatgaaattctagtcaagagctgggtccagtggttttcaatccaagggctttggaagcctctggggtctattttggtcattgcagtcactgggctgctgctcctggcatttaggttggcaggggtctgggctgggaagcaggaatgttcagtggccataaatgtaagggttggtcttacatttacataagggagacaatgaaaacttaactcctccacrgtagtggagtagtgccgttgggtactcacagtcagtagtgccgttgggtactcacatgtacaacatggatcaggacattgactttctgtggataccttttaatagtttattagatgtgttaggctgttttgcactgctctaaaggaatatctgagtctaggtaatttataaagacaagaggtttaattggctcatggttctgaaggctgtacaagcatggctccagcatctgcttctggtgagggcctcaggaagcttccggtcatagtggaaggcaaaaggagggcagacgatcacatggccggagtggtggcaagggtggggtgggagccacgctctttttttaattttattttaatttgagacagtgtctcactcttttgcccagcctggagtgcagtggcgtgatctcagctcactgcagcctctgcctcccaggttcaagcaattctcctgcctcagcctcctgagtagttgggactacaggcgcgcatcacaatgcccagctgatttttgtatttttagcagagacagggtttcaccatgttggccaggctggtctcggactcctgatctcaagtaatcygcctgcctcggcctcccaaagtgctgggattacaggcatgagccactgcgcacggccaccacactgttttaaacaaccagattgcacgtgaacttagagtgagaactcactgtgaggatggcaccaaaacattcatgaaggatccaccaccttcctttaggccccacctccaacactggaggtcatatttcaacttgagatttggaggggacagacatccaaaccgtatcattaaatttaatagttttatgcagtttttttggctctagatctgtttagactcctgcagtcaggtgtctgtaactagcctctggtcctttttgagagttcacagtttggtgcaaaccctttggatgtattatttgggaaaatgggatatctggcagcctgtgtccctgctttacattatcctttttgctgcctgccccaagcctcctcattagcatccctgccaaggccagtggagaaggatggagatgcggtgacattcagcttgacaggtcattagcagcttttgtgccctagggactgctggtgggagggagrttgtggaagataaaccctgacaggaatgtattctcctcgagggcagggtttatttgatatttttctggagcttagaaccataagcctggtgctggggaggaagcgcccttagcatttggtagcctctgtgggcagagcatggaaagtcacaacttctgaattgtttgtattttcagtctcactctagatggatggcatcttctgctatgggaaatgaaatatgtttaggcaacttgagtcccaggtgcagatgaggctgggctaattggtgcactagggaaggagccgggggagagatgtgctgttagctattatcaatctgtgacarctgtcagctgctggcagttagcacccacctgagcctgggatgcaggggtgcctctcctgtcctctgtggaagcctctggacccagcagccatcttgactgtgcactgttcaagccccaagtccgcctggaagaggtgattgagaacttactgcaggataaggaaagcgcaggacaggtgcagtggctcacgcctgtaatctcagtgctttgggaggctgaggccggaggagggctggagtccttgagtgcgagaccagcctgggcaacatagtgagaccctgtctttacaaaaaggaaaagaattagccagatgtggtggtgcgtgcctgtagtcccagccactcaagaggctgaggtgcgaggatcacttgagcccaggagtttgaggttacagtgagctatgatcataccactgcattccagcctgggtgagagagcatgactctgtcccaacaacaaaaaaaaagattaagggaagcctctggcagacctgatgatgggtggcccagccaaaatgagtattgatgaggatttccctggtctggaactctgaatttagtctggcaaagtattccctttgtgttgtgagatgattcttggtgttaccccatcacggtaggtaagatgaattagcaaatgagaaaggctttctctttttcatccttatctagtccgtagatgaagcctgaagaaggtctccatatggtagtagtaagtgtttaacatctacctctaacacttgcctgtgtctttttttttttgcaaagcctcaggaatgccccagtatctaggtagaatttgataatatttcatttttgttatattcccttttctgtttaccttctatatacagcaaaatgaaaaaatttttaaaatttgtgcaagtaagggcaatttcttttttctttttctttttttttgagacagggtcttgctctggcacccaggctggagtgcagtgacacaatctcggctcactgcaacctctgcttcctgggtttaagcgattctcctgcctcaggcttccaagtagctgggattacaggtgcctgccaccactcccagctaattttcatatttttagtagagaccaggttttgccatgttgactgggctggtcttgaactcctgacctcaggtgatccatccaccttggcctcccaaagtgctgggattataggcttgagccactgggcctggctgaggcagtttctttttgaaatatattttgtgaaggagaaaaagaggagttcagtttaaagaaacaaatgacataagaggtggtatgcagagatgccaaagcatcttgaaggtgcttttttttttggaaacagagtcttgcttcattgcccagtctggtctgcagtggtgcaatcatggttccctgcagccttgaccttctgggctcaagtaatcctcccacctcagcctctcaagtagctgggactacagatgcatgccactatgtctggctaatctttaaattttttgtagaagccagctctcaccatattgcccaggctggtcttgacctcctgtcctcgagcaaaaataccgattttgattaagtctggggtaggacctggggctgggattctaaccagctcccaggtggtgctaatgctgctggtctacagaccacacgtggagtagccagtgtagagttcatgtagcaatagtgatgtcatagaaatagccagtatctgtatacttgctttgttgtatgtcacgcactgtatagtgatgtacatgcatctcatttgaccctcaccccgcccctttgggggtagaaaggattgtgctcatttcacactcaaggaaactgaggcacagacaggcaaagtagcttggcgaaacagaaaggaacttagaggcaggccctgattagctcagagactagaaggccttgtgcgtcatcctgaacagcttggacttgatcttgaaggtggagggagaaattgaagggtaattaaacaggaactgtaggaaattcaccttgcatagtgattgctttggccacgtgtgccctgccaccgcccccccacctcagtgaagtgtcatgcgaagttgggttcgtaaatgaaggcccgaatgctttcctgacaagtttgttttaaatcaagctgctaattagtcccagtccccctcccccggtatgtatttttttgttgatgtcgtttcacttcatttagttgaagtgattgattcagttcagtgtttgaacttctttttgaacctcaccttaataacctgtctaaacatcaaggttaaaccttcttgctaacacagcagtattgcttggtaagactggctcacagtccaaggaaatgcttgcccagagagggcaaactgccttaactccttaacctgagctcattaaaaaaaattcaaatgactgattccttgtcacagttctacctacattgtttttatttttgtccaggtttcagctagttaaatgcttttgtgatgagcttatgtccaggctgaaggttgcattttgaaactgagcgtcaaataccaatttaaagtccagacctttacacttgtgaaattcagataaatgaaatggaaataaaacagggctgctgtgttgtgaaatatgactgtgtttttccttgtaggactctttgagggtagccattttggcattttatatataaattttcttttcttagcctaccttttactttcttgatttgcctatttgtgatttcccattaaacactaggctttttgtaaaccaattatcccttgaaattgactttttttttttttgagacaggatcttgttttgccacacaggctggagtgccgtggctccatcatatgataaacagaaagagagagagagagagagagagagagagagagagagaccctgtcttatttaaaacaaaaaaagaagaagaaaaaaagaatayagatcacagctgttatttgtatatgctacgccaatccttgttgggtttcattctttataattgttatttttaaagatttttcttatgaatattctattgtttcattgtagaaaatttaagggagaacacagtgggaaaaaaaaaacaagaaaaggacttcataatcctgctaccctgggagaaaaaaaaaatcaccattacctatttggttcttctcccacttttttttttttcgagatggagtctccctttgttacccaggctggagggcagggacgtgatcttggctctctgcaacctctgcctcctgggttcaagcgattctcgtgcctcagcctcccgagtatctgggattacaggggtgtgccatcacacctggctaatttttgtatttttagtagagacggggttttgtcatgttggccaggctggtttgttggccatgtctggttttttgtcatattggccagtctgtttgtcatgtcaggctgacatgttttgtcatgttggccaggctggtctttaactcctgacttcaggtaatcctgaagtgctaggattataggcgtgagccattgcacctggccttctgccttttttttaaagaaaaaaaattaaaacatttttttctttttaagatagcgtctcattttgttgcccaggctggtcttgaactcctgggctcaagtgatcctccagcctcagcctctggagtagctgggactacagatgcacatcatggtgtccttatgccatttcttttgtacgtaggtgaatgcaagtgtatgattacatcatatgctattttggaggtttgactttcttttcactttcatcatctttccaaggtgttattttcctagtacatctttttaaatggacatagaacattcttttgtatgaacaaacaatagttttatttaggcggtcctttcctgttggacatttatattattttcagcatttctccacagttgttgcagcattcagatgaaccttctttttttttttttttgagacggagtctcgctctttcgcccaggctggagtgcagtggcacaatctctcctcaagtgattcctgtgtcaccctcccacgtagctgggattacaggtgcccatgtctggctaatttttgtgtttttggtagagctgtggttttaccatgttggccaggctggtttcgaactcctgccctgaagtgatctgcccacctcagcctcccaaagtgtggggattacaggtgtaagccatcacgcctgacccagatgaacattcttgtagctatcgcacacaattctgaacatttcctaggatgaattccttaaagaagtaatgctgatccaggcttttttctttttctgtgactctttgacacgtaataatattgacttttctttctttccagacactacaacaacaggagtgcaaacttctctacagccgaaaagagggtcaaaggcaagaaaacaaaaacaaaaatagatataaaaacatcctgccctgtaagtatcaatattccgctcagtaatagtcactcttggagattttgattcctagcacctctgtacctttcctcagggtcgtgtgctcttgttagcacatcggaggccttagcttctttaattgcaagcagtttccaaaataatcaaccatggtgggtgttgatgacttcattcactgagctcccgtgatgctgattactgagtaaagttgccactaggtggctttgtctgtggttggttccttctgttaattaattttctgtctgcccaagatagatcatctcaaggcttgggatctctcagtgtcagggaccttagggtgccagatttgtgtcttgactcctcctcactgggcctgtgagtcctgggtaaggcctgcctcctttctgggactcagttcccttaagtgggaaacagacaaacacctcctgagggctcctagaactgttctgcttgctgatcccctgagctcaagttactggagaaagggtatatacctaaactgctcagaagaagactttgtgggccgggcgcagtggctcacacctgtaatcccagcactttcggaggccgaggcaagcggatcacctctgatcaggagttcaagaccagcctggccaacatggtgaaaccccatctctactaaaaatacaaaaattagccatatgtggtggtgtgcgcctgtaatcccagctactcgggaggctgaggcgggaaattggttgaacccaggagatggaggttgcagtgagccgagatgtgccattgcactccagcctgggtgacaagagcaaaactccgtctcaaaaaaaaaaaaggaagactttgtgaatattcgcaaagctgtaaagctgtacctttcaatttttttttgagacatagtctcactctgttgctcagggtgcagtcacagctcactgtagcctcaacctcctgggctcaagcgattctcccacctcagcctcctgattagctgggacaataggcaggcaccagtacacctggttgattttacagtttttctgtaggccggcgcagtggcttacgcctgtaatcccagcaccctgggaggccgaggtgggcggatcacctgaggttaggagttcgagagtagcctggccaacatggtgaaaccccatctctattaaaaattacaaaaattagctgggcgtggtggtggatgcctgtaatcccagctacttgggaggctgaggctgaggcaggagaatcgcttgaacctgggaggcggaggttgcaatgagccggaggtgctatgtgcaccactgcactccaggctgggcgacagagtgagactctgtctcaaaacaaaaaacgatttaaaaaataataaaattttttctagggcggggtctccctatgttgcccaggctggtcttgaactcctgggctcaagtagtcctcctgcctcagcctcccaaactgttgggattaccagtgcaagccattgtgcctggctgtaccttctgtaacacccaaatgccacctggcaaagcccaagttgaatcatgaggaaaaaaggcctggaaggatgtagaccttccttttttctacttatttatttatttatttttgagatagggtcttactctgttgcccaggctggagtgcagtggcatgatcatgggtcactgcagcctcaacctcccgggctcaagtggtccttcccaccccagcctgcaatgtagctgggactacaggcatgtgctaccatgcccagctaatttttgtattttttgtaattattttttttgtagagacagggtttcgtcatgttgcctaggctggtctcgaattcctgggctcaaacgatctgcctgcatcggcctcccaaagtgttgggattacaggtgtgaaccactgtgtctggctatatcttctgtaacacccaaatgccaccaggcaaagcccaagttgaaccaggagggaaaaaggcctggcaggatgtaggccttgcatgaggatctcagaaactgcactaaaccagtcacagttcctctctcccgaggtctaactctatgctgaactctttgcatttttatctcacttaatccatatcacatgcacaggaaggaagcattcgtagtatcctggtttcctagaccattttagcaaggttataagtgaaggggagtgggtgggagaactggcactagagcccccaaagtcactgttcttagcaccactctaatgcatggggttctccattgatgtgctatgcaaggcagtgcactgaggagaaaggaaggaacatttacaacttctctttatttatatcctgtccctaaaaaaaaaagaaaaagaaaaatttgtctgaggcctagattgattgcagggagtgcataatgttttattgattgattgattgattgtatatagagatggggggtctcactatattgcccaggctgatctcgaactcctaggctcaagcaatcctcctgctttggcttcccaaagtgctgggattacaggcatgagcgactgcacctggctatgcatactatatttatccaacttacaaataaggcttgcttgcctgtagtgcatatgtgtatacatttcagcatagaaaaactgtgtgattgggggttgtgatcaaatttggagagcattgctctcatgtcttatcaggtcagagtcattttgtcaaatcttgtaaaccattctttgtgtgtgtctatgcatgaaacatagtctttctctttctgcatgcatatgtacatatacatggtatatatgtatatcatatctacatggatattgtaatgtatatgtatgaggatgggggaaagtggagacatttgtaatactgagaaaaggcagtgaggaatttgcagagaagcagtttgagctgtagcatggtactagtgaccttgaggaagccttatcctttttttttggaatttattttttcaatttttagaaatagacaagagtttctctatgttgcccaggctggtcttgacctcctgggcccaaactatcctcctgccttggcttcccaaagtgccaggattacaggtgtggaccaccatgcctggccaccttgtcctttctatgtctaagttgtgacatctgctcaggggtcaggtggtattaaatggtataaaatgtatgggaaagtgaagggatcaatggtatgcagtatctaaatagaatatcgctttttcctcccttaaaggtctcattcagatgtttcctctgatgaacatctcatttccttaaagatgaggagtctgaagcaaaaaagacattattcttttaagacacatggctgtcttactaattcccattgcaaaatatgttgtttaggtagagcactcagatttttatacgaataatagacttttgtacagaatttggacagttgatactatcagagccttgtgatattccactgcattatgcttcactaaaaaatacctggctgggtgcggtggctcacaactgtaatcccagcactttrggaggctgaggtgggcagatcacctgaggtcaggagttcaagatcagcctggctaacatggcaaaaccccatctctactaaaaatacaaaaattagccagatgtggtggcacgctcctgtaatcccagttactcaggaggctgaggtatgagaattgcttgagcccaggaggcagaggttgcagagagccgagatagtgctattgcactccaacctgggtgacagaggaaaaccctgtctcaaaaaataaatttaaaacaacaacaacaacaacaacaaaaacccctctttattatggaaattttcaaatatattcaagagcataaagaacccacatgtacccatcacccagcttcaacaattatcaactcatgcccagtcttggtttcatctatactctgatccacatctcctctctccttgaattattttgaagcccatctcagacatcatgtcatatatgtatacttcaatcttctttttttttaaaactccccctccccttttcttttttcttgagactgtgtctcactctgtcatccaggctggagtgatcttggctcactgcaatgtccgcctctcgggttcaagcgatttttgtacctcagcctccctagtagctaggattacagatgtggaccaacatgcctggctaatttttgtatttttaatagagacagggttttgtcatgttggccaggctggtcttgacctcctgacctcatatgatccacctgccttggcctcccaaagtgctgaaattataggccactgcgcccagcccaaaatttcttggtttgaaataattttggaactcataagaagttacacatatagtagagagaattttcttgtaccttctctgagcttcctatatacccaatgataacatcctatatacccatagtatatgatcaaaactaggaaattgtgaagatggcattttgagacatcaggcagtgttcacgttactgttttgcttacctgggctttaatttttatgtgtttttttttcaatcattgaatgaacaaaacttggactaggctggggagtaactgatttgaactgttttttcctgaagcagtccaggacttatgtgaccgtggtctctttttcttctagttgatcataccagggttgtcctacacgatggtgatcccaatgagcctgtttcagattacatcaatgcaaatatcatcatggtaagctttgcttttcacagtgttttctgaccatacatttctagcctatttttgtattttaaatccttcctcatgtcctgaaagtaactttaaggtgtttgaaggattttcttcctaaatttctagcctgaatttgaaaccaagtgcaacaattcaaagcccaaaaagagttacattgccacacaaggctgcctgcaaaacacggtgaatgacttttggcggatggtgttccaagaaaactcccgagtgattgtcatgacaacgaaagaagtggagagaggaaaggtaaatcacagaaacttcttttctgctaaactgtttttaaagtatcagacatgtcagattggccatgtttaggaattgaataaatgaattaagcttactgtaactgattctctggaaaaaagggactaggagaaatttgattatgttattccttggtgtagttttctttatgtttcttctgcttgggatttgttgagcttcttggctccatggatttgtagttttccttaaatttggataatgttcagtcttagtttcttcagatacatatcctgggctgggcatggtggctcatgcctgtagtcccagcactgtggggtgttgaggtgggcggatcacttgaggtcaggagtttgagaccagcctgggcaatgtagtaagaccccatctcttaaaaaaaaaaaatgtaccctgcacaaccttgtcctaggacagcagtcatacgtgtattagactacttgaagttgtctcatagcccactgatacttggtttattttattcagttttttctccccgtgtttcatttcgaatagcttcttttgctatgtctccaagttaatcttctgcaatatgtcatccgctcttaatcctatccagagtatttttcatcacagacattgtatttttcatctctagaagtgttaatgtcatctatagctttccttttaacatgtgtagcattttccttaccttttgaatgtatggagtatttctgttgttgttttttgttttgtagagacagggtctcggtctgttgcccaggccggagtgcagtggcatgatctcagctcactgcagcctctgcctcccggttcaaatgattctcatgcctcagcctcccaagtagctgggactacaggtgcgtgccaccacgcctggctaatttttgtatttttagtagagatggggttttgccatgttggccaggctggttttggaacccctgagcttaggtgatccaccttccttgacctcccaaagtgttgggattataggtgtgagccaccatgcctggccatgttgtctgttttaattaactctgcctaactgtcctcccaaatggttgctgcagtgctcactcccaccagcagcacctgcctaggactcattactccatactcttcaagacacttcagattaaaaaaataaattgtaacaccccacacctacagaagagcggacagatcttattgagtgacagccctctgtgttatctcaaagtgagcccaccatggtggttttttttttaaatatggaaaagttctgtgtttttgtttgtgttctagtgaaagttcttttttagatatcctttaattggtttatataagattttatgtggaatgtagcagtcatacctataaattaaacctaaggcagatggagaactttggagttgagccttcctactgtaattttcatattggatgtgaagggcagtgtgattttcataagactttcattgttgtactcctagttggtatacttctgaatacctttgaggccagttctggtcatcgtgaaacaaaggtttccttcagcaaatgcctgtggtaacattaggtgttcttgaattaatggaccaatgaaaacatctttgtagtttctgcttcaggcaagggttttttgccctaaatgtggataggaagaatgaagcccttcatcctcctttttgcctgattatagctataggaggttcacctgttctcagaagacatgaggattgtgaagagaggggtcttgtgttgcttcagaggaatcagtatcagtccctttcagaagctctcctggatagacaggcattagggccaaatcactctgccccacccctcaccaccatgtcctactctctgctccctgtctcattcttcctctttactttggtggtgccgagaggatgacatgatgggtattgattctctccacagacctttctgacatcctactttcagtatccccccagtgcacagaagacaagccagactgtggactgtgtttgattcctgggctctattttaaaagacagtgtattagttctcacattttagaatttgtttgccaaggtttccacgggagtttagaaactagggggagggctgatgtttaaagttagctaaaatgttcttttcagggtcatgatttaattttatattctctggtgagttccctatagtgactgggagcagtcctcagtcttgattggccagtgacagcatagagtacaattaatattaggagtgctcatttggggaaactaaaatttgcatcaaatctgtcagaggtgtttggatctacaaaataccggagggaaagctgaattgagaatcataataaataaaagaccacatcgttcttttttttttttttttttgggactgtatcttgctctgtcactcaggctgcagtgcagtggcactatcttggatcactgcagkctccgcctcccggattcaagcgattttcctgcctcagygcctgagtagctgggattacaggcgtgtgccactacacctggctaatttttgtaattttagtagagacaggtttcaccatgttggccaggctggtctcaaactcctggcctcaagtgatccacccggcttcccaaagtgctgggattacaggcgtgagccactgcgcccaaccaagaccacatccttttattgaacgttcctcctaccatgttttcttttttctttcaattaatcattgactcattgactctcactgttgatgtctgtagctgctctcttatttccagttttatagctgtaaatttctctgtcttcctaagatacaaggtaaatttctcttgctgatattggtggttttggaaagtgagtggtgtggatgactgcccagaaaacaacagaacacaaaagcattctctgcccagaacacatcaccaaatagatacaaactcatctcttactgagtgaaatagcttcctttttggcagcaagaatgattttcttggtgccatatttttcaatccgcctgctcttgaagccagcagctattgcagacttggcattcccaggcacccagttaagggaaagtgacgtgtagaggaggtatcagatgggtctggatatagaaaaagcagctggttcaaaaccccatgggctgcctttctgtgatagagttattcacacttgggttagataaggcacagagtcctcctacactggtgcggaaatgaaacagacagtctggctcgttgggcagcctagcctcctccagaatctgtgcttgccttccctatggagtgactggtagatcttagaattcagacctcagtggttgctagccagcactctcacattggttggtccttctctctgcatctttgattctttagagatagataaaccaagcaccgactctcctttgacatgtgcttggaacagacacctgcacgagctgcctttctcctcccacttctgcctggtcttccaaacacctgcttttcttgtttgaactcttcctttttttttgagacagaacctctctctgtcacccaggctggagtgcagtggcatgatctcagctcactgcaacctctgcctcccaggttcaaataattctcctgcctcagcctcccaagtagctgggattacaggtgcctgctatcacgcctggctaatttttgtatttttagtagagacacggtttcaccatttggccaggttggtctcaaacctctggtctcaagtgatctgcccgcctcggccacccgaactgctgggattacaggcatgagccactgcgccccagctgattctttacagataaacaaacattgactctgctttgacatgtgcttggatcaggtaactgcaccagctgcctttctcctcccacttctgcctggtcctccgaatgcctgcttttcttatttgaactcttctgtccttttctgaaaacctaacagatgcgaaacaggccattttccatgttggtggttattaagcaagacttgaacatttgtttgttgcttgtttaggcttttatttcagagttcacagaattaactttctttttttctgatmtcttccagagtaaatgtgtcaaatactggcctgatgagtatgctctaaaagaatatggcgtcatgcgtgttaggaacgtcaaagaaagcgccgctcatgactatacgctaagagaacttaaactttcaaaggttggacaagtaagtatattgtcgtattctagagactttgggaactgttgatggtgtgtaggaattcagggtcttgccgttactcatgtttgcatacatgcatgcattcgctcactcattgattcagtagccatttattagcttccttctatgtgccaggtacagtttaagcagtactggtacattgtgaacaaggcaggtagtgttcctgccctcatcgagcctagggagatagacaatttaaaaacaaataactggccaggcgccgtggctcaggcctgtaatcccagcactttgggaggctgaggtgggtggatcgcttgagccggggagttcgagaccagccctgggtgggagactgggatagggtgacctgagtggctacaaggtctgttaggaggcctccgcaggggcctatgttgatggcctcctctccaagtatccacagacttcagcagttgttcttttttgttccttcctttggaatggaatattatataaaatggcagaataaactggaagagaagcagtagatgtgagaggtgccggggggtgaagtctgcaggatgtggggattgtttggcttttggaggaggaaggagggattcaagacacattgtagaggtttgagtctgagcggacagtggtgctgtggcagacaccacaaaagctggaaggagaactgatgtgggcagtgatttgttttcttctggatgtgttcagctgggcatctgaacagtcatgtggacattcatctattcattcagagatatttgttcaatgacctcttggttcctggcaccatgctgcttgctggagatagagctggggaacaaaacagatggaatccctgcactcccaagtgtacactatactggccagtaatctaccagcccagtaattgcacatataaatatatcattataaactgtaatcagggctagaaagaaaaaatgcaggagtttagggttcatttggagggggaagggacttttttttttttttttttgaaacagaatcttgttctgtcacccagactggagtgcactggtgcattcacggctcactgcagccacaacctcctaagctcaagtgatcctctcacctcagcctcccatgtagctgggggctacaggtgtgtgccaccatgcccacccaattgttaaattttttatagagacggttgtctcattatgttgcccaggctggtcttgaactcctgggcttaagcgatcctgctgccacatgcagcctcccaaggtgctggaattacaggcgtgagccagcgcacccggccaagggaggggaggttcttaaggcatagggaacaatgtgtttgagtcagcaaaggaggttgtgggggtttgtcctaagtgtggtaagcagccagagttggatttaagtttttaagagattcccctccaccctgtagagactggagggggcaggagttgttctagggattaggaccaatttggaggtagtgcagccgtcagagtaaaaaataatagggattgaactaggccagtgcccagggtgcctgaaagaagaggacccagtagagctgactggaggcagacatgcagggattcagtgaaggagtgtaccaagggcgagggtggtgtgcagggtgactggcaattttctagcttgagaaaggtccggggggatggcagtggagttgaggaagctgggaggatcaaggacctttttgtgaacacacaaagtttgagatgccttggacacattgaagtggagcggtcagggaggcaagggtggaggtgggatgcggaggggaggtgggatgcagagcgtcgtggatggatcagttttgctcgatagagggacatgtttttctgtggcaacaggagggcaaaaggagaaggtggccacagatgccggtagatgagctgagagtgattgtattccctatcctctcggaagcttgaggcaaggccatcaacagacaatcagagggaataagaagagatagaatatatgaagaaagggagaaaagatgaaatcgtaattgtgtagcagggcaagaagtccagaaatttctgtgctgtgccaagttcccagttgaggcggtgaacatgaaaatatactgatacccattgcctggtttttctccaaggacacttggctcctagggcacaaaacagaaagtacgtggtttgtccaggccgagggctttgcatagttgcagtggatggagaggaggtcaaggaatggaggcacatggtagagagagactgtccccagagcacggggactcctggccggatgagggggacaggggcaggaggaggcaggtggaaagtagagggagggctcagtggtctggaggctacaggaagtgacggggggaccagaaggagctggaaaccagtgtggttgtggcccagggtgggatgtttggatttctgatgtcagagagggtccagtccttctgatgatggggaggggtggaggctgaatctatggtagagatagtgagaggaactggaacaatgtagctgtcaagtggaaatgggagaaagggctgggcgtggtggctcacgcctgtaatcccagcatattgggaggctgaggcaagaggatcgtgttagctcaggagttctgggctgcattgagctgtgattgtgccactgcactccagccttggcaacagagtgcccagttaaaaataaaaataaaataaaataaaaaaattaaaaaaaaaagaagaagaaaaaagagaaaagtgtccttttacatcccttttaaaaatgtcacttaaggctgggcaaagtggctcatgcctgtaatccctgcactttgggaggctgaagtgggtggattacttgaggtcaggagtacaagaccagcctggccaacatggcgaaactccttctctactaaaattagctggatgtggtacatgcctgtagtcccagctactcgggagtcgagtctgaggcccaagaattgcttgaatcggggaggcgtaggttgcagtgagctgtgatcaggtcactgtgcaccagcctggatgacagagtgagactctgtctcaaaaaaaaaagtcacttagcttagattgtctctacatatataggaagaagatgtaggaatgaatggtgctgctacaattacgtcatctggatagacccagaaacatgatactttttggttttctgtagccttggtgccattgttgatctttattaattatcattatcctcaaaatagccataatgtgctgagtctcttcctatttgctgggcagaggctgagtatttcagcgagctcactgagtccttaaaattgcattatgatagagagaaagagattattatttgcattttgcaaaatgaagaaattgaggtttagagatacccaagggccacgtgagtgtgagtgcctggaattggagcctaaatctagtcatctgatagcaaagcctgttttcttatctgctttgcattaaatataagtttaaaatagaacaatactggccaggctgggtggctcacgcctgtaatcccagcactttgggaggtcgaggcaggcagatcacctgaggtcaggagtttgcaaccagcctggccaatatggcgaaagaaaccccatcgctactaaaaatacaaaaattagccaggcatggtgatgtgtgcctgtaatcccagctacttgggaggctgaggcaggagaatggcttgaacccgggaggcagaggttgcagtgagccaagatcacgccactgcactccagcctgggcaacagagtaagactctgtcttggaaaaaaaaaaaaaaaagaatgatactatagtctgtgtttatatggtggggaaggttgagtatcaaaaaaataacaaagaggaatgaatgtcttaagtgaatgcctgtttccccatctgcttcctcttctgctgggaggagagacctggatccctagaggtttcagttgcctccagagctgagtgccacagggatgcaggggaatagggatgttacctgtcgctggtaattcagagagatgattcagggtatagttacctgaaagaacaaattgccatgccagacgtcttggttcttatgacagaggcaaagagttgcctccaggattgcccaaaaggagacgagttctgggaacctcacgaagaggacctttcagtggaacctggggagattctcttcctctccattggatttaggaaagcttagaaccgggtgattcctcaacctcttgatttatttaattcttttctggtttttcttggctctactccaggggaatacggagagaacggtctggcaataccactttcggacctggccggaccacggcgtgcccagcgaccctgggggcgtgctggacttcctggaggaggtgcaccataagcaggagagcatcatggatgcagggccggtcgtggtgcactgcaggtgacagctcctgctgcccctctaggccacagcctgtccctgtctcctagcgcccagggcttgcttttacctacccactcctagctctttaactgtaggaagaatttaatatctgtttgaggcatagagcaactgcattgagggacattttgatcccaaggcatatttctcctagaccctacagcactgccattggccatggccatggcaacatgctcagttaaaacagcaaagactaagtcagcattatctctgagtccaccagaagttgtgcattaaacaacttcatcctggctctgcagtttctccttattcttcatgatgtttgctttgtagctgttgactgctttgtaggtattgaggtggtgggggtgtggtggaaataggcctgactcttgaggatcccttaagtcatttttgcttggttctctttttccttcttttcttctactcttctatgattcatctctttgattgtgattctgttctctctctctctctctcttttttttttttcgtttttgagacagagtcttgttttgttgcccaggctagagtgcagtggtgccatcttggctcactgcaacctccgcctcccgggttcaggccattctcctgcctcagcctcccaagtagctgggattacaggcatctgacactacgcccggctaatttttgtattttaatagagacaaggttttgtcatgttggccaggctggtctcgaacccttgacctcaggtgatccacctgccttgtccttccaaagtgctgggattacaggtatgagctaccatgcccggcccattctgttctcttctaccataaatatatttctcccctaacactatatttgtttgcttcacaagattccagctgcttttccaccaaggcctttgatggaagctgtgctgtgacctctgtaatgagtctgtgggctgctgattctccagtttgggcttcatgattatactggggaatattgggtttcctaaatctcattcatttcttgggcaagtagatatatgtgaaagtgtttatttgtccagttgttaaagaagctaccatttattgagccagcctctgagcacaatgttttttgttttgttttgtttttaatttttaaaattatttacttcttctatttcaataactttattattattattttttgagacagagtctcactctgtcacccaggctagagtgcaattgagcgatcttagctcactgcaacctctgctttctgggttcaagcaattctcatgtctcagcctcccgagtagctgggattactggtacgtgacaacatgcctggctaatttttgtgtttttagtagagacgaggttttgctatgttggccaggctggtctggaactcctggccccaagtgatcctcctgcctcggcctcccaaagtgctggtattataggtgagagccactgcgcccggccctctttcagtaattttgatgtatttttttgtatatgattcctgtttcattctgtccaaccagcactctgtatggtatgtgctgttgtccccatttcacagatgcagaaattaagggtcagagaggttaagggacttacctcaggcacgttgtactggagaagctgaactccaagagcaggtttgggctgactccaaagccctatgctttttgccaacatattttcaaacataaatagacaattttataaatagctccaaagagtagacattgtttctgttgatattaatggcttggttttgagtctgaaacccccatgaatgattctgttgtccctgctttttgtccttctgcccgcagtgctggaattggccggacagggacgttcattgtgattgatattcttattgacatcatcagagagaaaggtgggtcatctggtgggcaagaagcgacagtttctgtttttagtttatggaaggaaagtgctcacgaaaacagtctggggaagagaggttgaatgggaaaattctttcacaaaaatctgggctgaagacttcagtgtgtctgcctgagaacagaagtgacactatttgagcttttggcataaaatgaagtctaggagctgcagaacccactgccatggccttttgttgcatacacagtggtggtctctatccagccacctgaccttgtttacagtatggggtgatttgttggcaagtgagggaatcctgacttctgccacttcgttatttatgtagtcttctgggatcattggtattggtcagaagttcaacactgtagccattgcaacatgctcagttaaaacagcaaagactaaattagcattgtctctgagtccactaaaagttgtgcattaaacaacttcatcctggctctgcagtttctctttattcttcatgatgtttccttcgtaggtgttgactgcgatattgacgttcccaaaaccatccagatggtgcggtctcagargwcagggrtggtccagacagaagcacagtaccgatttatctatatggcggtccagcattatattgaaacactacagcgcaggattgaagaagagcaggtaccagcctgagggctggcatgcggattctcattctcttgctaggcctcttggatacgctctccttttgagcaggaggacaggctctgatagacaactgtttgatttcggaatgggaaacaaactcccaactaaaagggcctctggaaactgtcaattattctccacttctcagctctgatttttcactgcagaggagcttagggaagggcaccatcctatcagcctggcctgccagattgaagaactgccatgcagaaaggttctgatgttctcaggctcatgtggcaagcgtaaaactcaaagccttgaagtttctagcctgttccagccttgatccaggccatgtttatcctgattccatcctttaaaacgaatgcctcactcttaatagcgcacggcagtttgaaccactaatttggtcgagttggaaacagtgaaatttcaattttaataagctgtgcataatgaagaggaatgtggaattggagcctttccatctgaagctattcataacaggcacaaagctgagttaattaggaatatgctgagatgaaggaaatgaggagagctgctcttttgggggctgtgcttctctccccaacccctcaaccccattgccatgctgcagatggggtggtgtctaaacatcagtggcgagtgcctgcattactctgctcgttgccttccagagaactcagcttctccaaatgctgagctcttttcagaatgggacctgccaccagtatttgaaagatttctagcctagcagaacagcagccacgttatcaaagtttggttggccaaaggaaggtacttgctaattagtttagtaggttttcagtccgcacagacatacgggattgttttattgtacatagacatcttcagaaacagtgtatgtatagaaatgtaaggtcaaaatttgaacctcagtgctttaaatctgaatttgtattaactgatatgaaatatttagacggttactttattttatatctgtcttccattatacttaatttggctcaagaatagttaggcaaaaagttgcccaaagagaaggatctcctagtaaatacaaagagaatgtaacatagttgctacaagttggagcatgttcagggatgtctttttttttttttttttttgagagagaggtctctctctgttgcccaggctggagtgcagtggtgtaatcatggctcactgcagcctcaatctcccaggcttaagcgatcctcccacctcagcctcccaagtagctgggactataggcatgcgccaccacacctagctaattttcgcattttttgtagtgtcacagtttcgccatgttgcccaggctagtctcgaattcctaggctcaagcagtgcttctgcctcagcctctctgagtagttaggactacaaatttgtggctccatgcccggctaatttttttatctttattttgtagagacaaggtctcactgtgttgcccaggctagtcttgaactcctgggctcaaacaaccctcccactttgggtttccaaagtgctgggattacaagtgtgagccactgagcccagtgacctctgggttttaaaaatgtgtaggcttcaattatttattttaaaaaatgaaatcctgcaatatatagttttctgcgttgtgtggtttgaatcaatctgggaactggcttgctggctgattgtggtaaagtaagaagtacttaatttagtagaaagtttaaatggcagacataacattaaacccagctgatttataaatgaagcaaaagaacaaaactcattcaggataattggttattctaaaatacagtcatttctaaaattatgaagtgttcaggacctttgggagtgaaagaatttgctaaagaaggatcagtgaaaaaaaggaatgatgggtgaagagctgtggagaaggaagagaagaaacagcacaaggaaggaagaatataaaatcagatgtgggaatccaggggaaagtgcaaacgaagcaagattgagaaaattctcaagtttttataaacagttctcacactctgccagttccttggaggtagacttttttkttaacttccaactacagtagtgaaaaaaaaaaaaaaaccctcaaatttgcaaaagcagtctgtggaattttctttacccagctttcctgactgttaactttttagcacacttaactttatcattcgtttattctctctgtttaaaattaaaaatgtaaattttaaaaagtaaaatgtttgttggttacaaacatttatacccctttgtctctaaatatcatttcattttaaaaaatgaataatctaagcctacacattctaaaatgtgtatattttctaaaaataagggcattctcttacataaccaatgtcacaattatttgatacagtgatcaaaatcaggaaactaacattgatataacactattatctaacctacagaccatcttcaaattttgtcctgctagtatcttttatgggtccagggtcacacagtgcatttggctataatgtatcttttttctctttttttgagacagggtctcactttgttgcccaggttggagtgcagtggtgcaattatggctcacggcagccttgacctccttgggctcaggtgatcctcccacctcagcctctcgagtagctggagaccacaggtgtgcaccaccatgcctggctaagttttgtattttttgtagagatggagcttcgccgtgttgccccggctggccttgaactcctgggctcaagtgaccctcccgccttggcctcccaaagtgctgggattacaggcgtgagtcaccacacctggccagttattagtatgtttagtctctttaatctggaacagtttctcagtcattctttatttttcatgacctggatgtttttgaagagtttaggccagctatttagcagaatgcctttcagtttggatttgtccagtgttttctcttgactatattctagtcatgcatttttggcaggactgtcacagaaatgttgttgtagtcttcttagtacatcacatcaggtacacactgttgatctgattcattactagtggtgttaactttgatcacttgaataaggtggtgtctgtcaaatttgtccaccgtaaagttacttgagcaaaacgtagctgggactacaggcgtagcaaaaaatgtagcaaaaagtagtatttttgctacattttttttttaggaacaaagtatttttcccttttaagttaatctcttgtccataaagttattatttttcccttttaagttaatatcttgtgggtagatactggagactgcgtaaattacctatttctcataatactttttttttttttgagatggagtctcgcaccgtctcccaggctggagtgcagtggtgcaatctcgggtcactgcaagctccacctcccgggttgacgccattctcctgcctcagcctcccaagtagttgggactacaggcgcccgccatcacacctggctaattttttgtatttttagtagagacggggtctcaccgtgttagccaggatggtcttgatctcctgaccttgtgatctgcccgccttggcctcccaaagtgctgggattacagatgtgagtcactgcgcccggctctcataatactttttgcctactaattttatattcattgattaaattcttgcctgaaaaaattattactgtggtatttgccaaatggcaattttctgtttccatcattgcctttcccccgcttttaaaagtataagtgacaaagaaaaactgtatataaagtgtacaccatgatattttgatatatgtatactttgtgaaatgattatcaaaattgagttaaataatgcatccaacatctcagttacttttttttttttttgagacagagtcttggtttgtcactaaggctggagtgcagtgccacaatctcggctcattacaacctccacctcccaggttcaagtgattctcctgccttggcctccccagtagctgggattacaggtgcccaccatcacacccggctaatttttgtatttttagtagaggtggggtttcactacgttggccaggctggtctcgaactcctgacctcaaatgatcctcccgtctcagctttccaaagtggtgggattacaggcgtgagccactgtgcccggccactcttagtaaattttaagtgtacatttttttttttttttttttgagatggagtctcactttgtcaccctggctggagtgcagtggcatgatcttgccacactggaacctctgcctcctgggttcattcaggtgcttctcccacctcagcctcccaagtagctgagactacaggtacccgccaccatgcctggctaattattgtatttttagtagagatgggggttcaccatgttagccaggctggcctcaaactcctgacctcaggtgatctacccacctcggcctcccaaagtactgagattacaggcatgagccaccacacccagccacattacgttagtattaactataatcaccatgctgtacattagatctccaaaatgtattcatcttatgtaacttcaagtttgtaccctttgaccaaagtctccttgttttccctacccccaacccctggtaatcactgctttaatctcagtttttatgagtttgactggtttagattccacatacaaatgagatcaggcagtgatggtttatttcacttagcataatgtcatccatgttcttgcaaatgacaggattttcttctttttaaaactaatatccatgctggacacggtggctcatgcctgtaatcccagcactttggaaggctgaggagggtggatcacttgaggtcaggagttcgagaccagcctggccaacatggtgaaaccccatctctaccaaaaatataaaaaattagctggatgtggtggcgcacacctgtgatcccagctacttgggacactgaggcaggaggatcgcttgaacccgggaggcggaggttgcagtgagccaagatggtgccactgcactttagcctggatgttgatgttgttccacttgtttatttttattttgttccctgtgcttttggtatcaaatcctaaaaaccattgccatgaccattgtcatgttactttccccatatgctttcttctagaacttttaaggttcatcattcccttttctgtttttagttgcaagcctactataaggaagggcttttctttcttccttatttatttattcatgtctatcagaatgggcaccttactactatttttgttgttattgcttgaattgacttgaatttggctagtggaaaccttttcagatcgggtactctgtccttttgatctctttccattttcaagcacttctttagacttaagatggtctaggctcatcttctcctttcccagccatttttcaaaggaacctgattccttttagtgaagagcagtattttgaaaccaagatctgggcactgggtctacttgtttgtactggtacagtgttctttgaattgctaattagctgatcaattactgctctatttgagttccctctttctaaaacctcacatatgtgtacagacggtccctgacttatgatggttcgacttatgatttttgattttatgatggtttgagagcaatacatccattctgtttttcacttttcattcaacactttattttaaaatagggattgtgwgatgatattgcccacgtgtaggctaatgtaagtgttctgagcacgtttaaagtaggctaggctaagctgtggtgtttggtaggttagatatgttaaatgcattttcgactagtgatattttcaacttatgatgagtttattgggatgtatccccataaagtcgaggagcattatacatatctctgtataacagagtgagttccttatacctttcatccactttcccctgaagttaacattttacctaaccatgatacatttatcaaaactaaaacattaacatcaatacattgctattaactaaactagagtttaattggattttgccagttttccaatgaatatcctttttctgttccttgatccaattcatggtcacacactgagtttggtcacttgtcactgtagtcttctccaatctgcgacagcttcttaggctttccttgtttttcatgtactcttgacgatttttaagagtactggtcagatatcttgtaggatatcccacaacttgtgtttaatcttatgttttctcatgattagacttgagtaatggatttttgggaagaataccacagaggtatattgttaagtgttctcatcacttggaggtaaatgttatcaacatggcctggtgatgttaaacttgtcagtttgtttagttagtatctgccagatttttctcactgcataattacaaatcctccttaacttatgatggggttacagcctgataagcccatcataaattgaaaatatcataagtcaaaaatgcatttaatgcatctaaactactaaacatcacagcttagcctagcctgccttgaacgtattcaggacacttacattagcctacagttgggcaaaatcatctcatgggaagcctgttttataatgtgttgcatatcttatgtaatgtgttgagtactgtactcagaatgaaaaacagaagggttgtattgcttttgcaccatcataaaatcaaaaaaaccataaggcaaaccatcatgaagttggggactgcctgtacttttttcctctttccctgttcaattccttggaagaaagtcatttagttcagaccatactcaagaaaagggaaataaagctccatctcttggagcttaattgaaactggaatgactagtttctatatacattatttagaatccttttgtaagaaagatttgttccttctctccatttatttattccattatttatattgatagagacgcatgtacatttattttatactttgggttataatctatttttcttgctcaaattgttacagctttggtcactgggaggttcttcagattggctcctgtgtcatttgacatgtccccaccctctcgtttctgagtacttctctactttggcattacaaaagatgttccaggctcctcttatatttttccctgccgcagccctagaatcatccatttttctatggtgccctggttccttttactttagatgggggtttagaaaccaatctgggtgttgggtgtgctcattgctactggaatcactgcttctaggccctctcagcagatagagctagaaaacatatggctgtatatgaatccatggattcatatatatctataattgttttctgtatctggccatctatatatatattaagctaaacatgaattcatactgatgtctcagactcgaatccattgccgcagggctcattcttgccttcctcttgcttatttgtgacttctttctctaacagggagaaaccccagtctcattatcaccaacctatctactcatttgttcaaccctggtataggtgtaaagtagtttcagaattactaacctatacccatgtgagaattgtatttgcacttcttgtttgaaggaaatacatacaacacaggtagcgtctctacacttcagtatacagagatctgaacagtgttctctctgagtgaatcatattgcaggacagaaattacttttaaaaattctgtaatgggtcaggcctataatcctagcactttgggaggctgaggtgggcagatcacctgaggtcaggagttcgagaccagcctggccaaaatggtaaaaccccatctctacaaaaaatacaaaaattagccaggcgtagtggtgtgtgcctgtaatcccagctactcaggaggctgaggcacgagaatcacttgaacctgggaggcagagcttgcagtgagctgagattgagccactgcactccagtctgggcgacagagcgagactctgtctcaaaaaaaaaaaaaaaaaaaaattccataatgatagcagagctggaatagaaatgggattgcacaggctgaatctgagttgttgcaacagtaaacgagcaagatttaaactggccttgtgtagcacttgctatttggctcctcatattttattagacrcttattcttttttgtttggtgtcattcctttgagaaatatttgagtgccttttctgttgcagacattgattagatgctgaggttgtaacaatgaagaagatagccatcgctgttgcctcatggaactgaagttttactagatgtaaaatttgagttaacatgaggccgtgcccctatgtgccctattgtttcttcacacagctcccttcatctccttggtccaatgaaaaggttttttcatacttgttcattcattcctgcattaattaaagtaggttgtactgtgccaggcactgggaatatttaagtagttgtgttcctgaattggaaatgaatccagcatggttggagtagaaggagctggggggcaatgtggagtgtgatggggagattggaaaagtaagctgagaccagatttttcagtttggagggagaggtgggccttgtaggccatattacagattgtagactttatttggagggacatggaagtcattgaggagtctgaagcaggggaatgacataaaaagatcctcattttaggccggatgtggtggctcacgcctgtaatcccagcactttgggaggttgaagtgggtggattgcttgaggccaagagtttgagactagcctgggcaacatggtgaaaccctgtctctatcaaaaatacaaaaattagctgggcatggtggctcacacctgtagtcccagctacttgggaggctgaggcatgagaatcgcttgaacccgggaggcagagattgcagtgagccgagattgtgccactgcattccagcctgggtgacagagtgagacttcgtgtcaaaaaaaaaacaaaaaacccctcattttgaaagggaaccctggcttgagggtgaagaatgggtgggcactaggctagagcagctgcagggtcagtgaggagctgccgcagtgctgcacgtgagaacccgtcatggtttggtcagggtgggcaggactgacagtgagcacagagcgaagtaaaaccagcaaaatttcatgattggatagtggaaggaatcatggtgtttgtagtcttcaaatgtgaacccagagtgcactggacaagtagtctargctgctctgtaaccaaggcaagtgttttcattttaccctctcttcctgctcttggcctttggattttttgtaatttaaggtttatgaatgtaatcagttacttaacatggaaagatacttaataccagatgattttggagtcttgtgatcaataccttctctcaatcttgggtgtgtgtcagttggcaaggccataaaatttgttataaacattgcagaaggcttggttactgtgctgtgacgttgaatttgggtggagatagatcaatttcagttgattttctaggcttcagaaacacattaccctctactccacaaacacaaatcaaaacaaaacaatccctattccctgagcatttctcttgatctataacacagcctgggctgtcacagtactaagacaagcccatctgatttgtgagtcagttttatttcttggtcttctacataagctaaaaagtttcaacattttaatgcttttccttggattcctttgagtcattgaagtaattcctgtttcatttgtactaattattccacactagaaaattctgttgtaatcactttatgtattaatagaaatactgatttttattttcaaggaagtattgagtagggagggggaaatagggatttgctgttcaatgggtatagagtttcagtaatacaagacaaaaaacttcagagatcttctatacagcagtgggtatatagttaacaatactgcacatctaacagtttgttaagagggtagatctcatgtcatgtgtttttaaaaattgcttttaaaaaaagtatcgagtaaaaaagcagttttactcctcagtttctatttatatttaaaatttttatttaaaaagtgagttgagatttttaaacctcaggataagttttattttttaaaaaatttattttttattattttttgagatggagtctcactccatctcaagtcacccaggctggagtgcagtggtgtcttggctcactgcgacctctatctcccaggttcaagtgtttctgctgcttcagcctcctgagtagctgggattacaggtctgcaccaccacgcctggctaatttttgtatttttagtagagatggggtgtcaccatgttggccaggcttgtcttgaactcctaacctcaagtgaccacctgccttggcctctcaaagtgctgggattacaggtatgagccacagtgcccggcgggataagttttaaaataatattctctgctggctgggcatggtggctcatgcctgtaaacccagcactttgggaggctgaggcaggagcatcactcgaggccaagagtttgagaccagtctgggcaacataatgagaccccctctctacaaaaaataaaaaaaatttggctgagtgtggcatgttcctgtagctatcgggaggctgagatgggaggattgcttgagcccaggagtttgaggctgcagtgagctatgattgcaccactgcgctctagtctgggtgacagtgtgagaccctgtctcttaaaaaaaaaaaaaaaaaaggccaggcacagtggctcaggcctgtaaccccagcactttgggaggccgaggcgggtggatcacttgaggccaggaatttgagaccaggctggccaacatgatgaaaccccgtctctactaaaaatacaaaaataagctgggtgttgtggtgcacacctgtaatcccagctacttgggaggctgagggagagaattgcttgaacctgggaggcagaggctacagtgagccgagatcacaccactgcactccagcctgggtgacagagcaagactccatctcaaaaacaacaacaacaaaaaaaccaaatgttcttgccaattcttccatttaatatttaattttgaattatattgtatctttctaaggattgtttcttatataagcaaagatttttcagtgctaaacatttacgactgctattcagaaatggttatttacaagtctttttgttttaagaaaatggctgttcaaaaaattaaaatagtatataaaccaaacaaaatatttttgctttggatgtctgttttgcagcttcttccctacactataagttcttactgactgctttatcacttaataaattggtttggctactttaacagaggcaaatagtatcaggcaaaaaattattttttatttttattttttgagacagtctcactccatcacccaggctgcagtgcagtggcctgatcttggctcactgcaacctccacctcccaggttcaagcgattctcatgcctcagcctcctgagtagctggaattataggcatgcaccaccacactcagctaatttttgtatttttagtagagacagggttttgccatgttgaccaggctagtcttgaactcctgacctcaagtgatccatctgctttggcctcccaaagtgctgggataacaggcatgagccaccatgcccagccctattttttattttttagagatgggtctcgctttttagagatgggtcttgttgcccaggccagagtgcagtggtgcgatcatagcttactgcagccttgaattcctgggctcaagcaattctcctgcctcagcctcccgagtagctgggactacaggcctgtgccaccaggcctggcttgtacattagtatttgatatggctaccctaagggcaatcctatagtgaagtcaacattagataatgatgctcatctgatggattagattttcagagttggctgtttccaggtgcctataggagtagaaaagggtgacaaacctcctaactagatgtcctaccaaatatagttcactccacatctgagatgagactgcatgactgctggttttctttgccttttcccccccagggtatcatcagaaccaaaaataaagttttaaaggtgggtcaggtgtgtgttggctcatgcctgtaatcctagcactttgggaggctgaggcaggtggatcatctgagctcaggagttcaagaccagcctggctaataacatggttaagccccatctctactaaaatacaaaaagttagctgggcatggtggtgggcacctgtaatcccagctactcaggaggctgaggcatgaaaatcgcttgaaccccagaggcgggggttgcagtgagccgagatcatgccactgcacactagcctgaacaacagagcaaggctctgtctccaaacaaacaaaaatggtgccagagtcttttccagggctgaggggagatacaatgaagtgtgttattttttctgataagagtgctaccatctttcattcttgtgtgccatttctagttggggtgaatttgttttcggagttcctttcccagctgtttgcctgaaaaaccatgaaatgtgttccacatgaactatgaaatgattagatgctaatgtggcaaagaaagtgtgaattctcttgtagaaacagggacatttggttcggtacagtaagttgttaatgcgtgactctgtgctttcaaattctgtggttcaaaagtacttttcactcctactgtgtatttaccttgagaaggtgaatcccctaacaatttggtcaatgtatcagtattctcaacccgtctatcaatttttttttctttctcyctcttttttctttttttgggcaaaataccttttttgctttttatccccttaaaataaccattgtccctcacatgtgcactcttccaaatttcagaaaagcaagaggaaagggcacgaatatacaaatattaagtattctctagcggaccagacgagtggagatcagagccctctcccgccttgtactccaacgccaccctgtgcagagtaagtagtgctgaaggaaattctttttacctggtcatggtggtttaaaaaggtttaaaaaacaaaaacaaaaacaaaacacaagtttgtagcacatgcctttcactggtgcacgttcctgttgccctactgttagtgtatctgtgactggtgatatctattgattgtgttaatgctatctcaaccacgttttaattttcctaagctggccaggcacggtggctaacgcctgtaatcccagtgctttgggaggccgaggttcatggattactttgaagtcaggagttcgagaccagcctggccaacatggtgaaaccctgtctctactaaaaatacaaaaattagccgggcatggtggcgcatgcctgtaatcccagctactcaggaggctgaggcaggagaatcgcttgaacccaggaaacggatgttgcagtgagccgagatcatgccactgcactccagcctgggcgatagagtgagcctctgtctaaaaataaaataaaataaaataaattcctaaactgaaggctgactgctatgctagctaggattatatgggattttaagtatatcaagtggtggttctccaagaagaatctaatttttcttttgatgggctggggattgtaacaaaggaaggtcatatgtcttaatgatgtgttaaggctctttgcaaaatcaaagtaaataaattgaccactaatgtgtcagcccagccatgttctgctcatttgccaccagtcaacagaaatctactttgggtgtttaaaccaggagtcagcaaactacagctcacaaggccagatgtgggccatggcctgttactgtatggcctgttaatggttttaaagggttgtaaaacaaaagaacacaaaacaaagacccaataacaaaacaaagcccgaagaataatatgcgacagagaccatgtatggcatatagagcctaaaatactgactctcaagcccttcccagaaatccttcccgactccttgttgaaaacacggtaggaaagcatttgtcaaattgaggatatgaatagcaattgtaagttattatttttctatatattcgaaagtcacttgctagtataacatttaccttttatttttccctaagaatcttctctctgtttgctttcgacatggatttttaaacccctgcagattttaatattctatataaatgttttaggtggcatatatgaggtttgtattaacatttgctttctatttaacattgaaatgaaattatacagcagaggtattttctcgtccaagttgccacttctttctatcttttttcttttctttcccagtggactgcctgggaaaattgatattttaaattgctctctgcaataatttgcaatggaactggaatgccagggttctgagtccttgccagacagctcgtccctcctgttggcatgactgagtcagctgtcatgattccctcagtaccagtggcatgcctgtgacagacagcctgtctgcctttcattcccgtcgtctcccttgtagggttcagatccaggatacactggtcctggagcccctctcagcctggcacccacagctgctgggttccttactctcctggactgctctgatgtcatctccctgctcagcagaaagaagtctgggatcttgatgctttggccctctgtcctaggccctaaaccacccattgcccttcacataacctgagctggggctaaatagatctctcatcactgcctgcctgctcctgtattttcccttcttggagcttttgcctgttcagatccctctactggaaattaataggatttcattctatgtgtgcatttccaacctttcttcacagtgcgatccaaatgcctcatcctacaggcctccttaaaacaacctgctttctgccagaccccagggagcaccaggacttgaggcttttattgcacttctgttgtttttttgagatggagtctcgctctgtcgcccaggctggagtgcagtggcacgatctctgctcactgcaacctccatctcccgagttcaagagattcttctgcctcagcctctcaagcagctgggactacaggcatgtgccatgacacccggataatttttgtatttttagtagagacggggttcaccatattggccaggctggtctcaaactcctgacctcgtgatccacccacctgggcctcccaaagttctgggattacaggcgtgagccaccatgcccagcgttatttcacttctgcctctgtaattatattgctgtatggctatctcttctctccctrggaatgtcaggtcctaggcacaggaactgtgtctgtaccatatctggtgcccaaagaatgtagtatgtgttttatagatatcatgtaagcttaaacagcgtggtctacatttttgtaaatgtctttctttttcttttctctccagaatgagagaagacagtgctagagtctatgaaaacgtgggcctgatgcaacagcagaaaagtttcagatgagaaaacctgccaaaacttcagcacagaaataggtatttaaatgcaagtgctctattggttaattgtttatataattggcagtatttttaagcaggcaagcaatttgggaatgttttagcaaagtgtaccataattgagttttacaaaccaggctcctttttcctctccctgtacttctttttccaagatggttttagtttagagttcattaaacattaaaatcaaacacagaattaattctgcatgaggcaaggctagcacttattccagagaaatggctgatactggtggtagagtgcaggtatcactgttcctgcaatttttattagagttggttagcccaggctgtgctgggggatgatctgtagggatctgggaagcatcgggactcagcactgggtggttgggagtcaggaagcctgagttctcatttcagtcagtctctgaccaactgtgtggcatggggtgctagaccacttggctgccgactgggtcaccgacatcccttccagctctgctgctggaaattcatctctcccatatgttgcctccccatcaattacgttttttaagtgtgacccaagtatatgatgtatgttttcatgataaattagaaacttatctgggcrtggtggctcatacctgtaatcccagcactttgggaggctgaggtgggcggatcacctgaggtcaggagttcgagaccagcctgaccaactaaaatagtagagaccaacccgtctctactaaaaatagaaaattagctgagcatggtggtgcatgcctataatcccagctactcaggaggctgaggcaggagaggcagcggttgcagtgtgccaagatcgcgccattgcactccacctgggccacaagagtgaaactccatctcaaaaaaaaaaaaaaaaamaaaaaaactcagtgtcagtatttcatgtcgaaattccacttcaatgggtagtgtagttaaaagctctaagtctaccttaaaatcacctaatgctttgttaagcttttagatatatgttccttaaaaactcttaacttatttcttccccagatgtggactttcaccctctccctaaaaagatcaagaacagacgcaagaaagtttatgtgaagacagaatttggatttggaaggcttgcaatgtggttgactaccttttgataagcaaaatttgaaaccatttaaagaccactktattttaactcaacaatacctgcttcccaattactcatttcctcagataagaagaaatcatctctacaatgtagacaacattatattttatagaatttgtttgaaattgaggaagcagttaaattgtgcgctgtattttgcagattatggggattcaaattctagtaataggcttttttatttttatttttatacccttaaccagtttaattttttttttcctcattgttggggatgatgagaagaaatgatttgggaaaattaagtaacaacgacctagaaaagtgagaacaatctcatttaccatcatgtatcsagtagtgkataattcattttgatggcttctatttttggccaaatgagaattaagccagtgcctgagactgtcagaagttgacctttgcactggcattaaagagtcatagaaaaagaatcatggatatttatgaattaaggtaagaggtgtggcttttttttttttcttttttccagccgttgaccaattatagttcggctgttgactgagaagtttgtggtgggaaaacgtttgccatattttctttgcatttgaataattgtcttgtacttagaaaaaaggcgtctatgaatgaccagtgtttttggtcgccaaatgttgctgacaaacttatcccaaaactttagtggcttaaaaaaacctgcccccaactgttagtcaatctgagctgggctcagctgggctgttcttctgccagcctgcaggtggccactcatgtggtcagcaggtcggcggagagactgggatggctgggcttctctctctgcctgcagtcctgagtctctccttcttcgtgtagtctctttcagtggcctggctggcagggtagctagacctctcacatgcagctcagagctcccaagagctcaaaagcagaaatggccaggccttctgaaaacttaagtccagaattgtcacagtgtcccttctacttccctctattgatgatgatgatgatgatgatgatgatgatgatgatgatgatgatggttttttctaatcagaagaaagctggggtatgccctctacttactaaacaagtcacaagcccagctcagattcaagaaaagggtgtgaagtagaggtgcagttaagtggggggccactagtctaacagacggtcacaaccagtgccatggaaaaccaaggatattagcaaaagcagaagttgctagtgaccttgggaagccgaagctgcttacagtagctgggacaagctgaaagtcagactaagaaataaagagagggccttcaagaagcttcctgaatgatttctgctagccctgagcctatttttggaaccagcacttggggaaactgatcttgtgaggatggatgtgtttagggacacagggcttttgagagcagcaccaccccactggggcatccccagacttgggaaacgtgactctttcttaatgccactgggttttagtcaggccacagtgagaaggaacagccctaacaggcctccagccaggttgaatgagctcatttttgttgtagccaaccagtaagatttgctaatgttctacattaagtgccttctccaaagacatccctctttgcctcatatgttgaatcatccagtgcggatatttcaatgaaaatatcattggttgacttttgtgatggtaataatgctatggcatctttgccatgaagttgtggcctccttggattcttctgactttggcttctgaaaggaaggcctagatccagccctggtggtagttcctttctgaggtctctcagtcccttgagactttggggtagtttggctgccattctcactgacaaaatgtatatcagcccccacctccaccccccaatattccttgaactttgaattgcttcagaacacaggtgtggcctgaaggtattcccttattagggaagtgtcactgctgtcttctagtcaaacttgtaaagaaaaagattccagttcagtatttgcagcaagaagcttgaatgctgttctttttatcgcattgttacatcgactcattctccattttgctttggttttgtcttgacttgacttgactttgggggtaaagtctttcaccagcacacaagagtttgattgtacaaatatatcttctgcattaacatctctgcctgttgcttaagatcagttgcttttatactcagaatggaaatacctgatcttggctagttttgttataagatattgatttcatttagatttccctccacgaggtcagcaaactatcatgttcttatgtaaacttaggccaaggccagagttatcatagtccctaggttgctacggcttatcatgtgcttggtaaaaggtgatcgcaggttctcagacgagtttactttacatgagatggaatcaggcagagaggctgggatgatggagaaagctcgaggtgaagttttaaaaaaaaagttgtggaaaggaaagttccaaagaggtggtttctgaggaagtcagagcgcccagggccagagcagtcagtaatgggtgaatgaggttgtttggaaagtcggtgtgacagacacatggatgccatctacttctaggttgctggtgggtattaaatatgcacaatattccatagctcactgaggattttaaaattataagcataggattttatattttggggtgaaagaattatctggcacattaggtattggagtttaaaaaaaaagccaaatttcacagtcttaataactttttttaaaaaaaactaaaaggcgcttcatgtccagtgtgtggcccttctgaaacttatggtcatctctcccactgaaaccaaggtcttttcaaatgtggctaaatggggatgaggagacacgggtaggactttcttggtgtgtgtgcattctttaaagagccaagttgcttcggggaaacagccaggaaaatggtcaagattatttttagaggttattttattggggattttaagaactaataacatcttgagttatttttaattcagggggatgtggaaaggtttgcaattgtcaagtgttttgttgtagcttagtatccataagggaaacttagactatagacataactacaaagccagtgcagcttttgttttctgtatgttgttgggggatcaactttcacacatagcaagcacatggcctccctgatgtcaggatgcctttgttaggatctgtatttgcccttaattttgttgaaatcttttttccttcttcctcttgaaaagttccaaaatatagtttattgtatctttcatcactaaaaatttgttcctttttcactatgggcagttcacacaaggcaaaaactattgaacagttggttttagtgtgttgtataactttgctgtatatcaaactaattttgacaagttttcatcctaagcctcaaatcatgtaattaataatttgcctgtttatttatgacctaattgtgattcttttattaataaaagctaatgggaaaaggatccctgattaagctgatgactagacctacaattaattttcctgcagtatatgaagtattgtaccagagtattaaaagatatgtaatattttattgataaatctatcctttaaaaggaatacgttttaggatgtcatcattttgatgtgaatcatgtraatgttgataatatgctgtttattatacatttagtgtttcaagagattcacttaattgcctttttgcccacgtatattatgtagtctatttgcaactgttcttaaaaaaatgacattaaaagaatagtttatgtagagaaacattagtggatgttaattgtctccccacctatatttatgggtgttagcgcaactgctttgctagttgcaaagctgtattatcagagtaaaagtgtatttgtaaactgtatgggaactaaaaattaggaataaaaccattttcttatatgatggcatttgtcgtttgcttcatcagaaatgtccaggaaaaaaatgggattattggtcactccacctctcacactggcaaaatactgacatttagcagctcttatctagaagtgacttggaacatagaataaaggcatgagttcctgaagaattcattgagtgtttcctgtagaaatagctttaggagatagggagttctatctgggagaacatatgagtaactcaagagtaaaaagtatagtctgtgtaaactatagaagaaatgctgggcatggtggcgcgcccctgtaatctcagctacttggaggctgagacgggaggattccttgaacccaggagcccaggagttttagaccagtctgggtaacatagtgagaccctttctcacctactctcactgcatgccccccaaaaatatatatgtgcgcgcacgcgcgcgcacacacacatacacacacacacacacacacacacacacagaggaaattgttagaaaacacacagaactgaatgtaaatagtattaggtgggaataagaagtaaagggatggtaaggaggcttggaggaggagtaaattatctgctatgggacatcagctcttcctttagagtaggtttaggtcacataccaacagggccactttgttctgacaacagtgtgcactgacatgggcagaaagaaaccattttatagatagcaaaacaggtggttattctttattagaaatataaggaatgatttggattacttatttacactgtaaaatactatgacccccctctcagtctcatttgaattgtttaatgcatctaatcaaatctagctggtttagtttgttagtcctgtcacctgtccattcagaaatacagagcatgggccaggcacagtgactcatgcctgtaatcccagcactttgggaagccaagacgggcggatcacttgaggccaggggttcgataccagcctggccgacatggcgaaaccccgcctctattaaagatactaaaattagttggccatggtggcgcatgcttgtaatcccagctactcgggaggctgaggcatgagacttgcttgagcccaggaggtggaggttgcagtgagccaaaattgcgccactgcactctagccctctagcctaggcgacagagtgagactctctctcaaaagaataaataaataaaaataacagagcaccttcaaaatactaggcactacacctgtgccctggggaggaacgctgcccgaaacaacctgatagggtgcctgtctaccagggagctaggccttgcaccgtcagaaggcagttcctgaagctgcccagagccaagacaaaagacagaagtgagacgactagttccaaacaagataagagccatgaagaggggctaagagtgtgtatcgcaccggaggattactacggggttttcaaaccatggtactgtttggtgattacccttgggtttcagaagaggtgctgtacacaatattgcttggagacacctcattccacataatccttcttgaggtcctggattgcatgttagagggcagtgacaatatcttgtccttggccatgccatgaaatgaccttctgtttgtgtagttcctactcacaagaagagttcccaagaaaatgagtacattaaaggcagagccggaatccctgcaataaatcctgcggacagagatgaggaattattcaacgtggtcaccttgtgaatgaaaaagcttctggtgtgagggtctactgttggctcatatgacatgtatgctttcatccacctcttctcttcgcctctacgagggggtagcaaaaaggggactgtgatctcaagtgaatggtttgattttgcaggtgctgttatttttcccctaggaactagctaagtttccaaacactgaatttgcaaatgggatgagccagaaatagagatttgctattttgtcagtggtgacagttaccagtgagctggtaatattcaagtcactggaggtcagatcatttaaatcctcaaataccatcatgatagaaaatatagctactgaaataagggttacaagaaagcaataccatactgccaagatctgtgagcagtttacggacaaaggaattgtatgtgatgcgcagacatgatgtcatttctacctgttacactgaactaaacagagtttgtttgggatccaaattttccatttggcaaagattaaatccccaataacagttaggcatcgggaagcagatgaataaaatagttcatgcatctgaggagctatgcatggagtcatagtcagggagacatatatattcaaatatttgtcatttgactagaatagacaatgataagattattaacttaaattgatggttgcatagaggagtgaattatagtgaggttagaattcagagaaggggtcacctgagcttactctgtcccccaggctggaatgcagtggtgagatctcagctcactgcaacctctgcctcccaggttcaagtgattctcctgcctcagcctcctgagtagctggaattacaggcatgtaccaccacatcaggctaatttttgtatttttattagagattgggtttcaccatgttggccaggctggtctcgaactcctgacctcaggtgatccacccacctcagccacccaaagtgctgggattacaggcgcgaaccagtgagccactgcgcccagctccctgtctctttttttttttttttttttt

SEQ ID NO: 93898 - DNA, 82280 bp, Homo sapiens
  misc_feature (1)...(82280): n = A,T,C or G
acataaacagagtttatacacatattatttctttaatcctcatagcaatcctatgagttacacattattatccctatttcacagagtggttagctgaattgtctgaggtcacccggctagtaaatgatgatctctgtctgaatcacagcctaagttcttatccactatgacacctttctaaattcttttgtatagagggtattttacataggctagcaaataattgacaattcccaattaagaagccatattactaagctgtaacacatatattttctaagtatctcttgaatctgtctacatttctctatctttacggtcaccaccatagtccaagaccccatcayctttcaccaggacaattgcaatacccttctgtttccactttcgctcttttccaattcttcctcagaatgatttttataaaatactaataggggccgggcgcggtggctcacgcctataatctcagcactttgggaggctgaggctggtggatcatttgaggtcaggagttagagaccagcctggccaacatggtgaaaccccgtctctactaaaaatacaaaaattagccaggcgtggtagcaggcacttgtaatcctagctattcgggaggctgaggcaggagaattgcttgaacccgggaggtggaggttgcagtaagtcgagattgcaccactgcactacagcctgagggacaagagtgagactccgtctcaaaaaaaaaaaaaaaaaaaaaacaaataggaacatgtaccttccttgataaaaatccttcgatggcctcccattgctctcactggtttaatgtctgtcccttccactagactggaagctctctgaaggatgtggcagtgcctgtctttatctttttctttttcaaaaagaaactctttttttgagtctcactctgctgcccctaccggagtgcagtgttgggatctcagctcactgcaacctccgcctcctgagttcaagcgattctcctgtctcagcctcctgagtagctaggactacaggcgtgtgccaccacgcccggctaatttttgtttttgtttttgtttgagacggagtcttgctctgtcgcccaggctggagtgcagtggcgcgatctcggctcactgcaagctctgcctcccaggttcacgccgttctcctgcctcagcctcccgagtagctgggactacaggcgcccgccactacgcccgactaatttttttgtgtttttagcagagactatggtttcaccatattggtcaggctggtctcaaactcctgacctcaggtgacccacctgcctcagactctcaaagtgctgggattacgggagtatgccacagtgcccagctgtgcctgtctttttctttttctttttcttttttttttttttgagacggagtctcgctctgttgccaggctggagtgtagtggtgcgatctcggctcactgcaagctccgcctcctaggttctggccattctcctgcctcagcctcccgagtagctgggactacaggcgcctgccaccacacccggctaattttttgtatttttagtagagacggggtttcactctgttagccaggatggtctcaatctcctgacctcatgatctgcccgcctcggcctcccaaagtgctggaatcacaggtgtgagccaccacacccagcctatgcctgtctttttcaaatgttgtgtctccagcatttagaatagtgccttgtacacaggagaagctaaatacattttgttgaatgaatggaattcaaatgatccttaaaagaggaatcttggtcacttatttttttgtttgtgtgtgtgtgtgtgtgtgtgtgtgtgtgtgtgtgtgtgtgtgttttgagacagagtctcgctctgtcgcccaggctgtagtgcagtggttcgatctcgactcactgcaagcttcgcctcctgagtcacgccattctcctgcctcagcctcctgagtagctgggactacaggcgcccgccaccacgcctggctaattttttgtatttttagtagagatggggtttcaccgtgttagccaggatggtctcgatctcctgacctcatgatctgcccacctcggcctcccaaagtgctgggattacaggcgtgagccactgcacccggctgttttgttttttgagacagactcttgctctatcacccaagctggagtgcaatggttcgaacatgactcactgaagcatcaacctcctcggctcaagtgatcctcctgcctcagcctcctgcctcagcctctcaagaagctgggaccacaggcatgcaccaccatgctcagctactttttttttttttttgagacggagtctcgccctgtcacctgggctgtagtatggtgatgtgatcgtggctcactgcaacctccacctcccgggttcaagcaattcttcagcttcagcctcctgagtagctggggctacaggtgcgcaccaccacgcccagctaatttttgtagtttttagtagaggtggggtttcaccatgttgaccaggctggtcttgaactcctgacctcgtgatccacctgccttggcctcccaaagtgctgggattacagacatgagccaccgtgcccagccagctaatttttttaattttaatttttgtagagacagggtctcgccatgttgcccaggctggtcttgaactcctcaagtgatccacccacctcagcctcccaaactgctgggattacaggtgtgcaacaccatgaccaggctcagtcacttaaatgggaaaattacaaaagttgaatttggagacatgaaggcaggtttttcataatttctaataaaatacttacttgtttattttctaatttaatgtctcatgccctttagactgtaagctccatgaaggaagggaccatggtctgccttgttcttgactccatcctagctctacgtcaggtttatgggaggtactcaataaatatttgttgtatgaatactttcaattaccaatgtggattggaaggtgatgaatcaaagagatgaaaatagtactggttagggcagaattgggacaagaaattaaagctatagttataagagctgtggaggatgaggattctttcattcatttaataaatctttataaggcacctgctatgggcctgacattgtgctaggcacagtctctgctgttatgcagattttagtctagtgataaataaacaggcaattcatgagatgaaatttccaaggcaaggggtgcttcagtgaacatctagtggggagcatttaactcagacttgggctgtcaggaagtgatgactaaatggttggtaactaaaggaagagggtatggaaagtgagggaggcagcctagaggcaggagagcgactggtagcctaaggttccttcttaactttttcctttcatccaacaaatttgtattgaccccatatcatatgccaagtattgttttaggacatcgttgaatttgtatttcaaaactagttgttgaaaaatgtaaaaaaaaaaaaaaagttctgtgtgtatgtgtttgtgtgtgtgtgtattcccttcccttaaacccttaggtagacacgcatctgggctgcgttccccatccccttaaagggtccccaatcccttaaagtgcattgtagatgcttaatgtttactgggttaataaattatcacgtgagtaactaatctgtggtttttttttttttttttttggagctggagtctcactctgtcacccaggctggagtacagtggtgtgatctcggctcactgaaacctctgccttccgggttcaagcaattctcctgcctcagcctccggagtagctgagactacaggcacatgctgctaagccccgctaattttttttttttttttgtatttccagtagaggtaggatttcaccgtgttgcccaggctggtgtcgaactcctgagctcaggcaatccgcccacttaggcctcccaaagtgctaggattacaggcatgagccacggcgcccggccatttgtgtttgttgttgttgttgttgttttttgagatggagtctcactctgtctcccaggctggagtgtaatggcatgatctcagctcactgcgacctctgcctcctgggttcgagtgattctcctgcctcagcctcccaaaattctgggattacaggaatgagccactgtgcccggcaagaaatgaattttaaattttatttatttttaattaatttgaatttaaattgccacatgtggctagtggctactgtatcagacaccatatatctctgtatggtagcatagtcttttttttgttttgtttttgagacggagtcttgctctgtcgcccaggctggagtgcagtgctgccatcttggcttactgcaatttccacctcccgggttcaagtgattctcctgtctcagcttcccagcagctggtattacaggcgcgtgacaccacgcctggctaatttttgtatttttagtagagacggggtttcaccatcttggccagcctggtctcgaacctctgacctcgtgatccacctgcctcggcctcccaaagtgctgggattacaggtgtgagacaccgtacccgaccagtctttttttttcccttgagatgaagtctcgctctgcygcccaagatagagtgcagtggtgcgatctcgactcagtgcaccctctgcctcctgggttcaagcaattttcctgcctcagcctcccgagtagccgggactacaggtgcacgccaccatacccagctaattttcgtatttttagtagagacggggtttcaccatgttggccaggctggtctcaaactcctgacctcaggtcatccgcccacctcggcatcccaaaataatgggattatggccaccgcccctggccctgtttggtagtggtctaaatagtctgagtcaggcaatgggaccaggtaggctttcagtctcttgcttaaaaatggagattgttggccgggcacggtggctcacgcctgtaatcccatcactttgggaggctggggcgggcggatcacgagttcaggagatcgagaccatcctggccaatatggtgaaaccccgtttctactgaaaatacaaaaattagctgggcgcggtggcgcgcgcctgtagtcccagctactaaggaggctggggcagaagaatcgcttgaacccgggaggcggaggttgcagtgagccgaaaccgcgccactgcactccagcctggagacagaacgaaactccctctcaaaaaaaaaaaaaggagattgttggctaggtacggtagctcacgcctgtaatcctagcactttgggaggccgagggaggcagatcacgaggtcaggaaatcgggatcatcctggctaacaaggtgaaacccagtctctaccaaaaatacaaaaaattagtcggtgtggtggcgcgcgcccatagtcccagctcctcgggagcctgaggcaggagaattgcttgaatccggcaggccgaggttgcactgagccaagatcgcgccactgcactccagcctgggcgacagagcgatactgcgtctcaaaaaaaaaaaaggagattgtcaatacgcggttatacaatgtctaaatgctgggctgttgaatgccactgacagtaaaaaatatctgtgyatagtggcaagccataagtagcacctcagtcaccgtatagtaattaactgcgtatcctggcatcccgacaggcaaccagctctaccgggtgaaaaggttgatggccaagggactccaacctaaccagggcgcactcgcggcattctgcgatcccgcactgcatcatggactttgtagttcaacatgccagtgacgtcactgccggttcccctctgagtgggcctatcgggtagacttccgataacccgtttttctctgggaattgtagtcagttagcgcctgctgggtgtctgctcgggtggtctgggaactacaattcccggcgggctgtgagatgccttggctgtagttagtaaggagccggatgattgcctcagcaggtgtgaagcgtgtgctttagtttcgtgggaggcctggcatccccgagagggaggggaaaggtaaccactcctttgtggaggtcgccagggtcattgtcgtggatttgcacagtcggctgggcggtgcaatggcggtgagtttgagcgagaagaatccgcaggggccctggagccggactggccagtctctaggggctctccatgtgctgtcctgaagggaaagtccttttctaaaagagagccacgcttaaggcgtgcctttcgtagagactttgctttttcttgctagtttatgaaccacgaactgatgtctgttaactttacggagtacttggatatcatatttgttatttctctggagtttctaaaatcgaggtggagagccgggcacggtggcccacggctgtaatcccagcactttgggaggccgaggcgggtggatcatttgaggtcaggagttcgagaccaccctggccaacatggtgagaccccgtttctaccaaaaatacataaattagccgggcgtagtggtgcgcgcctgttaacccagctactcgggaggctgaggcaggagaattgcttgaacccgggagagggaggctgctgtgagccaggatcgcgccactgcactccagcctgggcgacagagtgagactccgtcttaaaaataaaataaataaataaacaaacaaataaagccgaggtggagagaggagtatgtaagttgattcctacttacagcaaaaaaaaaaaaaaaaaaaaaaaaaaaaaaagaaaaaattgagcgcctctccgtaaaacagacaaaaatctctcttttcatagtgtttatgtgtgtgggtaaaatacattgtaaaatattgtgtcaggtgctgataaatgctgtggggaaaaaatagagcaggaaggggtgctagggagtgtacggtggggtagtacagttgcaatttttaaaaatttttttaaatttgggagatrttctcactctgtgacccagactggaatgcagtggcgtgatcatggctcactgcagcctggaccttagggctcaagcgatcctcacacctcagcctccccacagctggtactgcaagcgtgctccattacaccctgctaattttttgtatttttagtagagacagggtttcgaactcctggggtcaagcgatccttctgtctcagcctccgaaagtgctgggactacaggcatgagccatcccgcctggttttatttttttttgttttttgtttgtttgtttgtttttttcttgagacggagccttgccctgtcgccaggctggagtgcagcggcgcgatctcggctcactgcaacctcctcctcccaggttcaagcggttcccctgcctcaacttcccgagtagctgggactacaggcgcgcgccaccatgcccagttaaattttttgtattttagtagagacagggtttcaccacattggccaggatggactcaatttcctgacctcgtgatctgcccgcctcggcctcccaaagtgctgggattacaggcgtgagccatggcgcctggcctgttgcaatttttaaaaggatgatcaagcaaggctttgccaaaaaggtggcaaaaacgaggtaagagagcaacctatgcaactataggaagaaagagatttccaggcaggggcaacagtgtaagtgaaaagcagggatcccgggtagaagccagggatgcttctaaacatcctgcagtgcacaggacaacccctgaaaacaaagaattatttggcccaaagtgtaagtagtgccaaagtttaggaactctgatttagttatatagccttttgttaccagtgaggaggttgagtctcagattgatcaaatgacttgctcaaggttatacaacaagttggtgtttgggccaatatcagattttattatacttgatctttgaggttttgagaaacaagtttttctgagaaacagaaaactcaaataaaagctttcttgcatttggcatactcagtacaatgaaaagaaacacatagttctaagtaatttgtaaaagacttgctttcatagtcttctttacaatgggtgacatgatcatattttttatttttatttttattttttttttgaaatggagtctcattctttcccaggctggagtgcagtggtgcctcccaagttcaagtgattctcccacttcagcttcctgwgtagctgggactacaggtgtgcgccaccatgcgctgctaatttttgtattttttggtatagttgtggtttcaccatgttggccagactggtcttgaacgcctgacctcaagtgatccgcccaccttggcctcccagagtgctgggattacaggtgtgagccaatgcacctggccatattttttattttttgagacagggactcactctatcaaccaggctgyagtgcagtagtgcaatcatagctcactgcagccagccttgatctcctgggttcaagtgatcctctggcctcagtgttcccatgtcctgctcatggtaatttttaggtaaaagatatttgttacataacttctgtgtctgtggcattgtactttgtgctaaggtgactataaacratttaaaagttcctgcctgttgagaatttacagcccaactgcataaatgtcttaagatcattggttgcatttaacagaagtcaactcaagttggttaaggaggaatttagtaataaagtggaagttggccaaaggcgatggctcaagcctgtaatgtcagcactttggraagccaaggctggtggattgcttgagcctaggagttcaagaccagcctaggcaacatggtgaaaccctgtctctacaaaaaaatacaaaaactatctgggtatggtggtgcatatgcctgtagtcccagctattcaggaggctgagatgggaagattgattgagcccagtaggtcaaggctgcggtgagctggtgcttgcaccattatrctccagcctgggtggcagagggagaccctctctctctcacrcagacacacacacataaatacagtgaaatttcatattacccatgaccgtagggtaggagatatgactaggcttcatgaggccctacatacttttgcctttgtgggtgggtcctttcctctgtaaaaatattagaaattatattttacagaccgggctgggtggctcatgcctgtaatcacagcactttgggaggctgagacgggtggaccacctgaggtcaggagtttgaggccagcctggccaacatggtgaaacctcgtctctactaaaaatacaaaaattagccaggtatggtggcacgcacctgtaatcccagctgctcgggaggctgaggcaggagaattgcttgaaccccagagatggaggtttcagtgagctgagattggtcttgctgtgttgcctaggctggagtgcagtggctccatcttggctcactgcaaccaccgcctcttgggttcaggtaattctcctgtctttgcctcccgagtagctgagattataggcgcatgccaacgcatccggctaatttttgtatttttagtagaaatggggtttcgccatattggccaggctggtcttgaactcgtagcctcaggtgatccacctgcgtcggcctctcaaagtgctgggattacaggcatgagccaccaaacctggccaaaaaaattgtttttcttttaaagaggaggtctttctatgttgcctaggctggtctcaaactcctggcctcaaataatcctccctcctcagcctcccaaagtgttgggattgtagacatgaggcactacatccagccaagttacttattaagaagaggttttgaagtgagagggggcagtggcgttgatagtctaaatgaaggtggttagtagcaggaatggaaagggatgaacagttgtgcaggcttattatttcttagaaaagaaaataccttatacaatcactgttttatggaaacttgaaaagagtccaggtatttttttttttttggtgggggatggagtttcgctcttgttgcccaggctggagtgcaatggtgcgatcttggctcactgcaacttccacctcccaggttcaagcgattctcctgcctcagcctcccaagtagctgggattacagatgcgtgccaccttgcctagctaatttttgtatttttagtagagatggggtttcaccaygttggccaggcttgtctctaactcctgacctcaggtgatcctctcacctcggcctcccaaagtgctgggattacaggcgtgagccaccgtgtccagcctgttttatttaaatttcatatgaacagttctttaacaattttggagagaagttctctatcagtatctttgatattcatgtattttaattaaatagaaacatttgatgacagtgttacattgtagtatataattttaaaaaagcatatcaaagccttttacatatttcagtaattgttcaaccatttctttgaggtttgaggtacacaggtcatgataatcctaattttttttttctggcggagtcttgctgtgtcacccaagctggagtgcaatggcatgatctcggctcactgcagcctccgcctccctggttcaagcgattctcctgcctcagcctcctgagttgctgagattacaggtacccgccaccacgcccagctaatttttgtattttagtagagatgggtttcgccctgttggccaggctgatctcgaactcctgacctcaagcaatccacccgcctcggcctcccaaagtgctgggattacacgcatgagccaccgcscctggctgataaccctaatttttaatgttcatttaaatttcaagataaccatggaaaaatcagtctttatcagtgagcagctcagttctgtgaacccaattcttttttaaagcaagcgtgctgaaatacagagtggattattctctttgtgtccaataggaaagaaaaggaacagccaaagtggactttttgaagaagattgagaaagaaatccaacagaaatgggatactgagagagtgtttgaggtcaatgcatctaatttagagaaacagaccaggtgagtaatagtttgtgaagttctgcacattgtatttctatatatatatatatatatwtttttttttttttttttttttttttgaracggagtcttgctctgtcgcccaggctggagtgcagtggygcaatctcggctcactgcaagctccgcctcccaggttcatgccattctcctgcctcagcctcccgagcagctgggactacaggcacccaccaccatgcccagctaattttttgtatttttagtagagatgatgtttcactgtgttagccagggkggtctcgatcttctgacctcgtgatccacccgcctcggcctcccaaagtcctgggattacaggcgtgagccaccacgcccggccctgygcattgtatttctaaaaccgttggctttatagtacagaaacagcttggkggaacccataaggtagattgtatttataatgcctgaaacagggtgaaggaggtgactttcactttctgcatatgaattaggatcttttttcttatggggtttgtaaagatttttttttctaaataaagtttgttttgttttgttttaaagactacagtattttaaatatttagacaaagaaggatgttttgagatttttttctttgctgactgataaaacgaaattattctattagactcatagacgattattatctccaaagacagaaaatgtaaatttttatgttttttctttacaagtaaacctaatgcttatagaagtataaatgttgaagatattatttcataaatactgcattgccttgatactaaaataatactgatttaaagacaaacgtagatcatgacatgatatttgggaaaaacaaaaacaaaataactcccccaaacattgcctyaataaatgtatgcatcaattataagatatatcccagattcatatatgttgagatgtaagaaaatgtgctttttcagattgaagaaatacggttatartaacaacaataatagtaagttaacattgaacacttactgtgtgctagcaaatgtgctagcaaatttttttacatgtatactctcatttaatcttctttttctttctttctttttttttttttttttttgagacagtcttgctctgtcatcaggctggagtgcagtggcgccatstcggctcactgcaacccccaactccctggttaaagcgattctcctgcctcagcctccttagtagctgggattacaggcatgtgccaccacgcccagctaatttttgtatttttagtagagacggggttttaccatgttggccaggatggtctcratttcctgacctcgtgatccgcccacctcagcctcccaaagtgccgggattacaggcataagccaccgtgcctagcctttttctttctttctttttttagacaaagtcttgctgtgtcattcaagctggagtgcagtggcacagtcatagctcactgtaacttcaaactcccgagctcaagcaatccttcttcctcggccttctgagtagctgggactacaggcatgcgccaccatgcctggctaatttgttttttcttagagacagggtcttgctatgttgcccaggctggtctcaaactcctggcttcaagtgatccttctgccttggcctctcaaagctcttaagattataagacatgagccatcactcctggcctcattttaccttttaattttttttgtttttgttttttttttttgagacggagtcttgctctgtcacccaggctggagtgcagtggcgcaatctcggctcactgcaagctccgcctgccgggttcacgccattctcctgcttcagcctcctgagtagctggaactacaggcggctgccaccatgcccggctaatttttttgtatttttagtagagatggggtttcattgtggtctcgatctcctgacctcgtgatctgcctgcctcggccttccaaagtgctgggattacaggcgtgagccactgcgcccggcctttttttttttttttttgaggtggagtcttgctctgttgcctaggctgggtgcagtggcatgatctcggctcactgcaacctctgcctcccgggttcaatgatttttctgcctcagcctccccagtagctgggattacaggtgcatgccaccacgcctggctaagttttaatttttgtttttaatagagacggggttttgccatgttggccagtctggtctcaaactcaaatgatccgcctgcctccgactcccaaagtgctgggattacacgcgtgagccactgtgcccgcccattatcttttttttttttttaatttggagacagagtctgtggtgtcagatggagcgagcctctgtcacccaggctggagtgcagttgtgtgatctcagctcactgcaacctctgtctcctgggctcaggtgatcctctcacctcagcctcctgagtaggtgggactgtaggcgcacgccaccacacccaggtaatttttctatttttagtagaaatggggtcttgttatgttgctgaggctggtcccaactcctgggctcaagtgatctgcccacccyggcctcccaaagtgccgggattataggcatgggccactgcacccagcattgaaaaaatttcttttgtagaaatgaagtttcactgtcttgcccaggctagtcttgaactcctgggctcaagtaatcctcccacttttgcctcccaaagtgttgggattacaggtttgagccaccatgcctggccttaatcttctcaatatactttaaggttaacagcttttaaaatttctcttttacagctgaggaaactgaggcacagagaggctaagtaaccagttcaaggttacatcactgggaattgactgggcctgggcttgtttttaggactttctgattcaaaagtcttttttccttgcttattaagctatattctaatggatatatatatatatatatggatatatacatatatggatatatatatatatggatatatacatatatggatatatatatatatggatatatayatatatatatatatatatatatatggatatatatatatatatatggatatatatatatatatttgagacagagttttgctgttgttgcccaggctggagtgcaatggtgtgatctcggctcaccgcaacctccgactcccgtgttcaagcgattctcctgcctcagcctcccctgtagctgggattacaggcatgcgccaccacgcacagctaattttgtagttttactagagacgggttttctccacgttaggctagtcttgaaatcccaacctcaggtgatccgcccgcctccgcctcccaaagtgctgggattagaggtgtgagccaccaggccccagcctttttttttttttttttttttttaagagaaaaagaaattgctgtaatatagtctctggtgttatacttgaagctataatttgaagcttctattttcttctagaggtttggttaactttaaggtaatttaaaataattacaagtgaactgaaaaagctgctttgtttagtgaaagagaattaactataggtgtatgcagtaagactgaagaaagtaatataatgtcaagtgaagaaggcaaattgcagaagtctatatgaagtatgccttttttttgtatgaaactcacaagtgagcgaaactaaatgataaatagtttaagggtgctgscaagtgtgcaaactattcaaaaacaagggaacggtaaaagcaaatttcagaatgtcggttatctcttgtgggacagtagagaggaaacaggtagtttcagtggrttcataagtcagatggtgtgtttacaagtgttcattttattatgcttcataacacagtatgtatgttagatattcttcataagaaaaaagaatacagaccaagcatggtggctcatgagctcatgctcatggtggttcttatattgagaaccctgtctttacaaaaacaactaaaaaattaaaaaaaaaaaaaaagctttaaaggatgcgtttaaagtgaatctaccacatatcaagtaatattgaggatgttttatattacctgagggactttgaattgctttatatatatatctagtatctagtgaaaacaaatctcatttattcagtaaaatattaaattagcctaggttcataagggtattaaagaatttttttttttttgagatggrgtctcattttcgcccaggctggagtgcagtggcatgatctcagctcattgcaacctctgcctctcaggttcaatgatcaggcgattcttgattctcatgcttaaccactagagtagctgggattaycagygcacgccatcacgcccggctagtttttagtagagacagggtttcaccatgttgcccaggctggtctcgaactcctggcctcaarcagtccaccagccttggcctcccaaagtgttgggattacaggtgtgagccaccacgcctgacctagtatattatctttactcaagtattttagctcaaattaaacctctagtatttgttacaaggctatttaattcttaatagcaacctntcaatgtcttatttcttgtaaatctaaagtaattttcaattttagagagttttaaatttgtagatttataaatttacttttaaatattttttaaataaccttaagttatttatatcaagcatttccttcaccccacttccttattgtaaaaggaacttaacatttattcttctgtactttcttttttatactgttgttttgcagcaagggcaagtattttgtaaccttcccatatccatatatgaatggacgccttcatttgggacacacgttttctttatccaaatgtgaggtaatgtttccctatgtttgctataatggggaggaaggtttttaacgaatattgttttgaagaaaatggcagctatagaatttattatttcctgttaagagaacttaaaattccttaaagcataattttttatatttaagtaatttatttttatttttatttatttatttttgagatggagtcttgctttgtcaccaggctggagtgcagtggtgtgatctcagctcactgcaacctctgcctcctgggttcaagtgattctyctgcctcagcctcccgagtagctgggactacaggcacgcaccaccacgcccagctaatttttgtatttttagtagacacgggatttcaccatattggccaggatggtctcaaactcttgaccttgtgatccaccagcctcggcctctgaaagtgctgggattataggcatgagccaccgtgcctggcccatttaagtaatttaatttttatatttaatttttatgtgccatatgtgtatgtgtgcaagggtctgggcatgtatgcatattcaaaagtaattcctaggttggtgagttttgggatgcctaaaatctaactggcattccaaaggaggatgtaaagaagaaaactaatttttttgtgtgaaaagttcacattttgtatttgtctggcatttaaatttgcaatttaaatttaattttatttctgtagtttgctgtagggtaccagcgattgaaaggaaaatgttgtctgtttccctttggcctgcactgtactggaatgcctattaaggtaagatcgctaataggattggtttctactctttttasttggagcaaatagtaatacscaattcaagagcttaaaaggatttttaagtattgctgcattaaagtatgaaatgagttgaatttattatagtgaaaattaatttaaaaataaacaacatgtgaagaagtgcttaaataaagggcatccattatggtctaagtgattactaagtgattttaatgtcttttggttaccttgtgtatttatgtctgtattacagttaggtaataactgattctgttttactaaaaakaaaaatgtacagccattgtgcacttatgacatatgtaagatgccggcataaaataataaacagttgtattgtattttgatcatttttgcaaatatcttcatttgtcataagtttgtattagaaataattctcaatgaagaataggaaagaaaactagagttgaaaggattcctttatataataggattaggaaatttaaatcctatttctttttattctccaacattttattttattttactttattttattttttttttgagacggagttttgcttttgtcgtccaggctgcagtgcaatggtgtgatcttggctaactgcaacctccttctcctgggttcaagcgattctcctgcctcaacctccygagtagctgggattacaggcacccgccaccacacctggctaatttttgtatttttagtagagacgaggtttccccgtgttggctaggctgttctggaactcctgacctcagttgatccacccacctcggccttccaaagtgctgggattacaagcgtgagccaccatgcccggccttctgcaaccttttattttaaagaatgtcaatcctacagaaaaagtggaatggtagtacaatgaacaccctccacccttcacctgtagttacaaagtcttaacgtttgccatatttgttttagttctgtctcttagcacacatgcatgcatgcgtgcttttctctttctttttcttcttttttttttttctgagttggagtcttgctctgtcacccaggctggagtgcagtgttgtacttttagtacagatggggtttcaccatgttggccaggctggtttcaaactcctgacctcaggtaatctgcccacctcggcctcccaaagtgctgggattacaggcatgagccaccacgcctagcccttctctctctctttttctgtgaactttttgaaagaaagttgcagatatcatgacgtgtcattgctaaatacttcagcatgtattctaagaacaagggcattcttctacattatcagagtcctgttatcccctccaagaaattcaacattgatgttatattatcgtcttcatctaatctgtagtcaaatttctgtagactcaaaatgtcctttccatctgtttttccccccttttttttttttgagacggaatcttgctctgtcactcagtctggagtgcagtggtgagatcttggcttgctgcaacatctgcctcccaagttcaagtgattctcttgcctcagcctcctgaatatctgggattacaggtgcctgctaccatgcctggctaatgttttttgtatttttagtgtaaacagggtttcaccatgttgggcaggctggtctcgaactcctgaccttaggtgatccgcctgccttggcttcccacagtgctgagattacaggcttgasccactatgccctgctgtttttcactttttattttgtggagcacacattgcatgtaattatccattcttttcactgtcttttagttgtttgtcgtgatattgatgtttttgaagtctaagctagttattttgtagaatgtcctatgatatgagttttctgattgttttttcatgattagggttgggctaaatattttgacaagaatacttcattgttgaggtattaacttaccattgtatcacctcaaaagcatataaaatggtaatttgtcccatttagtgaaattaagttaatcctgccaggtttcctcattctaaaggtgacttttcctcctataaaattaaaaagtaaggccagacacggtggctcacgcctgtaatcccagcactttgggaggccgaggcaggaggatcacatgaggtcaggagttcaaaaccagcctggccaacgtggtgaaaccccatctctactaaaaatacaaaaattagccgggcgtggtggcaggtgcctgtaattccagctacttcggaggctatgtcaggagaatcgcttgaacccgggaagtagaggttgcagtgagccgaaactgcgccattgcactccagcctgggcaacaagagtaaaattccatctcaaaaaaaaaaaagaaagaaattaaaaagtaatctataggataacactttgagagcctctgaatgtcctgttactcaataaccctggttttatcatcctttaatcatccttgcctgtttttattattctattagtggttgaaattcttctgaatagaagagccttttccatttaaaaaatttttacttctgtatttcttatttttctcataactttaacagtgtttacttggtgtcatctttgtttttgacagtggactcattgtggtataattgataagagctagagtggaaagtccaaggttaagtctgtaactttgctagctgtatgaccttgggtaaatcacttcatctctgtttgttttctgacttaaagcctatcctatctacttggtaggcttgtgatgataactaatagagtatatgtgacagtaatctatctttctttctttctttctttcttgctggtgggattttatttttgtttttatttattttttattattatactttaagttctggggtacatgtgcacaatgtgcagctttgttacatgtgtatacatgtgccatattggtgtgctgcacccattaactcgtcatttacattaggtatatctcctaatgctatccctcccccctcctgacagtaatctttaaattgagaaacartgttattaatgttatccaaaatgataacacattatgtttcctacatctttatatatctaatatatatggtatatagtatactatattgaatattctgggtgttgaataaatgtttttgagtaaattaggtaaaatactactttataaattagtgaattttgaggtacatgatttatacctttttttaatttaattttatttttttgagacatgggactcattcttgctttgttgcccaggctagagtgcagtgatgtgatctcggctcactgcaccctctgcctcttggttttaagtgatcctgtcacctcaacctcccaagtagctgggattacaggcgtgtgctaccacacccagctaatttttatatttagtagagacatcatgttggccaggctggtctcgaactcctgacaagtgatctgcctgcctcagcctcccaaggtgctgggattataggcgtgagccactgctcccagcctccgtttcagttttctgtagtggagccacataggtatcaatatattgcaaaaaatttcagagtcaattttagttggcaataaaaacagtaaaaaactgaaattgtgtctaccttgattttgaacttcattatctctaatattcgttgtaggcatgtgctgataagttgaaaagagaaatagagctgtatggttgcccccctgattttccagatgaagaagaggaagaggaagaaaccagtgttaaaacagaagatataataattaaggataaagctaaaggaaaaaaggtttgatagtggttgatatttatgttggttgaagttttatatttttctgatttatatgtgcattcccagtactagcacagtgcccaacacataaaatgtactagatcatttttttaaagtatcaaagcaaaaaattatctttctggccaggcgcggtggctcaagcctgtaatcccagcactttgggaggccgaggcaggcagatcatgaggtcaggagatcgagaccatcctggctaacatggtgaaaccccgtctctactaaaaatacaaaaattagccgggcgtaagccggtcgtaggccgggcgcggtggctcacgcctgtaatcccagcacttggggaggccgaggcgggcggatcatgaggtcaggagatcgagaccatcctggctaacatggtgaaaccccgtctctactaaaaatacaaaaaaattagccgggcgtggtggctcacgcctgtaatcccagcacttggggaggccaaggcgggcggatcacgaggtcaggagatcgagaccatcctkgcaaacayggtgaaaccccatctctacaaaaaattagccgggcgtggtggtgggcgcctgtattcccagctactcgggaggctgaggcatcagaatggcgtgaaccctggaggtggagcttgcagygagcccagatcacgccactgcactccagcctgggcaacagagcgagactctgtctcaaaaaaaaaaaaaaattatctttctgactttcctatttcctttttcctcttttttgaagtaattttagatttacagaagaactgcaagatagtatatagatgttaaatcttatataactatgatactatttttcaaattaaggaattaacattagtacagtagtgtttactaaactacagactttttggattttaccagttttttcactaatgtccttttctcttccaatgtccaatccaggatcccacattgcagttagttgtcatgtgtccttactatgtttccttaatcttttctgtctttygttttcttctatgacctttatacttttaacgaatacgggtcagataattatagataatgcctcagtttgagtttgtttgatgctttctcatcgttagattgaggttattgatttggaggaagactattaggtaatttgtcgttctcaagcgttagggagtatatgatactgatatgtcttattattggtgatgttaacattgatcatttggttaagatggcrtctgccaggtttttctcctgtaaagatttcatttttttttaataattaatatatattttgggagagatcttttgaggccatggaaataatactgtgtttctttttaaatatttgctcattaattttagcattcatcagtggatcttgcctacaacaattattactctagtcttctaatcatgattttccattttcctckttctttttacatttattatctataattcctctgaaaagaagagctgtcctttctcccccacttacttaatctgtcctttctatgtcatatggattcatggatattcactttattcttcaggttataagccaataccattgagctttttgttttttaagagatggagtctcactatgttgctggtcttcagctctggggctcaagctgtcttctcacctcagtctccygagtagctggaactataggcttatacctctgtgcctggctattgggttgtttttgagtgtgtgtgtgtggttgttaacaacaccgtaatttgttgtcaaattgttcttttttattagaataaagctagaataaataaattgttctagctktggccattgggagtttttttagcttggctcctgtgtccattagacattccctcatcttcctttgttcaaagcaattgctttctttatggtgtcacaagctgttccaggcttgtattttccgtgattcaaccaaggaatcaaccacttctccaaggtttcttttattgaagaatggtgttcagaaactatggcctgaatgctgggtgtgcycattgcctgggggtatcactgcttctaggcactctcagtggacagagcaaggaaatatatttatgtctgctaagccatgcatacacatctgtttttatttctttatgtatttgaatgtttattaaaaaacaagtaagttcatattgatacccctggctccattttagcaccatgggtctcattctagcattttcccttggcttatttgtgacttcttactacaacagtgagaaacttgrctctcattacctatagtatatttctttatttgttccatcctagactactagtagtttcagaattgccaacctatacccctgggagaaacaattttactgacaaaagtacagtgtttgtgtgtaattctttttgtctttagaatctaatcacactgttttccaaaactgcctagatcagctcctttcttccctcccccttgagtggktatatcatatatttgtaatgcagttagatagatttgtcacagtctgcattcctcaggttccttcagcatcgtggttgaattttttaaaaatttacataccataaaatttacttttttttttgtttttttcaagacatagtcttgctctgtcacccaggctggagtacagtggtggagtcttggctcactgcaacctctgcctcctgggttcaagcaattctcatgttttagtctcccaaatagctgggattacaggtgtgtgccaccacgcccagctaatttttgtattattgttattatttttattattgttgttgttgttgtttgagatggagtctctctctgtcacctgggctttgaagtacagtggcacagtctcggctcactgcaacctccgcctcccggttcaagtgattctcctgcctcagcctccagggtagctgggattacgggcgctygccaccatgcccggctaattttcgtatttttagtagagatggggtttcaccacattggccaggctggtctcgaagtcctgacctcgtgatcygcctgcctcggcctcccaaagtgctgrkattacaggtgtgagctactgtgccaggcccaaaatttcctctttgtggtgtataattctgtgagtttgaaaatgcctggrgtcatgtttctaccagcacagtatcatatagagcaattctgtcatcctcaaaattttcttatgctgcctcattatagtgttacagtttaaccaaatttcctaccttcaacttctggcatttggttgtctcttggatattcataatttttggaaaaggaggaaagtcttatgagtagcctctttataggtaaataaggtaaatgtggtattaggataaaagaaacagaaggtttggtattgagatcttatcttcataatgggtagttctttatgttgccatccatttagttattattggtgccagtgtcttggcggatatcttggctatacagtttgacagactaaattagtactatttagtacagactagtacttttagtacagactaatagtacaactaattcctgcagtgttctgatgtatcagcattattttagaatgtaaaaaaattacattcattaatatcttgggtcattttcctggagtgttggttattctttgatcgagtttatttttctccattattttcagagtaaagctgctgctaaagctggatcttctaaataccagtggggcattatgaaatcccttggyctgtctgatgaagagatagtaaaattttctgaagcagaacattggcttgattatttcccgccactggctattcaggatttaaaaagaatgggtttgaaggtatgtctataaaggaaatatgaggaaagcatttacaagtatgtgcttttttattgtgctttgctttattgtgctttccagacatggattttttttacaattgaagatttgtggcaaccctgcgttgagcaagtctagtggcaccatttttccaacagcatttgcttacttcatgtcacattttggcaattattttaatatttcaaactttattattatctgttatggtgatctatattcagtgatctttgatgttattattctaattgttttgggttgccacacactgtaccyatataaggtggcaaacttaattggtaaatgtttgtgttctgactgctccactgactggcttgtttccctctttctctccttggttttccctgttttctaataaacaacaatcttgaagccagttattaaccttataatggcctctaagtgttcatgtgaaagggagagtcacatgtctctcatcattttaagtaaaaagctagaaatgattaagcttagtgaggaaggcatgttgaaaggcaagataggctaaatgctaggcctgttgtgccaaacagtcagccaagttatgaatgcaaagaaaagttctttttttttgtttgtttttttgagatggagtctcgctctgtcacccaggctggagtgcagtggtgtgatctcggctcacggcaacctccgcctcccgggttcaagctattcttctgcctcagcctcccgagtagctgggattacaggcgtctgccaacacgcctggctaatttttgtatttttagtagagacgaggtttcactatgttggccaggctgttcttgaactcctgacctcaggtgatctgcccatctcagcctcccaaagtgctgggattataggcataagccactgaacctggcccaaagaaaagttcttgaaggagatgaaaggtgcttctccagtaaacacatgaatgataagaaaatgaagtgaccttattgcagatatggagaaagtttggtccatatagaagatcaaaccagccacaacatttccttcagccaaaccctaatccagaggaagtccctaactcttcaattctgtaaaggctgggggaggtgaggaagatgcagaagagaagttggaggctagcagaggttagttcttaaggtttaaggaaagaagccatttccataatagaaaagtgcaagttgtagcctgggtgtggtggctcatgcctgcaatcccagcattttgggaggccaaggtgggtggatcacctgaggccaggagttcgagaccagcctggccacctggggaaaccctgtctctattaaaaatacaaaaattagctgggtatggtggcgggctcctataatcccagctacttgggaagctgaaggaggagaattgcttgaacccaggaggttgcagtgagctgaggctgcgccattgcaacccagcctgggcaacaagagcgagactctgctgcaaggtgaagcagcaaatgctgatgtagaagctgcagcaagttatttaggggatctagctaagatcattgatgaaagtggctacgctaaacaacagattttctatgtagacaaaacagctttcctctagtgattaagatgctgtaagacttccatagctagagagaagtcagtgtctggcttaaacgatgggctgattcttgttagaggctaatgtgtctactgactttaagttgaaactagtgctcatttaccatttggaaaattttaaggcctttaagaatggtgccaaatctactctatgctctgtaaatggaaaaataaagcctgggtgacagcacatctgtttaaagcatggtttggtgaatgttttaagcccactcttgagacctactgctcaggaaaaaaaaaaatttctttcaaaatattactgttcattgacaatgcacccaatcactcaaaagctctgatggagatatacaaggagatgaatgtttttatgcctgcaaacacaacattcattctgcagtccatgaatcamggagtcatttgacttgtaggtcttcttatttaagagatacattttataaggctataacagtcatagatggtaattcctctgatggatctgggcaaagtaaatagaaaaccttctggaaaggattcattgttctagatgccattaagaacattcatgattcatgggaagaggtcaaaatatcaacattaacaggagtttggaagaagctgattttaactcttatggatgacgttgaaaggttcaagacttcaggggaggaggttactgcagatgtggtagaaattgcaagagaactagaattacaagtggagcttgaagataagcctgaattgctataatctcatgagaaaacttgaatggatgaggattcgcttcttacggatgagcaaaaaaagtagtttcttgagatggagtctacttctggtaaaggtgcagtgaacaytgttgaaatgacaaagattttgaatatcacataaactttagttgataaagcagtagcaggttttgagaggattcactccaaattttttttttttttttgagatggagttttgctcttgttgcccaggctggagtgcaatggcatgatatcgactcactgcaacctccgcctcccgggttcaagtgattctcctgcctcagcctccctagtagctgggattacaggcatgcgccactacacctggctaattttgtattttgtattttttgtttgtttgtttgttttagtagagacggggtttctccatgttggttaggctggtctcgaactcccgacctcaagtgatccgcctgccttggcctcccaaagtgctggaattacaggcatgagccaccatgcccggcccactcccagttttgaaagttctattatgagtaaaatgctaycagacagcatcgcatgctacagagaaatctttgtgaaaggaagagwcaatggatgtggcaaacttcattgttgtcttagtttaagaaattgccatagccatcacaaccttcagtagccrcttctctcatcagtcagcagccgtcatcgaggcaagactctccaccagcacaaagattacaactcaactgaaggctcagatgattattagcattttatagcaatgatgtattttaaaattaaggtatatacattgtctttttaaatataactttattgcacacttaacataattcaatatagtataaacataacttatatatgccttgggaaatcaaaaaatttgtgtgacttgttttgttgtggtggtttagaaccaaacccacaatatctcccagatatgtctgtatatttgtgtgattatatgagatttggaccaaytcctaattttagaataatatatttcccctgtatgccactaaagaattagtactgttattgttagactagaacctaacrttgcctatgggtctcataacaatgaatacttcactatttgttgaattagaatgtatattgacatattaacaattagtagaaaggagctttattcaaagaatatgaagaagcccaagtttaacttgaatatttaggaatacataaaggtaggattaaatgtttcttcttaatttattatagcttctatatgtttgttaatatgtatatgtatatgcttaaaaatatactttaadtaaattaaagtaattgtgatatacttttaatagtggaacttggaaaattatttttaatagttgatctgattctaagttagaagagtaaataattgattcataggaattcttatttaaacaaaatttgtgtatttctcagtaattgccttttaaaattttccttttataggtagactggcgtcgttccttcatcaccactgatgttaatccttactatgattcmtttgtcagatggcaatttttaacattaagagaaagaaacaaaattaaatttgggaagcggtaagtttgttatacttgagcataataaagcaaaaatcagttgggcacagaggctcacgcctgtaatcccagtgctttgggaaactgaggtgaggggattgcttgaggccaggagtttgagaccagcctgggcaacatagcgagaccacatctctttatataaaaaaaaaaattagccaggcatggtggcatgcacctgtagtcctagctacttgagaggatggggcaggaggattgcttacatgaataaataaataccttgtagcctaccttttcccattacctttcaggttttaaaatatgttgtttctattcttttgtatcctttgttttccttttttccttaccagtgtcttaatttctctgagctgcttagtgtttatgacagatataaccagggagaatgggagggtgggcttttattatcttactaaagattatgttcagtattccctgccaagcagaaaaagtaatcatttgatttgtgttttattttatactttgttctacaaattaagattcttccttgattatgtagattaatcaaggaagataacttaagaaatgaaaataagttatcttccttgattaatctacataatcaacttcctgatagtttcatttgttaagtcaatttatgttttataatcttttgttcaataccacaaagccaagatsagtgtgtatttttcagtggtattacctttgacgaagatagaaagctttcattaaataagtaggttgacagtggaactaccataagagtacacataatagacacagatatctactcagaaattctagttgcaagacatgtaagaaattaggtgcaacacaggcaaatatggtaggataaaacgtgaatattataataatgtttgtcactttttgtttattttttaggtatacaatttactctccgaaagatggacagccttgcatggatcatgatagacaaactggagaggtgattatttgtgagacagagtagctattataataatccttaatawgactatagagtttaagaaatagaaacctaaaaataacttctttgtagtgctgagggatgtagtcctgatactctggtggatatgaagaggagatagaatatcaatacaggtacctgtatcttgtgtagtacctagctatcctaagagtcatgtgaggacagctgcatcagtttgttacaggaaagcacattgtttagcctcaccccaaaattgctgaatcaaaagttctgggggtggggcccaggaatatcttttttttttttttcagacggagtcttgctctttagcccagaccggactgcagtggtgctatctcggctcactgcaagctctgcctcctgggttcacgccattctcctgcctcagcctcccgagtagctgggactacaggtgcccaccaccacacccggctaattttttgtatttttagtagagacggggtttcaccgtgttagccaggatggtctcgatctcctgacctcgtgatctgcccgccttggcctcccaaagtgctgagattacaggcgtgagccaccgtgcccggcctccaggaatatctttttacgagctctcaatgtgatgtatatgcatgctaatgttgtgaagcaccatctggaaaataaacagctctaaaaagaaagcatggggagaggtaataagatatgtgaccaagatttgatatacacagattccagttatatttgctttgatcatgtgccttcttgcttatttccaaagtaattctagccatgcctagaagttcattctaattcctgtagaacacattattaacattattctctgaaatacttgaataaatcaagagtaagtgatttggctaaatccatggcaaagtaaaaatcaatgacaatgccakcatctgaacttatgattccctatgattgcatcattytttattaccatctttgaacatattttcaaaatcagccttcaattttgatgtaacttatctaagtgagagttgatcaaaattttaaaagatttgagagacttaagacccagtaaagttttaatatagccaatggcagcaatatcctagatttcagtaatcctttgtagatttttcaaagcatttttcatctgttatcttgtgtgttcctcaggacagtcctatctgagacgcaacatccttattttaccaataaggaaagaaaggcttagagagattatgactaccttgggtctaaccattagtaagggagcaaactaagtttagaaagcacattatctctgacctctggtctagtgtcttcctttgatgactactatgtgggacatgccctgggatggaattagggttgattgtgtcttctcaccttcattttggcaaacactrttttgggcgattactccaaatctctcctaacrtactagacttctgtgtgggtatagttagcacaccactggcaatctcttctctgcaaaaaaaaattaataatgcaagaacccattttagggacttgaatcagatctctcacatagattagtaggtttaaggcaagtcttttttttccttcaaatttttgtatcgtttatttgcttagggtgttggacctcaggaatatactttactcaaattgaaggtgcttgagccatacccatctaaattaaggtaggtttgccagagtaattgctttatcatttctgaaccatcagatagttgttacagagttgacatgtytttacatcaatatttgtttttttttctcagtggcctgaaaggtaaaaatattttcttggtggctgctactctcagacctgagaccatgtttgggcagacaaattgttgggttcgtcctgatatgaagtacattggatttgagacggtgaatggtgatatattcatctgtacccaaaaagcagccaggaatatgtcataccagggctttaccaaagacaatggcgtggtgcctgttgttaaggaattaatgggggaggtaagttggatagcagattttttattttaatgcgtaaatttcaaggaaaatttcaacaatgaatattgagaaaagagcattacaaccttaaaaaatgaggtgtacatgcagtaaactgtgtaagtcttgtgtgttttggtgcattttcatatgtatatacacttacgtaaacaccacctaaatcaagatatagaacagttttagcactccagaaggctctctcatgtccatatcattagtactcacctctctcctccaaaggtaaccactgctctgacttcaccaaagattagttgttgttcttgaactttacataatggaatygtgtagtctgactgttttgtgtctagcttcttttgcttaacattatgtttgtgagattcatacatgttgtaggaatagttctttttttattgttgtgtaatattcattgtatgactgtatcattaagatagcatattttatttttaggtttcaactcggtaaatatctggttgaaaaatataggcagtcctccccaagagatttaatagctgcattagtcattatattattttaaaaatactattacctgaattcctggtaatactaaatttggaattgtagctgccttttttttttttcatgtgaagaaagtcttggttgatattaattaaatatggatggttacacagctcatctactttattttatttttatttttttttttgtagacagttttgcccttgttgcccaggctggtgttcagtggcgcgatctcagctcactgcacctctgcctcctgagttcaaacgattctcctgcctcagcctcctgagtagctgggattacaggtgcgggccaccacgcccagctaattttttgtatttttagtagagacagggtttcatcatgttggccaggctggtcttgaactcctgacctcgggtgatccacccacctcggcctcccaaagtgcagggattacaggcgtragccactgtacccagscttatctactgtattatcaatatttctgagtgtgtttaattccatttagtgaatgctgatctttggtatcttaaataattttttaaaaagaaaaatatgagtagagtaccatctcaattcttttaaattgaactattttattccttatttaatactttgattgcagtatatttacaagtcccaaaattcaaaaaacrcaaaaagatacaaaagttccccattctagaggtagttagtaatatctgtgtcttgtgtatcctggtaatatttcatgtatacacaagcgaatacacacatactctttgtccctctgtttttacacaaatggcaatatactttatatgcattgtaccacatcttgctttttaatttgtatcttggcaatcattttgtcagtacataaacagcttctttattcttattttttatagctacatagtatttcattgtttggttgyaccacaatttacttaaccattctctattaatggatatttgaattgtttcctgcctttttcttttaaaagcagcactgccacatctctttagttcctaatgttggaattttgtctgagaagttcttgggaacagtattagggacatacatgttttcctattcttaatgcaasttttctccctgttaatttgagcaaattctggcgtgagggacrtggatgttataaattgcaaaatagtttcaacatttaaaatggttataatatttagctgtcatccatatgactgcaaattctataaaggcaggttataagtacatatatgaataaagaggggtgggtgggaattatgtggaaaggaaaagtgtgttccttagctagagcaagmagctgcaaattctttgttgccatctgagaatttgggtctaaaattgcttaatcttttggattttttcaagtgaaattagaactatccttttactttgtcttcataactactattttaaatagatgtatagtacccattcttgttcttgtaacatattttgttaaatcattttttctatcattgaaagctttagttgtttccaggctttcctagtataattaactcagcattgggtagacttgtttaagaaaaaataattagttgttgttgagtctgagttacatgaacattttgtggcttttgctgtggattcctatattttcttcaaggagtacaatgtcacaaacaatgtattagtgtactcatgtcataatattgacagatttagttattataattattaaaaattatttttccgggacgggcacggtggctcatgcctgtaatgccagcactttgggaggcagaggtgcgtggatcacctggggtcaggagttcaagaccagcctggccaacatggtgaaaccctgtctctactaaaaatacagaaattagccaggcgtggtggtgcatgcctgtaatcccagctacatgggaggctgaggcaggaatcgctggaacctgggaggcggaggttgcagtgagccgagatcatgccattgcactccagcttgagtaacaagagcagaactccatctcaaaaaaaaaattatttttcctctagtaggtataaaataatgtgttttgttttacttcatatgtattttatttatattcttttctttattttttgagacggggtctccctctgtcacccaggctggagtgcagtggcacgatcttggctcactacaacctccacctcccgggttcaagcaattctcccgcctcagccttccaaatagctgggactacaggcgcatgccaccacgcctggctaattttttgtattttagtagagacggggtttcaccatgttgcccaggctggtcrcgaactcctaagctcaggcaatctgcctgcctcagcatcccaaagtgctgggtttacaggcgttagccaccgcgctcagcctgtattcattttttaattgacagaaattgtatttatggtackcaatatgttttgaaatatatatacattgtgaaatggctaaattgaggtaattaacaaattyataccttacgtacttaccattttctgtggtgagaagagttaaaatttaaatcaggtgcagtggtatgcacctgtagagccagctacttgggaggctgggacctcaggaggcttgcctgagcccaggagcttgagcctgtagaatgctatgatagcacctgtgaatagccwctacactctagccttggcaacatagcaaggctctgtctcttaaaaaaatctacacagcaattttcaagtataaaatacattgttatttcctatagtcaccatattgtacaatatagctcttgaatttatttccatatatttttgattactagcttctcagggcttaaaatattaacatagttttaattctaatggtcacaatgaattacttcaccttttatattgatttttttcttatgcaggaaattcttggtgcatcactttctgcacctttaacatcatacaaggtgatctatgttctcccaatgctaactattaaggaggataaaggtaaagagtttatttatttctagaaatattttgataawcacattttggttctagttattaattccacactttgttttctaaggcactggtgtggttacaagtgttccttccgactcccctgatgatattgctgccctcagagacttgaagaaaaagcaagtaagtatctgagtttcatgtttgtatttcgtcctcaccatctcattgcttaggtgctgctgaactacgctgtgggactaggctaaaaagctatgcatttatctttaaactgctatctctaacttgtttcttgatgttaatatattttctgtggtttgaattttaaatrtgtttcacagaattttgaaaaagctttctgatattcacattttcattgaaatctggcatatgaacctcaatttaagtgatatgtgtatgtctatgtacatttttgcttttggttgtgtggtttcatttaggctattcactataactttagctattaaatttttgaaggttacagatcccttttgagatatttggcaaagttrgaaaattgctctctatggagaggagaacaaatagaaactttaaagaaactyttaagaaactttggagrttgcttctctcaatgattctcccagtaaagtgttgatcattagtgttaacttgcaaatttttctgtaggccttacgagcaaaatatggaattagagatgacatggtcttgccatttgagccggtgagtacatagataattcagaatattcacatccatctctttatcagagaaaaagaagagctaacatgttttccttataacaaaattaattggtggagtatgaaaaagagagtttgcttaaggatttactcactttaatttgatacctgctatggtagataagagcaaaaggaaaactaacaagcattttcttaccacctggcacctgcagttctggaacaaatagctttttagcatcaccaattttatagtagcttgctttgctagtgtgatcaatttcctggcttctaaagataaaattttgcccttttcatgaatgtttatatgtaaccataataactttaacaaagtcctgtacaactctgttttatgtttcttgtattttcatgttagtatctatagaagaaaaacttttaaattactagcaaatgattttcatttcatgaaagatccagaggaattaatataaaccaaaagcacaaccatccatgaatctagttgtttacatcagcaggccccaacctttttggcaccagggactggttttgtggaagacaatttttccatggaccagcagggtgtggtaggggaatggttttggcatgaaactgtgccaccttagatcatcaggcaktagattctcataaggagcaagcaacctagatccctccatgcacagttcacaatagggttcgtgcttctatgagaatctaatgccacccatgatctgacaggaggtgaagctcagggggtgatgctcgcccgttcctcacctcctgctgtgcagcctggttcctaatgccatggactggtacyggtccacatccttggggttgggaacccctggtttacatcattttgctagtttcagtatgaattacttaggtaattatatgccagtggaggatagagtgttgggaaaggtgtgtgtggtgggggaagggcattgggggtgttggtacacagagtatgggtggttcctgtggagagtagaaggacaaatttacatctggaagttagtcactctgtgattacttaatgtgtggcagtgtcgtaatgacatatacaatctgaaatgacttaattggacattagaggcaaaaggacttgtgccctacagagctgtgtgtccagtcagtgtgaacacgttcctgattgctgtttgctgcaggtgccagtcattgaaatcccaggttttggaaatctttctgctgtaaccatttgtgatgagttgaaaattcagagccagaatgaccgggaaaaacttgcagaagcaaaggagaagatatatctaaaaggattttatgagggtgtaagtaataattttttttagtttttatttgctttactccatgctctgtgattttcttaattagaaaaaatgtagaaaaatttaacatagtttcagctatacattgatttgagagcttaatatgagaatgtattctatttccaaatttctaatttttgtttttatcatgtcctttgcctaaaagcattttcagraattgtctttttcgtgccctctaggaatctctatggagtgaatttcttgacaagatatttcaaattagttcatattattatgcagtaaacttcaaagatttattgaatggagaatacctggtcccttcttttgctcttttagttaaggagttcatattttagataagcagttttattcagtccattaatttatttattaatgtctactaaatgccaggtgagttcaacaaacatgttctgaaccattcttttctcctaattgtgcatatgttaatgtggtttatatttccatggaaagaaggctaggctagagaacataaaaatccaaacaagttattaggtgcttcagagtcaaatgaagatttttaaggacatcaacaagaatgttttttagtttagctttcctacatttttctggataaccaagaattggttacatttcttttttttgaagtgacacatattttgaatgatgataaaagcaacacttatgtagcacttatatattaatttacttaattctgaaaataaccccattctgaagtaggcactcttatctccaatttacrgatgaggaaatggaggcacaaagagattattaactgatttacttgagattagccagatagttagccagtgggaactggaattcaaactaggtagcctggctctgggatttacatttgtgtgtgtgtgtgtgtgtgtgtgtgtgtgtgtgtgtgtgtgtgtgtgtctatctgacggagtcttgctctgtctcacaggctggagtgcggtggctcaatctcagctcactgcagcctcyaacttccgggttcaagcgattctcctgcctcagactcctgagtagctgggactacaggcacgtgccaccatgaccagctaatttttgtatttttagtagacacgaggatttcaccatattggtcagactggtctcgaactcctgaccccaagtgatctgcccaccttggcctcccaaagtgctgggagtataggcttgaaccactgcacctggccagatttgtgttctttttttttttttttttgagacggagtcttgctgtgtcscccaggctggagtggagtggctcaatcttggctcactgcgacctctgcttcctgggctcaagcagttctcctgcctcagcctcctgagtagctgggattacaggcccctgccatcacacccagctaattcagatttgtgttcttaatcactgcattcattaaatataactttataatgctggattaaatagatattgaagtattttggtatgttagaggtttagaatgtcaaaagagaatgcatgtcttttctacctaagatagaaacaatttgagagaaatataagagtcatgtagatgaaaataagagtcatgtaggtgaaaatatctgctttattaccagagaaagctggaaggtgattgaggcttaattgatggcaacaatggataagctaatactttgccctagaatgttattggcctactgaaaaagatagaggtgaaagagtaggcctccttctaagagcaagctttatcacatggtcaggcaaagaatactcacctgcagcaggtggggttagaaagaggagcctaattagatgaagccgaatgtacttagttccttcagaaaccaccaggaatgaggtgagtgagtrtaattgaagtctgtcyatgtggaaacttaagaagtggaagtgagtattccttcctaatcatgctcacactaggtatctccgtgatacctagtgaggtgtgggtatcactgacagaacgataagtgtgttataaatattagttatccatgctataccaaaatgaaaaattatcgttgtaaatatgataaatttcatactaaaaatatttcggtgggcagaagcaaatttagttagggaaaattaggaaagaaactcaaggcagattctaactgttttatatgtggtttttctcccctctcatccttttagatcatgttggtggatggatttaaaggacagaaggttcaagatgtaaagaagactattcagaaaaagatgattgacgctgtatgtgataggctatgctctgaaggctgttttagaagagctgttaatagacttgacagtgttattagcagtgagttctacagtagaacctggagctrtaataaaaatatcatacagttttgcggcagaaaatagacctatttagcaattcatttaacttgaacatcccatctataatgttgataaaggtagtgttttaaagtcgatgtgtgcatagcatgtgtagagaactttgatgatatttctggcagtggccattttagatactggtagttacaatcctttctttctgtggtgtttctgtcgtcctcctctcatccctccgtttctgttataactctcttctatttagctgagttaaccctttacatttttatttttgacaactttgtatacccataatactatragagacaatggtctgttaggcttgttgaaataaaaaagcagcaatttcctcatcacttttccataatttaaatttctcttccttggagggggtaacatttaatcgttttagtattgatctccagctcttttttttttgagatggagtttcrctcttgttacacagactggaatgcaatggcgcgatctcagctcactgcaacctccacctcctgggttcaagtgattctcctgcctcagcctcctgagtagctggaataacaggcatgagccaccatgcctggctaattttgtatttttagtagagatggggtttctccatrttggtcaggctggtctcgaactcccgacctcaggtgatccactcgccttggcctcccaaagtgctgggattacaggcatgagccaccatgcccggctaatctccatctctaacagatctctgayctaaatgcttgtaatgtgatttttttttttcagggttaggtatcagccactaacctcctactcttggaaggagtaggaggaagatcaaagttacactctttcccctactttttgttttctctaacgtcccacatttattggtatatactactccataccctgtcttctccgtacactgtagttataacaaatgttagatgaatagttattatttacatttttgagacatggcttatccataatacaataatttttcatcctcagcttttggttttccctgggattaatagttaggtttatttttaaaacattcttaattaaaatacactcgtcagtactccatttctcaactcttttccaactgtctatttcttttcttactcagttcaaacacatcagtgtgctttcagttccatctcagagaaagctcttccagcgctttctggctttagtctgaactggttgcttactgtcctgatgcacaaatcttggatgttcctccactattgctaagaataccctttgctcctcttgagctggatctcctgtttccttaatcccatgtctatgtccttatattctttctcattttggtgaaattctgcctctgatagcttttctgagaaagggtacctggaaggtaaattgttgtgacttttcatgtctgaaatatgtcttctatctttatattggattgcctgagtatagattctggattggaaataattttcccttaaaaacctgaaggtattacctcatcatcttttggttcattgatgctattaagaagttgaaaactcttctggtagtgactgatgtttttgtaactaacttgtttcccctgactttggaggcttgtataatcttttttctcccagtatcctgaaatttcatgatttgccttgggtgtaggtcaattttcattcattctactgggtgcttggtgggctccttcaatctgaaaacttgtgtacttcaatttggggaacatttcttgacttttttcttgattatcttatttttttcttattctctattttcactttttgaattcctatcattcagatattgaacctcttagatcctggcagtcctgttggtcctctttgtgggatagtccctcatcattttcttcctgagcttttctttactatgtgcttttatttactatttgtgtgtgtgtatgaatacaaatttataagaacttatttttaaagaatcgtatggaaaatttcaaatgtataaaaaagtagagagtagaatgataaattcctgtaatacctatcacccggattcaataattactaattttgggccagttcaataattgttcttgttttctgactgattttttttttttttttaaagagacaggggtcttgccatattgcccaggctgatctggctttgggctcaagtgatcgtcccacttcagcttcttgagtggctaggactacaggcatgtgcctccatgcctggctgatttgttgtaggatgctgttsttgtttcatagatgggacatcttaatcttatttctctgaggaagaccgttgatatgtaatatatttgggtgtaaaaagaaatgtttttgcttatgggtaggacttgtcactaggcttcactgggggagatctagaaagggccatttgggccttggcgactcccggttgttaagtttttttagtattggcttttgggtttgttagatttccctacagaarattctgccaatctctagctcaaaaggtctaggtggccaggcacagtggctcatacctgtaatcccagtactttgggaggctgagaccggtggatcacttgaggtcaagtttgagaccagcctggccaacatagtgaaatcctgtctctactgaaaacacaaaaattagccgggcatggtagtgtctgcctctaattccagctattcgggaggctgaggcatgagaatcgcttgaacctgggaggcagaggttgcagtgagtcgagacggcgccaccacactccagtctgggcgacagagcgctgtctcacaacaaacaaaaaagtctaagcaactgagcattttggaagttggatgggagaagatagctaggaatgtgtaccaacatctagtatgctgactttcacttaattcccctatttttactatgatacttgtaactttgtctctagttcagagactttcttttaccttttccagagaattagcctttttttttttttttttttttggttctggcataggtaggggcagtatatggggttctaacctctattttattttattttatcttatattatcttatgttatttttttaccacttcccagatacccacttctttaaatgactttagttggtgctcttcttttcagtctcaccttatctctctctctctctcttctctttctttttttttttttttcggagttttgctcttgttgcccaggctgctggagtgcaatggcacgatctcagctcaccgcagcctctgcctcctggctcaagcgattctcctgcctcagcctcccaagtagctgggcgttacaggtgtgcgccaccatgcccagctaattttgtatttttagtagagacggggtttctccatgttggacaggctggtcttgaactcttggcctcccaaagtgttgggtttacaggcgtgagccaccacgcccagcccttatctctatttctagagctatttaatgccaccaatttctgagtctctttctatttaatgccaccaatttctgaggaactagagtgcagagtggattgcttttcagctttttctattaggattcagatagctttttaattgctgctaatatatttgtcattcatattgcttttttgttttcaaaattcagttaatattttttcttctcattcattttgactttgtaggttcatgccatttgtaaaaccctctttgttgtctttttattggaattttgagagggagttaaatgtctgtttttaatctaccatctttaaaccaaaattccagctatttaatttcagcatgaagaattgcattaaaaacagagcagtgaatcattttatgaataataatgctggattttatttttaaaaattatcctagcctaaaatgtttaggatcatcatagcattaagagagatttatatttggtaagaaatcaaaaacatcgtcarttttcatgcttaaagtatttaggatcataatagcattaagaaagatttatatttggtaaaaaatcaaaaacatggtcagttttctagtggaaatttttcatggcactataaatctttagtaacaagattttctatgtttagtctttgtatatcttttttttttcttaagcagtagtttataagaaggataaaaagctgccatagggctgtgcacagtggctcaaggctgtaatccaaacactttgggaggctgaggtggaatacttgagcccaggggttcgagaccagcctgggcaacatagtgagaccctatttctataaaaaaattaaaaaattaactgggtgggttgacatgtgcctgtagtcccagctactcaggaggctgcagtgtgaagtagaagggtcacatgagccaggaggtcgaggttgtagtgagccatgatagtgccactgcgstccagcctgggtaacagagcaagaccctatctgtcaaaataaaaacaaaacaaaaaaaacataaaaccccaaaaaactgtcataggaagcccaaccttcaaaccataggattcgaaactgctgaccatcttttgtgtttttttttcctttttgttcactttttaattttcactgaaayraaataatcagtagctagagaaagtgatccacttgatgaagattcatgcctttttaaaagcaggtgttacatagaaggaaaggtagaagatgactgaccctgggaaggcgggsaagacataatgaaaatgtgggctttcagttattggtggtatagcatttttttaaagtaatttttatccttgaggaatgaagattgatttgacatagtatctaatgtatgtttatttaccttcctttagggagatgcacttatttacatggaaccagagaaacaagtgatgtccaggtcgtcagatgaatgtgttgtggctctgtgtgaccagtggttagtctcttatagcaagaaaattcccctagtcaatttgctcacctttgacttwaaaaaaaacatatcaatttgtccactcccaggtacttggattatggagaagagaattggaagaaacagacatctcagtgcttgaagaacctggaaacgtaagatgggagaaagtgatgaaggaggaaaaaggagatgaaaaatgtggaaacagtaaagttgaaatgcaacaaaaaaagtgaaccagtaaagatacactttgtcttttgctcttttctagattctgtgaggagaccaggaggaattttgaagccaccttaggttggctacaagaacatgcttgctcaagaacttatggtctaggtaaacaaacttgaaatttttctgtttggataactttgccagttacacagaaaatatacatttttacctttcccccctgccctcaattctagtgttttctgaattgaaagcagtaagtttcctctggatggtcatgaaaactaggatatagtccactatcatctactgtgtggtagaaatatgccctctctatatagattttgtggtgtgacttttttatggagagactccaagcttcaaccatttgtcttttttttcttttttagagacagagtcttgctctgtcgcctaggctggagtgcagtggtgygatctcagctcactgcaacctctgcctcccgggttcaagcgattctcctgcctcaacctcccgagtagctgggattgcaggcacccaccaccatgcctggctaattttttttgtacttttagtagagacggggtttcaccatgttggccagtttggtcttgaactcccgacctcaggtgatccacctgccttggcctcccaaagtgctgggattataggcgtgagccaccatgcctggcccattttgtcttttatctacaattttatttttattaattattcaagaataatttaagagcttcctaaataagtagctttgtaaatgttatagcccccttcttaaaaatgtggattctatagatgaaatgtctctcaggttcctcatgcgttactttttatttttcaggcactcacytgccttgggatgagcagtggctgattgaatcactttctgactccactatttacatggcattttacacagttgcacacctattgcaggggggtaacttgcatggacaggcagagtctccgctgggcattaggttggtaaacagataagggaaaggagcataatttgtcagtaagagttgtgatatttgatttaygtatttaaatgttttaataagatttatttcacagaattttgtcatgatatttttgcttttttactattgaactgggaaaaattaataaatagccccttactgtcatcatctattcttcattcttatggaagctgttgtccttatttgttcctgtaactacattaagaaagagattcctaatccatgtttcgattcaggtactgattcttccaaagaaattacatatatatatatataaaatagtttgttttatttttaatacagaccgcaacagatgaccaaggaagtttgggattatgttttcttcaaggaggctccatttcctaagactcagattgcaaaggaaaaattagatcagttaaagcaggagtttgaattctggtatcctgttgatcttcgcgtctctggcaaggatcttgttccaaatcatctttcatattacctttataatcatgtggctatgtggccggaacaaaggtgaatgataaaataggtgtggactagatttattgattgtcaataggggtgtcttgtggcttcaaatatctaataaattattgtggaggggatggtatagatttgccagttacattctttttcttatcttaaatatgtactaaagcagaaaggccacctcctatctcttacatccagaaatccacatacctaccccaggcaccaaagcatgtcatatctcaggtgcattgctggtctgctagtaattcatttgacctgttaaatgcaggaataattctagaccattagaattggaaagaaccttctctttagagcagagcgccccaaggttccagcattagttgtrgtaacattctgactagagtctgtttcttcagagtaatccttctgtccttttccctctttacccagacatgtctacttttccctctagttcctcaagtagctgaggaaacaaacctctcagtctgttcaaattttatttcataaaaccaagacaatttcttatgccttcttgtatttagaataaaattacattttttccttcaacaataaaacgaagattttggagtagaggaataaaataattttttttttgagacagagtccaggctggagtgcagcggcacgaactcagcttgctgcatcctctgcctctaaggttcaagcaattctcctgtctcagcctcccgaatattttttattttttttgagacagaggtttgctcttgttgcccaggctggaatgcaatggtgtgatctcagctcactgcaacctccrcctcctgggttcaagcgattctcctgcctcagcctcccgagtagctgggattacaggtgtgcaccactacgcctrgctaatttagtatttttagtagagacggggtttaaccgtgttagccaggctggtctcaaactcctgacctcaggtgatccacccgccttggcctcccaaagtgctgagattacaggcatgagccaccgtgcccagcccagaggaataagataaatttaatgtggttcttacactacttgtcatccactgttattacttacctaatttatttatttatttttctacagagtctcactctgtcattcaggctggagtgcaatggcatgatcttggctcactgcagtctcaacttcgcagactcacgtgatcctcacacttccgagtagctgggactagccacatgtcaccttgcctggctaattttgtttattttttgtagagacgaggtctcactttgttgcccaggctggtctcaaactcctggactcaagcgatcctcctgtctyggcctcccaaagtactcggattacaggtatgagccaccgtgcctggccctagtatttttctctattgtttacaatgcatttgtaggcaaattggtatctcagaagtattctttaccaataagttgaatcttcattcctttgcaccaatttttttcacatttgttaggtttttaaaaattacaaataagtattgacatcaagagcttatgccaggtactttttaaatcacttttaataactctttttactatagcttttcgaggaaggtctttaatatccatgtctgtaggcagggaagtgtactgaggaataaagaggaagaaatcataatccaaagctacccagctaatgaagatagtacaagtatgcaaacccagagagattggctccacaactcttgctctcaaccccccatatgatctcattgctagaatgaatgaatgacatgtacatagtttgaaaatttaaagaatacataaaggcaaaaagttaaaagtgaactttcatccttgcctgcacactactctatttcccaaaattcatcatgatgctattggtttcttgtgattttatataccagcatctgatatctctatttgttaatgtatataaagataccacattgtttacactgttctgtcttgttttcacatgtatatgtgtgtatatatgtgtatatatatgtgtgtgtgtatatatatgtgtgtgtgtgtatatatatgtgtgtatatttatatgtgtgtgtgtgtatatatacatttttttgagagggagtcttgctttgtcgcctaggctggagtgcagtggcgcgatcttggcttaccgcaacctccacctcccaggttcaagcaactgtcyrcctcagcctccccagcagctgggatcacaggcgccagccaccacacccggctaatatttgtatttttagtagagatggggcttcaccmtcctggccaggctggtcttgaactcctggcctcatgatccacccrcctyggcctcccaaagtgctgggattacgggcgtgagccactgcgcccagccttcacatatatttttaagatctttttatatccatacgtgtagccccacctaagtagttacgtcattgtatacctgtatcctagtttatgtagccagtcctttgatttgttttcacttcccattacaaaaaggactatagtgtatatccttgcacttttatcttagcaagcctttatgagtctattagcttttacctcaaaattttaagccagaactatcatctttgtttttttattttctatctttaaacatttatctgtgaagtgacaaatggcctacagctgtgagagcaaatggacatctcctcctgaactctgagaaggtaaggcttattgcatcttaaaagtttaaaattctgtggaaggcttttcagatttaggttgttgcacttttttttaaatgtatgtaagaaataatgtgtccaggtgtggtgcctcatgcctgtaattccagagctttgggaggccaaggtgggaggatcacttgaggccaggagttcaagaccagcctggacgatatagtgagaccccatctctaccaaaaaattagtaaataaataagaaataatatgaattaatcagagttaaaaaccttctaattagcatatttaggacgaggcataaattaattttttttttttttttttttttttttgagacggagtctcgctgtctcccacactggagtgcagtgacgtcatatgggctcactgcaagctccgccccctgcctcagcctctsgagtatctgggactacaggcacccgccatcacgcctggctaatttttttttgtatttttagtagagacgggatttcaccgtgttcgccaggatggtctcagtctcctgatctcatgatctgccctcagcctcccaaagtgctgggattacaggtgtgagccaccgcgcctggcctataaattaatttttatctttaaaattgagcaaggggagtagatagtattaattgaagagagagatagggaagagttacctatttgtaacatttgtatttagagtggccaaaggtgacacaaattgcaactgaagtaaagagagaaaaagagagacagagacagggacaggaatcataaagagcttagcattgtgacccagaagagttttcttttccttttttttctttttcttttyttttttttttgktgtgatggaatctcactctttcgcccaggctggagtgcagtgacacgatcttggctcactgcaacctccacctcccagattcaagcgattctcttgcctcagcctcctgagtagctgggattacaggcgcatgccaccatgcccggctaatttttgtttttttcygtagagatggggtttcgccatgttggccaggctggtctcgaactcctgacctcaagtgatcgcctgcctcagcttcccaaagtgctgcgattacaggcatgagccactgcactcggccatttttttttttttttttcacaaatccacttttattgacttttcgttagtttaaatccttgaggggtacagcatcactccgattctgtgtccaatagccttagcaggaagattgtttaggaatttggcatgaaccatgctactgttcccgtgggcctgagttacctttccccagattactctggttttgtttggtttgcctccaggagtcaccgtctggttctttgctttgtatacatagcacatctcttgcccaaatagaattctgtttcatcttgagcataaacaccttcaaattttttyttctttttctttytttttttttttttttgagacagagtctcatactgttgcccagggtggtatgcagtgatgcgatcttgggcttgctgaaacttccacctcttgggttcaagcgattctcctgcctcagcctcctgagtagctaggattacaggtgcctgtcaccacactcggctacttttttgtgtttttagtagagacagggtttcagtatgttggccaggctgatctggaactcctgacctcaagtgatccacccgcctcggcttcccaaagtgctgggattacaggcatgggccactgcacccagccatttcttttttttttttttycctttttaacaaatccacttttatttattgacttttcattagtttaaatccttgaggggtatagcatcactcagattctgtgtctaatacctttagcaggaagattgtttaggaatttggcatgaaccatgctactgttcccatggggcccgagttacctttccccagattactctggttttgtttggtttgctgccaggagtcatggtcgttctttgctttgtatacataagcacatytcttgcccacatagaattctgtttcatcttgagcrtaaacagtttcacttttttttttttttttttgagatagagtctcgccctgttgcctgggctggtatgcaatgacgyaatctcggctcgctgcaacctccaccttccggattcaagcaattctgcctcagcttcctgagtagctaggactacaggtgcctgccatgatgctcggctcatttttttgtatttttagtagagacggggtttcactatgttggccaggatggtctcaaactgacctcatgatccgcccacctcagcctcccagagtgctgggattrcagatgtgagccaccatgcccagctaacaccttcaattttaagaagagctgtgtgttctggagacattgctcatagccagcaaaaatggccttggaccacagccttccagccatatttccttttagaagtcctgctcccagcaggcctccataggatccaagatgatgggaagagctawttttcttagtaagttgagaaaatgactcggtgctttttgttttatactgtgactggccactaaattagtagaatgatagaattttggagtctgtaagatttttagatgtcacgtaatgctccttcccaagcagtatagtagtcctctctatgcttctgctgttactatcactactgttactattaataatatgggtgatttttttaaaacagactgcatagtactttatcttattaatcaatatcctcagtaggaggttatgcaaacttgacagacccctcacttgcycctatgatacttctgtgcaaattagagaagggcacccctacttgacttaaaaaaaaaagtacaaaattatttattcctcattaataaaaatggtaacaaattagatttgttacaaccagtgaattttgctgtaaccaacagaatagcaatgactgtattagttgtcataagtgtctatatgtcataatgaaaatagttgtaggggactgggcgcggtgactcacgcctataatcccagcactttgggaggccaaggcgggtggatcacctgaggtcaggagttcaagaccagcctggccgatgtggtgaaactccatctctactaaaagtacaaaaaattagctgggcctggttgtgggcgcctgtaatcccagctgcaggctgaggcaggagaatcgcttgaacccgagaggcagaggttacagtgatttgagaaygtgccattgcactcaggccttgcgcgacaagagtgaaactgcatctcaaaaaaaggraaaaargagaaaatagttgtagctttaaacaaatggcagctgatgtaaattgcattatgtaacatcagacttagcctgtgcyctaatattgaaaggtaataaaagatgttcctttaagataatctgtggccgggtgcggtggctcacgcccgttaattgcagcactttgggatgccagggcgggcagatcacgaggtcaggagttagagaccagcctgaccaacatggtgaaaccccgtctctactaacagtacaaaaattagctgggcatgatggtgcgcgcctgtaatcccagctactcaggaggttgaggtaagagaatcccttgaaccgagggaggcggaggttgcactgagccaagattgcgccactgcactccagcctgggtaacagagcaagactccatctcaaaaaaaaaaaaaaaataggtaatctgtatattagactgaaaaactgctgtttagaagcacaggcgattttaatagattttgttagctcaataaggaacctttgattattgaactcatttcttctttgtaagtcaaagaagaacaatacatttattattcttgttagaacatgacattttctttggctgtctgaaagttgttgtactatcctgattttattagaacaagatatgtattgccatgtagtataatagaaaactgatataatcatcatttccttctgatatcagcatagttaaactaatgacatacaattttaaagcgataaagattgctaggctgtgagtggtgcctcttccgatgcattgccctaaggcagagcacaacttgaacaaccgatttttgtgaccctaatgataggagggttcctaaaatcataactccaacctcatgagctggtccattccatttctgaatgattctaattgccgtaaagctctttcttaggtaaccaggtggtgttctagagttatagtggaatcattacacatgtctaacccagacagtataggctaaatcacagtggactgagtgtgagtctggaggtcctctcctagctgtgtcactgatagctgagtaacccaaacaaggcactttatcggatgaaattcagttttcaccnctctaaaattagtgtaatatmttttcctttccrtattttgaattcttttttgtttttatctggtcatggycaacctagttaattttatttggctcatttggtttatttatattactgttattaatgattgatcactgactctctatttcagatgtcaaaatccacaggcaacttcctcactttgacccaagctattgacaaattttcagcagatggtgagtaaacatttttcttattgctgttctgtagggtccagttctcagattatagaagacacgttaaaattggtgttttaattttactttctgttttgcttttaacaaaattttaaaatcttaatgtttcctttgtggatgagcaacataatatttaatatataagaattgctgacatgatgtgttcaggaacaaatcaagctgaagttagtttgagtcttcctttaatgaactcaatatcattgctaagattcaagacttgttttgtagagatgttgagtatgggccaagcgcggtggctcacgcctgtaatcccagcactttgggaggccgaggtgggtgtatcacctgaggtcaggagttcaagaccagcctggccaacatggtgaaatcctgtctcaactaaaaatacaaaaaaaaaaaaaaaaattagctgggtgtggtggcaggtgcctgtaatccaggctactttgggaggctgaggcaggagaatcgcttgaacccgggaggcggargttgcagtgggctgagattgcattgcactccagcttaggcaacaagagtgaaactctgtctcaaaaaaaaatgttgagtatgtaggaagcttttccaagatatttcctctgtatttggtattccattcttattaactgagacagagtcttgctctgtcacccaggctggagtacagtggcatgatcttggctcactgcaacctccatctccagggttcaagcgattcttgtgcctcagcctctcaaatagctgggattacaggcatgtgcctgcacgcttggctaatttttgtatttctagtagagacggggttttgccttgttggccaggctggtcttgaactcttggcctcaagtgatccaccctccttggccttccaaagtgctgggattataggcatgagccaccatgcctggcctgtatttggtattcctaaatgtgtcttgaacctgggaacattgattttttcagaaaattgtttttttgtctggcctcagtcctattacattttattattatcgtgtcaagagaagaaatgcactatcctgaaagaaccattcatttcttatataattagtcattggtcatcatggtacttctttttattggtcatggctaactcagtttgtgttctcagtattttgactggacaccaaagccaaagacggaactgtatccaaataatatagttagtctgtttcttacaagatatataagcaattatgaaaccactttatgtatatattasgattgaataaataagtaaacaggtagataatkagaacctctgcctcacagagctcactatcagaaaaagaagctataaataagtaaagagaaaatgctagaatgagccctatggggtcagattggatttggtgataaaagtatgagctcatgatttttattttgtgtatagatatgtagatataaaactaaacagctgggtgtggtggctcacacttgtaatcscagcactttgggaggctgaggtgggcagwttacctgagatcgggagtttcagaccagcctgaccaacatggagaaaccctgtctctattaaaagtacaaaattagccgggcgtggtggcgcatgcytgtaatcccagctactcaggaggctgaggcagkagaattgcttgaatccaagaggcggaggttgcactgagccgagatcgcgccattgcattctatcttgggcaacaagagcgaaactccatctcaaacaaacaaacaaaaarcatagatatgtgtatgtatgggttagtatacaaatatgaactgttaagtggaaaaggcaaagtgcagaacctgaatgctttgattggacaccaaagctaaagacggaaataactacataatgagttccctctttttttttttttttttttttgcaaccctatagtgttccattgtagggatatcctacagtttaattgatggacatttaggttctttttytcaatattttagaatggaagattttggtagtactgagagatgagaattgaaaaagtaaagttttattagtgataaacttgtaagaacctagtttcaaaactgagaaaaattcatatgcatttgtacacataaggcaccagtgtgtattctcatgyattaaaatgtattttgctacctctaaatgaggctgaaatgttgataagaaaaccacaatgaaakgtgtgtctttatccccastttatcattttctatctctgcctcattaaagatcactttatctcattaactcaacatgcctgagaagaaacacatattggtgcttagtggatgcaaatcaatatggatggttcgaatattttaacatcacggttagggatgctrctttttggtgattttaatttttgttgttgatccaggacagtcctttaaarcatttgttaatttatatatgggctttgcaaggtatccaactggacacataggacacagttgatactcagtaaccatatttttaatgcattgaatttttttttcttcttccaggaatgcgtttggctctggctgatgctggtgacactgtagaagatgccaactttgtggaagccatggcagatgcaggtattctccgtctgtacacctgggtagagtgggtgaaagaaatggttgccaactgggacagcctaagaagtggtcctgccagcactttcaatgatagagtttttgccaggtaatctgtagatcccaatcattttgtgttttagagttacttagtcctggtgcatttttgttttctttttsttttcttttctttttttttttaataaaataaactaatgataataatagctagtgttcattgaaggcttacttgtgccgggtactatgctaagtattttgtgtccattatctgactttaacctcaaagcaaccttatttaatacagatattattagctctattttataaataaagaaactgaagcttagaacaattaagtatttccttaaatgccttaaagctagtagttgcaaacttgggatatgaacttgcttctgtctgtcttgaaagtctgttctcataaccattttaccatgttgtcttgttttcgagtagggcaaaatggttaaaggaaaagtagattaaaagaaaaggataaatatctttggagtcatcctacgcactggtattataaagatgaatgagacctgatccttattgtctagcaagagagacaaacacccagtttctaagcacaataatagagacaaggagaattcagagatgtcatgtgacttctgggtttcttttttttttttcctgagacagagtctcgcactgtcactcaggctggagtgcaatggcacaatctcagctcactgcagcctctgccaggttcaagctattcttctgccccagcctccctactagctgggattacaggtgcctgccaccacgtctggccaattttttgtatttttagtagaaatggggtttcactgtgttggccaggctggtctcgaactcatgaccttgtgatccacctgcctcagtctcccaaagtgctgggattacaggcgtgagccaccacgcccggccaaattctgggtttcttgaaaaataaacaatgttttcagggagaggagaaagtgtggataagccatggaaagggtctgatatttatttgaagtacattatcttgtgggcagaggtaggaaatgaaacaggttggggccagattaggccaaattaagaagaacctggattggtatgagaaaatttttttctgatatccagtattagttattgtaaatgcaataattaaaacctggctatggccaggcacygtggctcacgcctgtaaaccaggcactttgaaaggctgaggtgggaggattgcttgagcccaggagtttgagaccagccagggcaacaaagtgagatcctgtctctacaaaaaaaaaaaaaattagctgggtgtggtggcttgcgcctgtagtcctagtacttgggaggctgaggtgagaagattctttgagcctaggagtttgaggctgcagtgagttgtgatcataccactgcattctagcctaggtgacagagaccctgtctcaaaaaaaaaaaaaaaacaaaaaaaamcttggctacaaccttagttaggctattttcatgttgcattttgggctttataagaataaagtgtccatcaggaaatttctgaagaagcatcatttattgtcataaacaggagccctaagcagtgtcagatgacagtacttaaggatggatagacaatagagagattgcagtaatttgttttaaggaacgcaaagatggtgttgtgttgagcagttttaaatgttctgggcattgttctcatttyactgcttaaatgagcagtatttcaaatttgtatattaaaaagcagtattttaaatttgtgtatgcagcagttttttatagctatgtataagtgcctttaaactcaataacctttttttccccgtattcaatagtgaattgaatgcaggaattataaaaacagatcaaaactatgaaaagatgatgtttaaagaagctttgaaaacagggttttttgagtttcaggtaggctgttgattcttttggtagctataaaacatgtcaatgtgaacattatgtattttcccccttttttcttcctgctatagcacaattactcgcctaaagtgtagactgaaaatcctgccagaaaaattttaaattcttcaataaattgtgattttaagttattatctttggtattttttctattgtgtccatttaatttaataattctgctcctagttaagctatgagcattaatataaaggagattaaatctaaaattcagctatactttccaggaaaacatttcaaaattgataaaaacraaggcaaaattgtaaytaattgccattaatttgagagcaagcgttttctgaggttttccacaaggtgtcagtatttcctcaagtttggcatttaaagtgcytaaagtaaaaatgtagctttacgcaatgagctrtgtaaaatatcacattgagwtttatataacttggttttcagagttgtggttaaataaggataaatggctgggcatagcaatgtgttgtatttatagtctttttttatatttaatatcctatatgctgctaagagcagtcacccttaatatacagttaaagttgttcaacttttatgtctcagttacaaactgtctgtaaaaaaattctttttttgagaattattagtataaarctgccatatactttggacaaagataaatacttgcagattcttaaagtaaaacctttacagtaatttgttatggatttttaaaagactagaaacttaaaaatgtgttaaaaccaagatactgcaatttttccctttatttttattttaaagaaggtgagggaaatggtaaataatttcaaatkttataggccgcaaaagataagtaccgtgaattggctgtggaagggatgcacagagaacttgtgttccggtttattgaagttcagacacttctcctcgctccattctgtccacatttgtgtgagcacatctggacactcctgggaaaggtaccttyatgcatttaaaatgtttcgagtggttttgattttggcttcattaaataagtgttgtgctaatattgttacttaagagagaaagtctgaaagtgagtaattcaagagtaatgctggattcagcatcataattatgacgggttaaaccagagctatctcctattcagatggatatatgtgcccttatttatatayacaacagtgcatacatatttttaaaaggtgaaaatattgagaaagatataaacaattgttatgagctgcttaaaaacaaagatataggtgtatatttgtgtatatttgtgtaagtattcttgttttatataaaacttctggcatatataggacttaatattcagggatagtagcattcttactatgaatataaattcagttatttctcccaggcttrcagataaatagattggctggtttaataactcctttccagccatattagctaggctcttttgtatttttaaatgcatgaacaatacagaaatgtgctcatgatctatataccaaataaccgtacttgaatactggatgtattagcaggataaaaactgagtgtatgcataatttatataataatgattaaatttaggcaaattagcattacataattttctttgaaagtgagcatatgtgtgtgggtattaatatgcttgtacaaatggatgctaattaagaatgtagagtcagacttcacagcttgaattctagggaacattagatcaggggctgtgcaagtgtgttatgtgtagtcaagtttgaactctgagcacacaattacagatggtatccttggtatgaaactataatcaagaaccgtawaatagttatattgtctaatctcactgaaggtttttttgtttttcttyttttaaaagcctgactcaattatgaatgcttcatggcctgtggcaggtcctgtkratgaagttttaatacactcctcacagtatcttatggaagtaacacatgaccttagactacgactcaagaactatatgatgccagctaaagggaaggtaaagtttttttktttttttttttaaaggattattccttaaaagttattgatcagataacatttaacartaatgaaagttaaraagattttcattaatggtgaagaccgtggtggtgtatgttgggggagggttcttctcatttttggtttatataaaagctattgaatgtttttcctttcttttaccgtctagaagacygacaaacaacccctgcagaagccctcacattgcaccatctatgtggcaaagaactatccaccttggcaacataccaccctgtctgttctacgtaaacactttgaggtgatkctctcagtagacttttcccccctgatggtgttgtatgctccctatgttgtttttgtttttaggatgttggcaatgtctgggagaagaaagataggcagctttgtttcattccctctaggcagacagcatccttttgttattcttggtggctcttaaatggatgctgagggaaaagctgctgttttcctctcatttctgaaaaatttatacaaaaatacattggatctagttgaatgtaatcaaaagaattgggggttttcatatgtgtagttgaaatgatgaaataaaaggacagagtttgcctttggaatttgttgtaacttgagcagtgggagtcattcattaaatttattcattcattatattcattcattaaattatttcaaatcgtaaccttgtttrttgtttggaaaaaagtgaagctttgttcttgagtactttaaatgttgtttggtttgataattacctatagaaatgtagagcttgaagacatttttggctgtgccaggtaatgataaatccacttaaagggaactcaataacttagatctaagttttcctgaaagaaaaaaatstatttttcctctgcattcaaaatgtagaaacaaagtatgtttatgaactttggcttttttgcttaggttattaaaacagttattgctagatgcagaccactaaggtgcactttaaaaagagagacaaaatacggattgtggtcaaaatgtaaagaagaaacgtaaaggaaaaattcttagctttgatattctagaccattattggaattttgcctcaacacttttcatagttaattaagaaatgctamgaaaagctgcttttacatatgtaaaatttgatagagaagagcaaatgtttttgtatttcttgtgagtctatttttgtggagaactatttccacctttgagtatatatgatagaaatagaaggtggcctttagaatctgcttgcagattttgaattaaggtaaataaaagataaaagctactttggttggcacaaaagtgaaactacctcagtggattatatattcataccagcaatttcaaggaagcagtggaagaacccaaatataatatgtaatgtcttaggtattaaaaaatgcatcacctctgttctttttgaagttgtttttttacttactattcatttgctagataattgaaaacagtggtatcttttggcattagcagctgtcttttagatttttgtatgttttcatccacaggaatgaaaagaatgttcatttataatcacgaagagtgttcttatgttgaatgtggcaccattttggtgacataaggcaaaggagtgtttcccaccctttttctttttcgtgtgtttcagaggaatatattaacaagtagaatatttttttcccatgtactttagtaaaagttagaattgaaaatagattatttgaaattgtattatatgttccttttcatttagattcattcccaacccttcttttacaataaagagaaaacaagttgcccaaaactttgaaaagaccagttgctttatttctcactctattgaggggaccgttaatatttgtagaaagaaatgaatttagattcatttaaagcacacttggattgtactcatcagtgatayatgatatggacatttatttttgagtagatagaaatgattctgtttttaacaggtcagtagctagggattcttttcacaattgtggtaacagtttcttccaagtgtccaaaagcagacattatataaacttgtatgatagttgtrtaattttttattttaatatgactaataaaatgcttttagaaatttgaaaacaagtttttatgagaccatttagtttctgaacaggagaaatattcaacacaaatcacttctttttctcttctaaactaaaaagtatgtgttgttaatttatagagaataggagagttccttctgcattgttcattgagctttcacttccccrtgatgctagggctggacacttttctgctgttctctaaggattgatagaggccaccattctatgcctggtcacatctactgttctgccttattcttgagacttttttttctacattactctccctccttccttttcttaggccaataayggaaaactgcctgacaacaaagtcattgctagtgaactaggcagtatgccagaactgaagaaatacatgaagaaagtyatgccatttgttgccatgattaaggtaagctgtggaccttatgcagctgtgaccacatgagcaatggttagatgggacaatagaaggatggggaaaagccttggacatagtctcctgccagaaatctgctaaaatagcacttttcaatcaatgactgagagaaatgatctatcagattttgggtttacttgtggaattgctgagtatgtgaaaaatattattgtgggagaaaaattggtttagaatggctgcactgaactatycccttcatattctaccttcccttctttcaaactcttttggcttacattaggcttatagaggcttgcatttcctagaccctattcctggaaccaggattcaacatttgtataggtatagcttaacagggtaaacattggttatagtggttagaccagggtgtctcagcatagctctgttggtattttgggctagatagttcttgtggggcactttcttgtgcactgtaggatatgtaatggcatccctggcttctactcattagaagccagtagaactacctttcctgctagttatgacaatgaaaaatatctccagacattgccaaatgtccgctgggggcagaatcaccttccacttcttaccattgagaattattgggttagacccttagttttcttcatatacgtcgctgatgtattaytggatttcttgacaaaaagaaaccgaaagaaggcttatattgcttaagatcgcaggctatggggccagaaaaatcttggttgaaattctgtgtatcagtcactccttagttttgagaccttggacaaatcacttaaattttctgggctacaggatttttcatccataaaatgaggatactatagaaccaaactttttaggagtgctgtgaggagtaaataaaatagtgtacctaacacacttaagtagcactagtcaagaagtaggctcagtaaatgttgtttaaaaatacaaattagtatcttccagcctactaagcatattgtagttattcttgtactgtcctttaattcttgtgtcttcttggctgcagatgcctgatggagaccagacctcttaacttcttcaatattataatagattagtattcttggaaaaggtttttaattctcttagaccaaagtcactatttgatcctcagggtattttaagtttcagaagtaatttagaatcctgtgttgacctacactaatcaagttgtaatgtaagtgctggtatgttcatagttcgttggttccccagtggctagtgtcattggtcataatgccaaatctctgtcaacatgtggatccaacaaaatattccattgrtggttgcaaaggcaattaattttgatgacatgttttaaaagaatccagggaaacctatttgaaaagtagttatgtgtatatgtatatatatatagagtgtgtgtgtgygtgtgtgtgtgtgtataaaatgatattagattcaagagttggcttctttaggatctcatttaaatttgaagaaccagcatcagaccgtttgagtggtaatatatttttaaaattatgttggtgatttgccaggcaaattagtggttttgcaaaytttggaagggattaatacatctgggaataagaaaatgactttctagcacttccatgagaaaaagaaatagaacttgcakagtaagcgaaaacagtgagtagcaggaataatatcaggtcactttcattaagtataacatgttctaggtagttatatctgcatatgtacttggatctctaggattctattttgcacagcaaatattgactacccaagaaaattaagaataagaaattattttttacatgccatgtttgagtactcatgtagtatgagttttttttctttaaactttgcagaaatatctttggggattttttgtttggatattattaattcactattctctgaaacagctttaagaaggtggtatctcagaaaattaaaattttgttttttttgggtaacttaaagggatattttcacacatttggctgattccctgtaaagtgaattctttgggcttgcatgttaagtcagtctaaataaacaatcataaaaccgtatttattttataaatctgaaaaccttgtgccttcccatcttttcagtgctgccataatcttataatactttaaaagataattatttggagctagtaaatttcattaacaagcaaatgtaggtaaaggaaatcatgagtccaaggcctttcctttaactcctgaaatctgaagattttatcagttgagagaagaatgattactttggaggaagtatgttttccaacatattcttactgtgattttgtttttccataccattttggctattaggaaaatctggagaagatggggcctcgtattctggatttgcaattagaatttgatgaaaaggctgtgcttatggagaatatagtctrtctgactaattcgcttgaggtaagagggccagggattgtaataaccagttaactgtagttaaaccataatccagctcttttattttataataaacctttttataaatttcatcttctgtgtttagtatctttgttaaatatattagtygaaaatatttttggagagaagaaaaatgggtgagtataaaagttgcaggaaaaaaagtgatatgtcatcttatttcatcaattcttaatttacatataatcaattatacattaaaaaactgtatatctggctattctactgcaaattatttttaagagaccttatattcaaatgctttccaagcctctcatgttatggagtactctgaattgttgccttttttcccccctcccttttgatttgcagaattggattaattataatctttggtttagaattgctgcactgatatattggttcatgatatattatggttcatgatatattatgatttggttcatgatatattatgattgttccatgtcttgccgtgtttttttcctcccaatttataataaaatgaacatccctgaattttctacccaatccaggaactagaacagtaccaatagcttttayatatctgtgacgttctccccatccaatctttgtgccccactcacaactttatatatagatcgtaaataagctggtctcagacaacttaggcaaaaggaaaagtcatgtgctctagaaaactgttagagcactcaaaaagtggtcctagtaataatgaagacactcaagtaaaaaaaatataggtttggaatttaagtaaaattgttttgtgaaatacggagatggaagaaagttgtttctaattaagtattttattttaaatgagttaatgaaattaataaatattaaatgacatccattttatgtatatctaaatgttcatatatattcatgtaggtcaaaaaacttcttggatcttttcacttggaccatgcagacgcaccttatgttyagggtcatcttatattcagacatatgcactgtgctatatttctgagcttttcttccatttatttaagtggaagccttttattctcaaatgataaatttctgaacttccatttgtcttaagtggaagcctcttatgctgattttcattttgttttatatggcagatagatgccagatttcattatagaaaatgataaacatgactatataaataacaatastatgagacatctaaaaygaatgttaaataactgattacagatttcatttaatatttatatggaaaataataaaattgcacagaccatttcatgttaactggagaacctagttttgttcttggtgaaatgaggtgatgattaatttgaatcacattaartgatactaataacttccattttttcccgtctgtttagctagaacacatagaagtcaagtttgcctccgaagcagaagataaaatcagggaagactgctgtcctgggaaaccacttaatgtttttagaatagaagtaagttgaaggaatctcactgaatcattgcattttaaaaccagaagagacctagagatcattacatctaaacccacatttaaaaaatagaacaaagtaaggtccagagaaattaagtggttggtttgttgtagaccccatagagtgttagaaatggggatgtacctgaaatgtcctaattccttggtcagtgcaatacttaccttttcctcagtttactattataggaactatcagatgttatttgtgggttttaaaaatagaaagtatgattttcaaaatctggtttttatttaaaaatactggaaatgtaggacctttttagacagttaaaaggagcttttaaacctcagatgagtcttggtttgattgttattcaaggctgttttgtataaactggattgatgcataatcttaarttatgctggaatagctttttttaacctcttagtttttggctgttattggtgaagacaaaaaggttttggatattctgttttttgtttgtttgtttgttttttaatttaagttctgggatacatgtgcagaacatgcaggtttgttacataggtatacacgtgccatggtggattgctgcacccatctacccgtcatctacattaggtatttctcttaacgctatcccttctgttgcccaccccaccctgacaggccctggtgtgtgatattctcctccctatgtccatgtgttctcattgttcaactccagcttgggagtgagaacatgcagtgtttggttttctgttcctgtgttagtttgtggagaatgatggtttccagctttatccatgtccctacaaaggacataaactcatcattttttatggctgcatagtattccatgctgtatatgtgccacattttctttatccagtctatcattgatgagcatttgggttggttctaagtctttgctattgtggcccgtgctgcagtaaacatatgtgtgcctgtgtctttatagtagaatggtttataatcctttgggtatatacccaataatgggattgctgggtcagatggtatttctggatctagatccttgaggaaggacattctgtttttttagtctcaaagaatccattcagattggcagcatttggcaaagtccaggggactgcaattgggagagtctgtaaactgccctccttgtcttgataagcagaggacttagatatgtttttttacttttgccacatttgaaaacccagcaaacagaaaaggcctattttgaaagaataaggaaatcgtgattatggatacctcctgaatttagcatcatgtaaggaatatgctcattgcattaagatgtggtagcttttaatagttcagtcatttgagccatggagataggtatatgaaaatattccttatacaaatatatttatttcaaaccattttcaagtattctattaagatactatgtatttaagtctttcacaagactcatttgacttttttccacttaaaaataataaacagggttctggactatgtagcttctataagtacaacataggtttatgttgaatcttgaccttgccacttactagctgtgtgaccttgtgctgatttttaatctttctggttctcagcttctcttttgtgaaaaagggtacaaaagaactacttcagggatatagaactaacgtcgatgaagtgcttagtacaatgcctaatacatagtagagattcagtgaatgatggtggttgtggaagagaaaatgtagttattgttagtgtccatcattggtgttgatatatgtagttgtagtcatctttacctaggcatttggttataagcatgagcttgtacagcttttctttcatatttgagtactccttagtcatgattttaaaataccagaattagatcygtctttcattgggcattgaaaacgtagcagagattcctcctccctcagcagtattsaagttaaacaatcattttcttgttgttttcctagcctggtgtgtccgtttctctggtgaatccccagccatccaatggccacttctcaaccaaaattgaaatcargcaaggagataactgtgattccataatcaggcgtttaatgaaaatgaatcgaggaattaaaggtaagttgttccccaaaactcccatttgtcagtagcttgtagatttggtgagttctaagcagaaaggaaaaagaaaagaaaccggcttgcttatggacagctgtgtattattatggaaaaagtactgggatcagaatcaagaaaactattctttttgggactctgtggctaggtagcttagtggctttgccatgtcacttaagctcaaaactgatttttcatttactaatgtgaggacaatagagggattagatagttttcatctttctttctagctctaaaattgtaatgagtgatttctgtctctcagagatattcagaatcaaggaacacatacccttaatattctaaactaacctgtccagcaggtctgttccttgagaaggaagagaaacagagtaaaagttattgcatgtcttccatgtattaaccatttaatccttttacagttctataatgtagagggtattcttattatttcccttttatagatggtgaactggaggctaaaaaggctaagtaacttgcaaagtttgtttagctagtaaactctagatctggaattcaaacaggtctgtttgactccaaagctcatattctttcttctaaacaatgtgcctccaggtaaaatatgtcagtaatcttaacttattatcaagaataagtctgcatcttttgtgattagattcaatgtaataatttatggcttttcttttcgtcatccagccaggtcctacggtgagcagagtgtgaagggagatagtgtgtctctcttatttttcttctgagctatgaaaacaaattaatgttgtgattctctattttgtattatctgtcttttttctttttgatagcaatcaaaagttgattggccactttccatcactacaaaaattttctaaaaagatttataaatccctaacaataacctaatttatggaactatattagggtagtaacatgaattaaaataggagacttgaaatagctcttgggaattcattctgtcatttattttgtgttctctcgaagttgtttcccttctgtggatacttattgagacactaatatatgtagtgtttgtagagacaactgtgtatgtagagactcctttgtatgtactggggctttggggagtccacagagtgctgttcattaggagctgcatctagtaaaggagtagggaactaagctattgcagtgtatgataatgtaaggagaaattgctgagtgtagtaagaaaggtacaggtaaaatgtatagcacagaggaacgtgagattatttccacttgcagggatcagggactaatttatggagaaaatactgtttggatggggccttgaacattatacccataaaggtaaggggaaagggtatccaggagggaaataccagttgcttttgtttctctgtgtacagagcatcagcagcaacagtatactagggttagggatgttgttgtttataggtgtattttttaattgtggtaaaatatacctaacataacatttactattttagtcatttttatgtgtacagttcaggaggcttgaatacattcacattgctgtgaaaccatcaccaccatccatctctacaacttcgtcatcatcccaaattgaaaccctatacccattaaataataactcccattctccttccctccagtccctggtaatcactgctctactgtctttttttcttttaagttttatttttgacagataaatgtacatatttatgagtacagtgtgaggtttggtacatatttacaatgtgtaattatcaaattaggataattaacatatccatcacctcaaacatttatcatttctttgtggtgagaacattcaaacagctcctcttacagctattttgaaatgtaccatatattattatgaactgtagtcatctactgtgtaatggaacagtataacttattcctcccatttaattataactttgtacctgttgaccaacctccttccagtcccctctcttccatccttcccagcctctgataaccatgattctattctctacttcaatgaaatcaacttttttagattccacatgtgagtgagatcatgcgatatttgttattctgtgcctttcttatttcacttaatataatgtcttccagcctcatccatgttgtcacaaatgacaggacttcattcttttttatgtctgcataatatttcattgtttaccacattttctcttttcattcatccgttgatggacacttaggttgattgcatatcttggctattgtgaatagtgctgcaataaacatgggagtacagatatctcttcaacatactgatttcatttcttcatttcttactggatatatgtccagtagtgggattgctcgatcatattgtagttctatttttaatactttgaggaacctcgatactgttttttatagtggctatacaaatttacattcgcaccacactgttctacttcctacctcatgtatttgactgttctcagtacctcatataattggaatcacacaatatttttccttttgtgtctagcttatttcacttagcaaaatatcttcaagtttcatcatgttgttatatgcatttattatgtcctctcagtgaactaggtaccatagaatgatagcttcatcctcagaacttataggccacaagaagcagaaagagcatgatagtggcttttaaagaaaatagatatgtgtgtggacccactggataggattatatttatttacttattttgagatagagtctccctctgtcacccaggctggagtgcagtggcacaatctcagctcactgcaacctccatctcccagatgcaagcaattctcatgcctcagcctactgagtagctgggattataggcatgagccaccacacctggctaatttttctatttttagtagagacagggctttgccaacttggccaggctagtcttgagctcctggcctcaagtgatctgcctgtctcggcctcccaaagtgctgggatcacagggatgagacaccggccctgcytggatgggattattatgatgttatagcacataaaaggatgtatttctgtattgaaaattgtattatattatgttaaatctacctctgttttaaatgtactcaaatatagcactgactaggttctgcagaattgtactgaaatgtatttcctatttcttgtcttttctcattgagcctttggcataattcttatctcctttgtcatactagctgtgaaaaatattatctaaagtgtcttaagtttgatgttagtagctgttgtaaattttagaaaatagaaacattagagagagtttgaaattgctattcctataagtatctgcagaagagatctaaccttgatactttaccaaaagccctcaggatgccttgatatctaaaaggcctgagtatattcagtatatgagatggaagaggagttaaattcagtaacatagttattggtctgtttgctgcaatagacagcaaattgtccaattagtgccagttgtattgagggtaattatgatctgggtccgggaggaactgaactaaaactatcatttcattccacaaaggccactgagtaaactatctgatgrtaataaatttgaatcactcacaacccatgccatatgtgaactaayaacttggaagtgaaagccttcatttctcgttatcagtccctagggacttagaatcactctcatcttttctctaagagccttaaatcttatgtagttgcaggcttaaatttcaacagtttcaatgataagagaagtctgggataaaagacagttaaaccagtaagaaagctctacgaatctatggacagtaatgaactacatggtgaaacatcaaagcaaatatgttttgtcacttagaagcctgattgagtattaaggtttctttraactagtttgattcagaattgcttggaatgatgagggaggtctgttttagacagagagaaagagtgtgtgtgtatgagagagaaagaggcagaggcagatccgcagtaaaaggccttatgcataaaatctgctggcagaacttgtcactgcatctatagcaaaatatttggtaccactgatgtgtacgttgaattgcaatagctgttaaaattaattgtattcttccccaaaataagatcgtggctgtcatgaagattgcgcctgctctcttcccattttaattttcagggctcgtactgtgtctgggaatagattgtatggtccctgcagaaactctccaaagactcttagacagggtttgcttttgtggtagtcgcaggtaattgttctataagccccttctctaaacttcggtctttgtttcccaaagaggacagaatgcatggataacttgtattcttggttggcatggccgccagctgcattaaagtcttcttttatctcttatccctcttatactaagctttgtactctcaagtcaacatgagggagggtagctcaggtgtgtttcagaaagaaatgggaagtaattcagaaaatatcttctatttctatggatcaggttaaggataactagccatgctacacttcgaatgagatataaacccagaatcagcatttgtagtcatttctggtgtttttctgccatataaaataaaaccatttgatgttgggaagtctcagaattgctgaaataaatatacttcttttgggctcagttgttggcaggattgttgacttacaaagttgttcaagagacaggtgcttttttttttttttttttttttttttttggkcaggcgctrttttttcagcttgcataaragcagattaggaaaatctcaagcagggtgggtattagacctcatcctacagctaaaaattctgaaagcttaaatttctgtcctttctctgccttgtccccgctctccttgtctcatcaacttgttaatacaaatactttcatcttttgagcaaatgaraaactggtaatgccatttcttaragtagtcattatttatccaaaagtatctctgagaaaagctacaattcttgcaagtttagtgtattccagggagctcaagaaagggrtaagttttagatttttcgatattctgtacaatggttaattgaagcatataaaaatgatttgagagaccatataggataatgctaaaaaatacacacaattctttctctctcttagtttgtaattccaggagatgtcagaatctctgacactttgagctgggtaaaagctgaaaggggatgaagatttgctacattttagctttgctcctgggattgtttttttttttttttttttttccccccgacagaatcttgctctgttgccaggctggagtgcagtggcgcgatcttggctcaccgcaacctctgtctcctgggttcaagcaattccactgcctcagcctccctactagctgggactacaggcatgcaccaccatgcccggctaattttttgtattttagtagagatggggtttcaccatgttggtcaggatggtctcgatctccggacctcgcgatctgcccacctcagcctcccaaagtgctgggattaaaggcatgagccaccatgcccggccactgctttttttgtttgtttgtttktttgagatagagtctcactttgttgcccaggctggcatgcaatggtgcgatcttggcacactgcaacctctgccttccaggttcaagcgattttcctgtgtcagcctcccaagtagctgggatcacaggcgcccatcaccaggcccagctaatttttttgtgtttttagtagagatggtgttttgccatgttggtcaggctagtctcgaactcctgtcctcaagtgattcacccgcctcagccttccaaagtgctgggattacaggtgtgagccaccgcacccagcgtggcttttatttaataatctgaagaaaatatttttgtttagatataacaaccagcgtatttaaaacgtgagttctcagactgctccagggtttgagtgactgtaattaaatgcttatattgataatttattttgttgtagacctttccaaagtgaaactgatgagatttgatgatccactgttggggcctcgacgagttcctgtcctgggaaaggagtacaccgagaagacccccatttctgagcatgctgttttcaatgtggacctcatgagcaagaaaattcatctgactgagaatgggataagggtggatattggcgatacaataatctatctggttcattaaactcatgcacattggagatttatcctggtttcttaggaatactactactctgattgtgtctactgattggctatcagaaccttaggctggacctaaatagattgatttcatttctaaccatccaattctgcatgtattcataattckatcaagtcatctttgattcctggacctaataaattttttttccctttctttgggtgtccaagagaaatggtttttgccaaactctttttaaaaaacaaattgttgctatttcctagaagtttctggtttttaagatgaacataaaagtgtcagtatgcttcttttatgaggtgtactttatactttgatgaaggctaaggtgtacctaacagctttttatagtatattcatttatggagttagctgtattttttttwaaaaaagaaaagtagtaaattagcagcttttttttttaaatgaagagaacttcatgatgatttaaaagaactaatgagaatattttgacttgacttcaattactaagtattttgtataaagaacaaataggtcctgcattttataagactttttaaagctttaattattcaactaagaaccaataatggcttcttcaaggctaatatcaatagtttataagcagtatatttcacctacactaaatatgggcattttaaaagaagattccccccttcccccccagaaatctgcatttactaaatttgtcttaagtccaattgtgtttaaaggtcatgctggtcgggtgtggtggctcacacctataatcccagcactttgggaggccaaggtgggcagtcacctgaggtcaggagtttgagaccagcctgaccaacatggtgaaaccccgtctctactaaaaatacaaaaattagcttggcatggtggcgggtacctgtaatcccagctgcttgggagtgtgaggcaggagaatcgcttgaacctgggagaccgaggttgcagtgagctgaaaccgtgccattgcactccagcttaggcaacaagagtgaaactctgtctcaatcaatccatcaatcaatcaataaaatagaggtcatgctgactattacagatttattcttttattcttgttggagtgtcttttaatatctgcgccatctgtcttcatatgaggaaaaaatgtaaggcattgactaacaggagaaacatttctaattttgatgggtttaatatggagaaagaacaattttgataacccagaggaacctgaattctaactgcggttatgtaaatagagtttattgagcttccttattttgctctccgcagttagggaccactaggcctagtcatatggtttatcacagatttattgaagccaatcataggatgttagaattagaaatcatcaagtgcaaataatcacttatctactagggacaggcactatagcatagtggggtaagagcgcatgytctgaaatcagactagctaggttagatttccagttcttctttttgctactaggatgctcttggccaattactcggagctgcagttcttcatctataaaatggaactaatactggtaccttgtaggcttattgtgagaygtttagrtgaactgatctaggaaaatcataacacagtgcctggcaagtagtaagtctttagtgaatgttaccattgaagaagaagaagatgatggataccaaggtatattggcttcagattactgtagtctgtaatcatgtcctttgtgttggttcctttggggcaactgattctttctttgcactcctctagattcttttgctgtcctctctgatctgcaaagccttaattatttctgaaattaagtaatactttctgttgcctaaacacaaacctacttgtgtttaacttaggaaaattaaactatgtgtgcttggccagaaaaaaaaaaagagagagaaaggaaaataatattgtgattgtgttcatcttatgaacctgtactgttttggattaggtgtgagttgagattcatggatcctttgttttttcagtcttgatttctgtgtgtctctcttagaataagcttcttgctgtgctgaatatgcttcttatgtgtagagatacaaatgttttgtataaggagtcgtctgagcataagcccattacttcatctggtactcaacagaagaaccagcagttagttgaaatgctgaaggaaaaacaggctacactgggcttattctattattaacaataatataattgggtgcataataataatgttatatataacttattatgttagtgccttcctagaggattttaactctttttaagttttgaaatacaatgcacatacacaaaaagtgagcaaaaaatatacacacacaaaaaatgaacttcctttctctccccacctccaaaaaaagaatttattaataaagcaaacacctgcacagtcaccaaacagttgaagaatggcacagtgccagcaccacagaggtctgccttttgccttctctggtcgctagagataagctttctggcccagtatatgtcagtttttataaatgttgcatttgagcttgaaaaaaatatatattctgtaaatgcaaaagtactgtatgtgtccattaggtcagagttgtggattgaattgttcaaacctatatccttactgttttctctctttctgtttttgagaggtataccaaaatctctcatgacaatgaaatttacctgtatcttgttataattctgacagtttttgttttatatattttgaggctgttttgttaggtacatataaattcagattatattccttctggtaagttgaactttttctagttagaaagtgtttcttttttgcccaggctggagtgcagtggcacgatctcggctcgttgcaacctctgcctcccaggttcaagcgattctcctgcctcagcctcccgagtagctgggattacaggcacttgctaccacgcccggctaatttttgtattttttttctttttctttattattattattattattattatactttaagttttagggtacatgtgcacaatgtgcaggttagtatacatgtgccatgctggtgtgctgcacccattaacttgtcatttagcattaggtatatctcctaatgctatccctcccccgtccccccacaatttttgtatttttagtagagacagggtttcaccattttggccaggctggtctcgaactcctgacctcgtgatccacctgccttggcctcccaaggtgctgggattataggcgtgagccactgcacccggccatttctctttatttttaattaatttattttttgcctagagaccactttgcctaacaatatagtaacaccagttatcttttggttaacgtccatgcagactatcttttccattcatttacttttaaccttcagtagttttattttcttttaacacttcatttcgagaaattttaagcctacagaaaagtggaaagaattggccagtaaacatccatgcgcttgtcacctagatttgccaattgttaatattgtgtcacgtttactttatctctctaagtatctatttttaaaataaacttttaattttggaatagttttggacttacataaaagttgcatctttaatatggagagatcctgtacatcttttacacagtttctcctgttaacatcttacttaaccttggtttagttgttaaaactaagtaattaacatgagtacattatgattaactaaattgtatactttgtttggatttcaccaatttttctattaattttttttactattatgggatcctatccaggataacacattgtatttagaaaatattttttaaaaattcagaaccatttgacagtaagttacagacaccatgacacttcatcttcccataggttatcacrcaactcctaagaacttggacattctcctatataatcacagtgttgttattatgcccaagaaatttaacatgatacaataatattaggtaataagcttttctagtaaaacttccccaatgtctcatcaataatgtgttctttgaaaaactctcaggattcaaagatcaagtattacattttgtggttaggtctgttaatctcctttaaactagggtagtttctctgttctttttttgatctttcatgacagtaacatctttgaagacatcaagctggtcgttagcatgatgcttacaatctggatttctgtattttctcatggttgtaatcagatttaaaattcttggcaagattactacataggtgatgtttcccactggatcatgtcaggattaatgtattgtggatttgattagcatcatatttctcggttgaaaagctactcttcctttttgtaattaagtagtctgtgagctgatactttgaggcttatatgaatatcctgctgttatgatctgaatgttcatgtccccccagaatttatatgttgaaacttaatcttcacggtgttggtattaagaggtggggcctgtaggaggtgattaggtcgtgagggtggcttcctcatgaatgggattagtgctcttacaaaagaggcttgagggagtcctgttgcctttatgccatgtgtggacacacaaggcaccagctataaggaatgggccctcaccagaagttgaatatgctggtgccttcctcttggacttcctagcctccaaaactagcaatacatttctgttgtttataaattacccaatttaaggtattttgttagagcagcctgaagggactaagacatttgtttatcagctaactttcatgaagtggtagcattcatggataagctgtcagttattgcattgatggttgtaatatggtgagttcttaaaaatgataaaattattatttcttttacatttattagatattattcttttgtgaagaagatgtttcctttttgctgccaattttttttcttttctttttctttctttcttttttttttttgagacagggtctggctctgttgcccaggctggagtgcagtggtgcagcgtcagcacattgcaacctctgccttctaggttcaagccatcctccctcctcagccttcctagtagctgggaccacaggtgtgtgccaccgtgcctggctaagttttttgcatttttcatagaaatggggtttcaccatgttgcccaggctgatcttgaactcctgagctcaggtgatccacctgcctgagcctcccaaagtgctgggattataggtgtgaaccactgtgtctggccccagtgttcttctttcatcattcttttaaaatcactgtggactgatggatttctttttttcatatgtgctataatctattaccatcattattctttgaacgctcaaattctgagttaaccagtggaagccccattcaagctggctgcagtacaatatttgtcctttttataactccacattaattttggggcatttctttgtataatggcataagaagttcccaacttgccttgtgttttctgtttcagaactagaaatcagtcttttctccagagagctttgcttcattttaatggagagtgttattaagaaaccaagatccaggcgctactaggacattgtttttcaggcccttccaatagacagagctaagaaatacatacagtagtgttttttaaaatcataattttatctaataccactgaattctctctcatcttttcccctttgcaattgtatttcccttctcacacagtgagaactctggttctcaagaacctcaatatatttagtcatttagtctattaaaaatttcagaattgccaatccaattctgttagcaataaataagtacagtatttggttttktttgttttgcaattctttgtgtccttagaacatatttctctaagggatatagtcagagcactatttaaatatttcctgaattcttttttgtatgtggttgcttgctttttttttttttttttttgatgacagagtctcactctgtggtccaggctagagtgtagtgatgcaatcagagctcactgcagccttgatctcccgggcttaagtgatcctcctgcctcagcttcccaagtagctggaactgcaggcatgcaccaccatgcctggctggtttttttctttaatcaagaaatgtttcttggattctttcttgtatgtgcttttaatataaaattaaagccattcatttctctttatattcagttttatggtttgctttttctttttatctgatttttgaataagtaaaaatacatgattcagccagatgtggtggcttgtgcttgtaatcccagccccttgggaggctggagtgggagagttcaagaccagcctgggcaatatagtgagaccctgtctctaaaaaaaaaattttttttttcaaattagccagttgtagtggttcatacctgtagtcccagttacttgggaggctgaggcaggtggatcacttgagtctaggagttcaagactgcagtgagctgtgatcatgctctttaaaaagaaaaaaatctgccaggtgtggtggctcacgcctgtaatcccagcacttttggaggccaaggcaggtggatcacaaggtcaggagatcaagaccatcctggctaacatggtgaaaccccatctctactaaaaatacaaaagaaattagccgggcgtggtggcgggtgtctatagtcccagctactcgggaggctgaggcaggagaatggtgtgaacccgggaggcggagcttgcagtgagccgagatcgcaccactgcactccagcctgggcgacagagcgagactccatcacaaaaaaaaaaaaaaaaaaaagaaaaaatctttttttctcttcctttttcttccctccttcctcttttgcccctcttctttccttgctcatgtaatactattgtaaaggtgtaccttagtttattcaaccagtctccatggatggacatataggttgtttctaagtttttaatattttatagaatgtgtatggaatgatatagtgagtaacctcatgaataatgtcatttcacttttgtggaggtatatcttcagagtaaatttgtagaagtgggcttgtgggtctgagggtaaatgcatatgtagttttgttagcacgtatgtggtcaaaagcattttttgccctgaggcaggggcatgtagctggtgtgctgaaggaatagcaaggaagccacatgaagaaacaggtcaaagtcactggctcaagatcctatgtattagcagcagagttgaattagagccctggcctccatcttcattgcacttagacaacaaagaattcgtgcatggaaaacaggaatgtatttgaccaaggccagtgttaccagggccattaggaggtcagagaaaggagaagtttatatggaccccagtcaggtagaaaatacttcaccccaaaatttacagcatcaataagatttgtaatggccctctgctgtgcatagagcttgtattagtgtgttttcttttctttttcttttttttttttttgagacagaatcttgctctgtcatctagactggagtgcagtcgaatgatcttggctcactgcaacctctgccttccaggttcaagcgatcctcttgcctcagcctcctgagtagctgggattacagtgcctgccaccacgcctggctaatttttgtatttttaagtagagatggggtttcaccacgttggccaggctggtctgaaactcctgacctcagatgatctgcccgtctcagcctccca

SEQ ID NO: 93899 - DNA, 13558 bp, Homo sapiens
agtgagttatgattatgccactgtgctccagcctgggcaacagagtgaaactgtctcaaaaaaaaaaaaaaaatcccatgggagagtgaacaataaaaatccacaagtgacattaaacgtggtgcatgtaagagcaatttgttcatcagagcgagctgttgtagtttgggttctctggaagagaccctcaaacaaggattcctgtacacatgataaaaggaagtgtttctgggggtgattaacagggaaatgggagaagaaaggaagaggaggagaggatgctacacaagcttgcaatcttaacaaaacttcctgaaagttagcttcagtctgatcctgcaggagagccctggagtgtaaattatgttccagattttgcctcaacttggaggaaaggaggtaggctttcatactccagcatcctatcaaccattttgcaggcctgtcagggagcagggcagttggtgggtaacatcaatcctagatgtttctggctcttcacagttgcctgtggggatgcaaatccagttgcctgtggggcatcctctaaagagagccagaggtacaggtgttagaaacaaaggcacacagaaaccagagaaagtatccactgaaatggcaaaagggatcagaaggtatctgggtggagcactgagagtgtcctcaacacatgtcaactagactaatatgaagttttatgatgaggaaagactaagcttccccaacatatttttactgttccctggtttccttccacaagtaaaaggtaaccataaagctatagaggattttgaagcaatcagtatcagctcagtaacagctgatatactattttgatgctgcttaaactccaagttatattaacatctttccccattctaagaaacttgctgtgttcagagctaagctatcactatcaagctcaaatactttttgatttcagcaatcttactttgccaaagatggcaccatctgtcatgacagaaaaccaaggacatccctttcactgaccctccaattgcctaatgttaccagcataggctcctttgcctggcttctgaggtcttctgtaatctgactccactttaccttgtccaaatttgtactttcttaccttcctcctcttgcctggttgactctcaactgtccacattgcataacatgctcacacctgctttgttcctttatccttgcagtttctgctacctggattaccccttcactctttttcacttgtgcaaatttcattcactgttcagagttcagccctagttactccttcctgatcacccctttctggacaacttcaggcctcattgcagtccttcttctttaaacttgtatgggtatttatcactggagcattttgcatgcctttatattggctttatctatttactatgcaagtgttccgtgagttatgctcaccttcagtgttacagtttggcccagttcagttgttttcagccctggctacatttttggaaaagtttaaaaaatgctgacgcctggattccaccaaaaccaattgtattatacctctggaggtaaggccctgcatatcattttttttaagaacccactaatgtaccatgagagttgagaatttgatctgagatacaactgaataaaatcactgttgtaagtaatcacccctagaagacaaacagattcttatattgtgacaatgggaaaaatccaacactggaaagagaaactcattagcataaaatgtcacttctggttacaggatttcctagtgaaggtgactaaattttgctcagggttcacgggatgccaagrtcagctaagccctcgaagagagcagcattctaaaccattttacaaccatcctactacaagccctgcaggcattgacacacaatccttagctaaacaaaacaacaaaaaatgagaaggaaatacccatctacttccacaactttcagattcctgtgtttggccttctaagcatcgtttttactagcaataactcacggtggtactatagacctgattttcatcaggttccctggaataaatctctctgggtatctcaagcagaaagaaatgtaacgcagataattagttatttaccaaactattggaaaaatttgagatatcaaaataagaggcctcctttaggctgacttcaaggtcatctaccaatttgactgtcatgcagagaccaggcaactactacagggattgtgaaatccatgcagcatcatcctgttgggccagacttttatgcccaaaggaccatagaagacaatggcctctaactccctcctgcttttcatattgcctatgagtgtatgtagttggcagaacctatatcacatctggaattgtagtgtcaagggagtttggtaaatgtagcttttagatttccagtcttttaggtactgtgggtcgataaagatactgaatgccaaaagacagtatcctgcatacattcctcagcaactgtagagctgttgctgaaaaataataatgtttcacgtcaatggtgttgccttgtgtctgggttacaaagatgaaaaagacttgggtcttgaaatggtaagttcttttatagctaatacttatatctcaggttccatctgtgtcctatagctccttggagggtttgccttgttatgccaatcactccctaagcctttcttaaattagatggactcatgccagtagtgcgtgcttgggatcatcacttaaccttcctgagcaagtaaaattgatgcatgaaaagttggtatccctttggcagcagttaagcactgcttttccaaagacaactcaaagggtaggacaaatcttaaacacataaattgttcgatacaaggagctttgaaagtttccggttcttagtacatatggaacacttagatttttaaggtttttttaattgttttagacaaaaacagtgggaaaaatgacagtttgaaatgtcagtgctaatatataataatataycctgagaagttaagattggcctttatcttgcttgtctgttcaggctgaaatttaaacatccatggaaaatttctaattaagggagctgtataatttggggtaaattaataacttctgtaagcctcaatctcctcaagtgtgaagtagggaacatcacacatttgttagaattaaataaggaaatgcctctcaaatttcttcattaatgttcccctaatggyagagaaagtgtaagtgtacctatagaaagttcaaatcttttttgaagacttttgtttcaccataagcttttaaatgaattctacattcaaatccacattatattcatgacagttttattatagaaatatcttagaagatttttaataatgtgaaattgacattgttaagagaatatgccagttttatcctatgacttccagtatgttctagcatgctcttctgaaaaccaaggctataattgaaaggtttgccagtaagttcatataggagacccctaataactcttagatgaaatttgaagaagtttttagacataaggaatttatagtataaacatggaagagtaggtagcacttttgagcttctgagggtaattgtttctgtcttgattttacaactcttcaaaataatttcattcttttggatatgttgagatgtgcctctttcctttccttgtcccatccatttacagattctgaaaattctgacgtctgctctgtctagctacttaatcagtccagacttagactacctttatgcctttatataatatatatggactgtagcccaaatgcccaagtaccacaaaggtatgcaaattatctcctccctgccccgccaccatactgccaaccagcatcagaatggagcttcctctctgtttccctgaatgcattccatattctccactgggtcaggagaactttcctaattaataagctcttctactgggatgcatcatgggagcacaaaaacaaatttaatttcccttgcaaatgtgctggtcctgttctgctctccatgtgctgactagccagatgcatagggtctgtatatttatcagtctccagtaaacacctacttagagtttctcagtctgttaatctttcccctcctagatgccttttgtttcacctaccatctcttcccccctttttttccaaccaaggtgttctaagattagacatatatttctattttagcattgaccacatcatattggtgattgttatgtactgtctatctccattgctggcctgtgaacttcatgagggaagccctgtcttagtgattatggcatctccagtgcctgcaaaatatgggtgactaaatgttgatttagggaatgaatgaataagtagcagcccagatcataaatagaagcacaattcaaatagctgaaatgcattagtaccatcgaatgtgttttccttccttgtgaaatccttgtgaaaaacaacatgaagaaccgaaagaaatctttacatgaaggtacttcatttgcaaatgaaacatatatagggcattggcctaataacttaaatctgctttcctgggagggctatttctgagtcaaacacattaggaagatgaccacactcacctccctccccaattcttgttagaaatattacggaaattagagtctgcatgcctgaaagtcagtaacgtgtagcttgagtttgtgaattggcattgtgtctatgctgtcagttaattattttgaagttagtagattaattaatggttaatgattatgtgtgaatgatgcacaagcctctttttccaatattaaatttaataattaataatttcatattatttatgagtcaaaggcagtcttatggaacctcctttctcaagaaaatgtaaaacaattccatttttaatttagcactgagattgctctttctttgtcatagtaattatgggcttttctgccagggtcccatttttgcttctactttacaacatggtcatggctgaatagctttaatcaggcaccaattartcccaactctataactcatttaggctgggtctttggtggttgtgctttctcctttcaaactgggagggaaatattagaaaagtaagagcaaacgatctcaatccctgttgaataatttgtaaagagatatttctgtaacctgcccaataaactggttatcatattaaactcatttttagcagcttatattcacttaagcattgcaccagatggtggctgtcaaaatgtttcttataattagcatcagyaaacttctctcgggcctttgaaattcattgcaaatcacatgttgtctataatcataagattggaaatgttattaatatcctgctcagtattttgctacagtagtttttgtaaaactgcatggatcaatagagccaacttttctgtactgtgctgtctcaaaggcagttaagtggtaaatgtatctatatctagatgtacaaattgatttgatcattttcatagggttcagtaatcaactctcaaaaataaagaccagccaaaccatttatttagttgagcctacaaatgttctgttaatattaacatatctagcaaaataaccattttgaatcacatcatattccactgaacttggtgtctcagttattgaattagtcagatctcttttggttgaaaatgacagaacccctacttgaacttgtttatgaagaggaaacgggattgaaatgagagtacatttcatatgttcttaccacaaaatatgattcatatttgaggtgatgaatatattaattagcttgattcaaaaattccacattgtattcagaaatcataatatcattttgtaccccataaatatatacaactataatttgtcattttacaattcaaaattaaaagaaatgggagccgaaccggacggcggcggcggtggcgggaggctgcagcgcgcgggggtctcccgcgtcccctccgcctcgcccggagctagcgccttcgctcagccgagctcccaccccacccccttttttccgaaggcgctgggcggcgccaccctccggccggagccaggcactgcccaaccccctccgactttcaatgttccacactccccggccaggccagagcctcctcagcttctttttgtctctcccccctcccctcccccaacagctgcgtccatttccttaaggaagggtttttttttctctctccctccctcacaccgtagcggcgcgcgagcgggccgggckggtggccggccgagttttccaagagttagcttcaccaagatgtccagtgataggcaaaggtccgatgatgagagccccagcaccagcagtggcagttcagatgcggaccagcgagacccagccgctccagagcctgaagaacaagaggaaagaaaaccttctgccacccagcagaagaaaaacaccaaactctctagcaaaaccactgctaagttatccactagtgctaaaaaaattcagaaggagctagctgaaataacccttgatcctcctcctaattgcagtgctgggcctaaaggagataacatttgtgaatggagatcaactatacttggtccactgggttctgtatatgaaggtggtgtgttttttctggatatcacattttcatcagattatccatttaagccaccaaaggttactttccgcaccagaatcgatcactgcaacatcaacagtcagggagtcatctgtctggacatccttaaagacaactggagtcccgctttgactrtttcaaaggttttgctgtctatttgttcccttttaatggactgcaaccctgtggatcctctggttggaagcatagccactcagtatttgaccaacagagcagaacacgacaggatagccagacagaggaccaagagatacgcaacgtaattcacataatttgtatgcagtgtgaaggagcagaaggcatcttctcactgtgctgcaaatctttatagtctttacaatacggacttctgtgtatatgttatactgattctactctgcttttatcctttggagcctgggagactccccaaaaaggtaaatgctatcaagagtagaactttgtagctgtagattagttatgttgaaaacgcctacttgcaagtcttgcttctttgggatatcaaaatgtattttgtgatgtactaaggatactggtcctgaagtctaccaaatattatagtgcgttttagcctaatgcattatctgtatgaacttataaaagtagctgtagatgactaggaattatgtcatttgtattaaacccagatcaatttctgagtatgtggttcatgctgttgtgaaaaatgttttaccttttacctttgtcagtttgtaatgagaggatttccttttaccctttgtagctcagagagcaccggatgtatcatctcaaacacaataaacatgctcctgaaggcatagtttcctgtcgtaatattttaagtcggtcttgttagaaggtgtgtctgagatgactgttgatgaaataaaaatgtggctatgaagattactaaagactagcacaaataaaccaattcttgaattgaaaacatttttaaaaaattaaagacatggcactgggaatcttagtaaccaaacttctgaggtgtactgaagggtcccagggattattaaggacagaaacttgcttgaagagcatctaagtttgtgtttttagtgctccttagagaaacaagtaagggagcatgagaagcatgacagaaaagggtacgaagccaagcaagaggctgttccaagccaagtctcagcgtcaaccaaatcctacaagggagttctgaagtgtaaattataactcagagtttgctccaaccagaggcaagggagtttggttttcatacacctgcaccagttagttaaaccccactctcacctggggaaacataacccccaagcacttctctctccacctatcagggcaaagagctctagtagccccaaagatgacatcctaaaagaatcacaggtatggaccattagagacaaagcacacagaagctggggaaggagtacgcaggatgattaaagggattatcagagggctcatggtgggatgctgagagtgtccatgacaaaccctatttaaattattttttgaccttttctctgcctgttgtctttaccttttccccaaaatactagcttcctccatgagccagggaacatggttgtcaattactcttaagtatcacatcctgcaggtttcaccaccaaattggaagctttgtactcagtgccagttaggaaagtcatgaggaaagaagaacttgtattggcctggcttgaatacagtgctcacttttgaaccaatctagccttggggacagggtgatataaaaacatggtggccctacaagagctacatttgaagtaaagtaagaagcagtttctaaaagaagaagggctgtgatattgctagaagaaggtagatatgctgatgagactaaaaagaaaccaaacccacttggttggagaatggggttgtcatggtgagagttacgtgttcagtccttataggacttgtcagtgctctacatagagaacctagttaagattgcatccttactataagtgggtctgcaggtgccagtttctggtcacaaaaaaaatatgcatatgaaagaagaaattgcatattatttgcagaaaaaatctcaaatggacaccctgttggggtacatacaaacatgaattcagtcttcattaatttagtctattggatccttatgcatggatttccttgttaaatacaaaagggattttcaatgtaggaaatatacagctggagggggactggaccatttagattacctcaatttattctcttagcctgagttttctttgtgaggctacagatgcttaataactgtttaatccaactagaggctcttctctctagtatcttagaggtgagatacctacatttatttcttcagtttaaagagatgctgtctttgctcatttaacaccactttcaacctatgtctctgcttctgtttatcaagaatttttagtgtaacatgctctgatattaacatagtcttgcatgaatattgcaatgtgcagagggacagtgttgttatcacgtatcagcagttggtgtttattggtgataaatgagtttcgttcccattgagagcaatatccctggtttttactctattatctaggtagagatgaaagatataatatatccttaaagcggtattcatacagttatccagttaatgaggcattaagggaaggggttgtggagagacacacacacagaagggggaagagcggcggagagagacacacacaaagagagacactcaggtacagagacacacagagacagagaggaaaggagagacatgtagagaggcagagagagagaagcaaggaaagagagaacacaaaagagaagcagaatctgaaaatactgtgaatcctgtgcagtatatctccagggttttgctgtcctataatttgtaagaaaatattatcagactgggtaaagtggtgaatcattagtatttatgatgaacaaatttccaagattgtatttcatggtaagctgggtgcttcttttgctgtttggagttagtctccctagtgctgacagcagaggcttaattcaatgagtaaattcatacctacatgttggcggaggcaccactttgtttacctctgtcgaacattgaatcaagggagttaagtggaaacagttcatcggcccgggcattcggatccactatgtgcagggcagagaagtttcacctgttgaaagaataagttcagggaagatggactttgaaagctggctattaggagttgctatgtggaccttggggctcattttaggagctgcactaattcaggtcaattcaacaaacatttcttgagcatatgccatatgtcagatcttatgctaggcactggggattccaagataaatcatagtgcctgtcctcagccatgtaaatagattatttctaatcattgtggtacatgctgtggtggaactgaactcatgatgcgtggaaatacaaaagagagttacctcatgcctttcagatggtaagcgtgggccaggaacatttgtacgtatgaaatatggcaaagataaggaggttaactggctaggatggactacatggacaccacaaatccaacaactgagttttctggcctgaagattagatcctgtatggttatccttagttgctatttattaaatgctggccaacaattgctatcctaatgctggtcaaattaatgcttatccttaatgtttatcattaataccagttgacaatgattatcctagggttgctcggcataatgcttatccttaatactggttcacaatggttatcctaatgctggttatcataaggcttatccttaataggaataataaggataatgcttttccttaataaggatagtaagggtaatgcttatccttaataagcaagtcaacagtggttatccttaatgctggtcaatagaatgcttatgcttattgttagcctaagtgctggtcaaaaatggttgtctttaatgggggtaaatgaaggctatcaatactggtcaataatgtctatacttaatggtcatctttaatgctgatcaacaactatttaggtctttctttgttttctggtcacatggtaggagggcactctgtggcccccttagagatgggtagtctcacttgattagttatggcaaagcattgcgactataggtgatgtgtgtcactttgagactggaacatttaatcccaggggtaagagcctccaagcctctcttttcttcttggatagtgaccagcaacatctgcagtgacagttgctccatcagcttgagtgttatgagcagaccagtccagtagccctgcaatggatatgtagcatgaatgagaaataaatgtttgtatttaagcaattgagatgtgagtgcgatttgttcctgcagaagaacataaactaacttgactggctctcagcctcagttgcacactggactcaccaaaggagctttgaaaagatgcctatgtctgtgtttggctgaaaatcagctggattagaatccaaaggtgcgagtcctgaatattattatttttgaaattgaattttaaaaattcaactatggaatgactagaatgtaagcttcatgagggcaaggatgtggtattaattactgctctatactctcatggcatacgctaaataaatacttgttaaatgagtgaataaacactatcatgcctagtttattgagtttcctacactaggatttgtatcctgcttcctatgtcatatactcaaaccatacccattacctggggtcgtcttcttaaagaatgcttgagaagaggaccccaggttgctttgtctaccttccagtacctcgacttctgtatatgtgtcagcccacctctgttttgagtctgtctgttgtaactcctgaaacactgatcattaatatgtccaaaggtgtccacaaaggccattagtcatttccttagccccattgcctatatcctgcatgctcctggcttctctctcttcccatagactcagatcatacattgtttcttagttataattcaaggaacttgcatagttatattcttgtctttaatactcattattgtgataatactttgtatttctttagtagtcatttttatatagttatttacatatcatttaaagctttcataaagctattattctgctacataaatgtgcattaccagttaaagattcacaacagacttgaaatacccttgctattgaatttcagaaccatgttcttggaatctaaaagaaagccatagcaaaacttgcttatattgcaagccaaatgaaagaaaagctcttttaccccatttttacttcttccaacatcttattcatcttgattgatattccatttcttttttttttttttttttttttttttttttgagacggagtctcgctctgtcgcccaggccggactgcggactgcagtggcgcaatctcggctcactgcaagctctgcttcccgggttcacgccattctcctgcctcagcctcccgagtagctgggactacaggcgtctgccaccgcgcccggctaattttttgtatttttagtagagacggggtttcaccttgttagccaggatggtctcgatctcctgacctcaagtgatccatgcgcctcggcctcccaaagtgctgggattacaggcgtgagccactgcgcccggctccatttctgatcatagatatgaaaacagaaaatgatattcatactgtaatgatctccaaggcctagctgagtacctgctcttccaccaaacctttctctaggcttcccaaaccacagtgatctttttattctctgagctcccaagaaattttgtggactgaactaatcatcttggcacttggattgtgtttaattgtgtgtctgcttgtgtggatattaagttcattgaaaaattatgagttatctagtaattattgtatattctctgtagtgcttaacagtgaaagagagttgatgttcaatacatttactcagtaaatacttaaacaagtatatttattcaaatgttatatatatatgatccttgactgaatgaataggaaaatttatatgtacacatatatatattatatatataattatatatatataattatatatgtatataatttattacattcatcaaatggaaatttatggtttatatcaagaccataattacagtgaaatgattctaaatcttgaagctcttcttatttaattacttaaaaaattaagagtttttaaattcagacatccattgtgttctgtagcgtatcgccatcattgtggctcttggctatgacttttgagcaatgcttccagcaagataatgcctgaagtatcaaacataatcaaatattgactagttgtacaaccctgctaaacacttatagaaaaagctggaggtgcaattctattagcaagtggttagtgttaatgattttttttttttttgagacagactcttgctctgtcgcccaggttggagcacagtggtgcgatctcagctcactgctacctccacctcccgggttcaagcgatcctcctgcctcagcctcctgagtagctgggattacaggtgcatgccaccatgcccagctaattttgtttttttgtatttttagtagagatggggttttgccatgttagccagaatggtcttgacctcctgacctcatgatctgcccgcctttgcctcccaaagtgctgggattacaggcatgagccaccatgcctggccactaatgaatttttcatcagatatataaatgcataaatctggcactcagccaatcatttctttcattccagtaaggaataaatgtatttaaaccaattgagggaatctgtatatgatcattggtttcacgatctttcttataaccttatttttagccatttaataatagtgcttgtatttaatgaatttttttatttaaagaatattgtctttctgaatcaattacatgc

SEQ ID NO: 93900 - DNA, 12467 bp, Homo sapiens
  misc_feature (1)...(12467): n = A,T,C or G
taagatagtgaacccggccatcaaccccaaaaatttccttgttccccttgttgattctcacttctgccctatctagccccaggcaaccactaatctatgttctgttactatggatttgtttgttgtttctagaatttaacgggatggaatcatactgcatatattcatttgtatctggttctttcactcagtacaattattctgagattcatctattctgctgcttgtatcaatagtttattctttttattactgagtggtattcagttgaatggatatactgcaatgctagttacctgctggcggacgtttgagtcatttctacttttcagttctaatcactgataaaagtgcaataaaaaataaaatgttgacctaaacctcacatcttaccttcaaaatgtaaaatatacaactataaaactttttagaagaaaacatacgagaaaatcttcataaactgtagtcagacaacgaattcttagacatgacaccaaaaacatgatccatgaaagaaaaaacttgataaattggaattcattaaaataaaaaatgttaccaggcgcggtgactcatgcctgtaatcccagcagtttgggaggctgaggcagttggatcacttgaagccaggaattcaagaccagcctggccaacacggcaaaaccccatctctactaaaaatacaaaaattagctaggcatgatagcactcacctgtaactccagctacttgggaggctgaggcacaagaaatgcttgaacctgggagatggaggatgcagtgagccgagatggcaccactgcactccagcctgggggacagagcaagattcatctctaaataaataaataaaatgtctattttgtcaaaagccttatgcttagtaaagaaagccatactcaaaaggtgacattctatttagtctatctatgtatttatctgattccatttatgtgatattctcaaattgtattaaatatttttaaggaataaaactatagttacagaaaatacagtgagaacacatggacacagggaggggaacaacacacactggggtctgtggagggggcggcaggggagagagagcatcaggataaatagctaatgcatgctgggcttaatacctaggtgactggttgataggtgcagcaaaccaccatggcacacgtttacctgtgtaagaagcctgcacatcctgcacatgtatcctgtaacttaaaataaaataaattatttaaaatatttaattttttttaaactatagttacagaaaataaattagcttgccagaggttatggataaagtgagggtgtgatgttatagggataccatgaaggcatttgaggggtgatgaaacttctttatattcggattgtggtgtgattatatgcatctgtctatatatatgttaaaattcgtagaactgtacaccaaagaagcctatttttaaagtaaagttacaggctgggcagtggctcatgctggtaatcccagcactttgggaggcagaggtgggtacatcacttgagttcaagagttccagaccaaccagggcaacatagtgagacttagtttctacaaaaaataaacaagaaattagcaaggtacagtggtgcatgcctgtagtcccagctactttggaggctgaggtgggaggatcgcctgagcccagggaggttgaggctgcaatgagccgtgatcacacactgcactctagcctgggtgacagagcaagagtctgtctctaaataaataaataaatagataaatagataagaaaagaagagagaggctgggggcagtgcctcacatctgtaatcccagcactttgggaggccgaggcaagtcgatcacctgaggtcaggagttcaagaccagcctggccaacacagtgaaaccccatctctactaaaaatacaaaaaaattagccgggcatggaggcgcatgtctatagtcccagctactcaggaggctgaggcaggagaatcgcttgaacccggaaggcagaggttgcagtgagctgcgatcaagccactgccttccggtctgaatgacagagcaagactctgtctcaaaaaaaaaaagaaaaggagagagagaaccatgaattagcccattgtagatgaaaggcattagaatagatacaagcaactagtaggagatacaatgggatgaagtattggcatcaggttcaatactctcataagtagaatagacactgttgtgacggtaatgtgccagagctgcctggtttccttctctgcagtcaaggtttcttcctcccttcctcactttgccctggaagcagatattcagacaacccaaattccttcctctctttatgaactgcacattcaaaaagatctggcacctgacctgctcctgttaggagaaagatgagaaacattactggtagagatcttaatgggaagatcacggcctgagtggaggaacacaaggtatgtttggccagtgcgagtatttcagcaagactggcaaatgcatgagagcagtggggaattaaaacttcccagcattttaggaggccaaggcgggcagatcacgaggtcaggagatcgagaccatcctggctaacacggtgaaaccccgtctctactaaaaatacaaaaaattagccgggcatggtggcgggcgcctgtagtcccagctactcggcaggctgaggcaggagaatggcgtgaacccgggaggtggagcttgcagtgagccgagattgtgctgctgcactccagcctgggcaacagagtgagactccgtctcaaagaaaaaaaaaatgttgggattaaactaaagaaggcagtgaatgaggattggagagtgtgtatccagtttggtaagtactggggagctatgaaatgttcttagatgtgcttcaggaatattaggctatgatttataggatggaatcgaatggagaggtaggagagagagatcgagaaagagaatgcgaacaataaccaacactggtagccatcagagttcatggctgtggccatgctgatggaaaagggaaatgcagacaagtagcaatttgtgaataaaagttaaggaaaagagagaggagcttgagcaatcaaagatgtcacttgcaatatgcaagaaataatgttttaggggaatttctgacaaatgttagggaaaaccactcttttttaacaagtcccaaagtaatgcatctatgcatcaggaacaagagtttcaggacccccacaaacagatagtactatgaagaattttgtaacaatattcctttattttccactcaagataacattaagtaataactagaattacgcacactgttcctcagccctctgctggtgtagcctctctcctggacctcttttaaaggtagagcatcagggaaacagccatccctaacccacaactatccataatcaagttatttcctctgcttctcctccctgctagatcgcctcatttacacccaacgtgactgacactgatgacacccagttgtacttttccattctcgtttgaagcacacctgagtggcagacatcttctattttctaataaagacaaattagcaaacaagatgcagagcaagttggaagggctgaagaatgcctcatcctttctttcccaccaccccgccccccaatattgaagcttatggaataaccccagctttgctgtacatgtttccttaaaaacagtttctcaagcccattcattctcaaatgaaggaagaatttagcaaatttttccaaggcttttctctcagcctgcttcataggactgtcctaaggcacaaagcatagcaggtgcttgacatttctgtatcaatcatannnnnnnnnnnnnnnnnnnnaatcataatcatagttgtttttacaggctttttatttttttgctgcatctccatgtcttatctcagtaaagcaacattatgctaattttacagatggaaaagctggtattgagattggttttaagcttagtcataaaaggagtaaatggcagagtctggactcaaacattcagattcctcatcttttcttcccctaatataaccagggctctcttgttctttttatttgtagagacttctgatctgtttatttgaaatgaggttaaggaccaagacttttaacctagcatcaaagaattagctcagcttcgctatcacactattctctccttagcccagcaggtgggctattaattgtgtccttcatttaaatgaggatattctgggctgtgctttgcatttgcaaagtgcatggataaactgtaaatgagaagtacccttcacaaagagttagccagtgcaatctctgcacaatccagcaacattctggaagatttattgatcccttgggcttcattttctaattctctttagcttctaggaattttaaaaatataatctataggttatatttttttctttttctgagccactctctgccatattattaataaataaattatttcctgaggagagactataagaaattttctgaagatgattattttcactcaagaatttttaggataggaattatggaagagacaggaggacctatcctgaactctaattatgatatttaaaatgttccgtcttgccatataaatatattatgctaacataatgtttttatatgtatattttggctactagatgtatatatcgaaaattgtgaaaatgtttctcttagcgttgtgcagcataatgatctgaatgcatgcataagtgcctttaatgcaaacagatacactcatctgtagaaatctaatctagaggagtagatgtaatttactatcagatgcttttattaacttgatggcttgaagtatttcattgtctatccagcaggccagggcatctggagtagccaattgcacatgttcaaaatctgttaatgccagtcatacatgagtcctgacaaagcacctgcaagagccaaatccagtggtgcatcttcaccactacacccatttatgttacccatgtctgaaggaaaccccttgcaaagggatttgccaaaatatggtcatagaccaccggttttggggagtggttctgtggtgctcagtcagaatggaaagcatgtcccccacccaaatattaaatgacttctttcctcccaaagctttcctatctccagtccaaacaacataatatcgaggttgaacatccataatctgaaaattcaaaatccaaaatgttccaaaatctaaaacttgttgaggactgacatgatataacaagtgaaaaattccacttccacacttgacttcacatgataggttgcagtcaaaatgcagtcaaaactttgtttcatgcacaaaattatttaaaatattctacaaaattaccttcaagctatgtgtataaggtgtatatgaaacataactgaatttcatgtttagactttgggtctcattcctaaaatatctcactacatacatgtaaatattctgaaatccaaaataacccaaaatctcaaacacttttggtcccatgcattttggataatgtattacattatatatatgtgtgtgtgtatatatatataatgtgttttatatatattttatgtataatatatatgtataaaatatacatatatgtatatataatgttacatatatttatacatgtcatattatatataatatatagtatatacatatatattatatgtgtgtgtagtgttgtcattccacaataaagcatataggtctggaaaggataacaagtgttatctattggcagttctgtgtgaaagagtttatcagctcctgttcagctgatggcagctcactgcagaagttacttacaggtggactatctctatacaaaatgcttgggaccagtttttcagatttcggattttctctaaacacaaaatttccttatgttttaattacatgaaacaaagttttgactgccttttgactgtgagccatcacatgaggtcaagtgtagaattttccacttgtggcattcagggygacagactttccatcccagaaccattggcccaatttttccgtaaccttgtggaaaagaccctggtgctggtgaacrctgctgtgacttactcaaagccttgattggccacattttggtactacgccaagtttgagctggttcctcccacccctgctgwgatccctagagctattcagagtctgaaaaaaatagtcaatagtgctcagactggtagcttcaaacaactcacagttaaggaagctgtgctgaatggtttggtggccactgaggtgttatgtggttttatgtcggagagatcataggcaagcgtggcatcattggctatgatgtttgaagaccagtatttaacatctgattatatttgatttattatttgaatgttgttggaccatgtgtgatcagactgctatctgaattaaataagatttgtcaaaattaaaaaaaaaaatttccacttgtggcatcatgtcagtaaccaaaaagttctggattttggagaatttgggattttgaatttttggagtagggatgttcaaatggatatatgcatatccattgttatggaatgaaaatataacacacacttgtatatgtatgtatatatataacattttgtccctaaagtgttatttcaatttgtagaagtaaactggaagaatagataccatcagcatctttccagggtcattccgagaaccttccaattataataaattatgtaaaataaaacaaaaaataaaacctcttgccatgttgtcatggaggcctcccctaaatgtgtatgccacaaaagaagcagtgtcagcagcaagggggaggatcccagagaaaatagaagaaggggatgcctaagcaccatacatcatgttgcttgtacaatacaaaaagaaaaacaattaagcagattttccaaagtagaaaataattggtctttatatagagtcgacaatttatatagagttgacaacttcagaaaaagatagggctgattttccaagtcaccctaatagattgtaccttttcttatttaatagacatttttactgaagcttaacatatatcaaggacccaaatcctaagtcaatgtatttacacaaaatgaccacacttgtgaaatgagcactgagacggagaaacagaatgcactgttccagcacctcaaaagacccctcatgctcttttccagtaagtaatgacccttccagaggtaactggtataaccatccttccttctaataccacagaatagttttactaatgtattcctaagtagaaacaactctgccattttgtaatagtcatattattaccatctggtattaaatcaaagacacagtaattagagacacttggtttccttagggtattcttcagggcatgtgcttttctgaaagcccatcatcttgaattatcaagaactgaaagtgccagttttaaaaagatgactttttttatcacaaagtcctaaaccagaagagtaatgatgttgaaagaagccactgtcaggtgagcaagagcattactactgcagcataaaatacagcctggctccagccataaattcatactgaacttcttttatgagcaacactttattattttattattatcaagaagaaatacaactttgcctttaaccacattcaaatcttctggggggaatatattaaatatataaatgtgtgagaaatgaacttcagcactgtaatacattatgaatatatttgaggcataaaatctatgataaatggatagaaccagtactagtacatttcatatttaaagagtggctgctaatacatcattctggctgagcaatttatagattgggtagctattttcctggctcttcatcccaacaattcatcaatttttatgttttttaaaagttggatgataagtttatcagactttgattttcctactgccaatttttttttcagggcagaaatggggagaaacaaactgacttataaaccttcactattccttggtagtttttttcctcaaccatagactctgataaatacagtatgagaagaaggggaagagaaatgttattgcatgaatttattaagctattgggtagatatagtactttactcatagttggtcaactaataaggcacatatagtcctactttctatgaacttacagttcaaaattaaattatatcaaccttatattacatcataaacacagagacagtcacctttatattttctgtaggaagggaagaaagcaaccatatgaaaactcctgaatattacaaaagcttttattattgaatgtactctcacctacattcacatacggccctgtctggtgttctggtgattaagccacagcacttctaacaaagtaatgaaacaaccttgtagaagcctagctcgtgaaaatggagaaagtagtcaacacctctatttgattctatctcaacttcttcctaatcctatttcagactgatactgtgtttgttggagaaatttgtgaatttcacaaatttctccaacttgtgaaaaacagtttccctctctttaaaagctttcactcaaataaggaaaacaaaaattgtgtcttcaaattatttatttgatttggtacaggaacaaggtaaatasataagaataaacagaaaaagatgatcataagcataaccaatgagaatagttgctaattcttaaaaagatctagatgtcaacattctaatatattgtacctcagaaaaataaggagaaaggaaggctttttttttaatgtaagcaaatagcttatcttaaagacttgtgcagagaggactcacacatagagggaaccagtaggatgaaaatggagctccataagagcgacagtccatgctgaggtagcagcagagcctgattgagcttgtataggcagttttttccttgatctaggcaagggtgagttctgagggtacaaagacactgttgaaagcagtagttttctgatatagtttggatttgtgtccccaccaaaaccttatgttaaaccataatccccagtgctgggggtggggcctggtgggaggtgactggatcatgagagtggatttcttgagtgctttagcaccattcccttggtactgtcctcatgagagtgagtgagttctcacaagatctggttgtttaaaagtgtgtggcaccacccccaccaccttgctcctgctgtggccatgtgaagtgcctgctccccgctcaccttccaccatgattgtaagtttcctgaagcatccccagaggtcaagcagatgctagcattatgtttcctgtacagcctgagaaccatgagccaattaaacctcttttcattataaattacccagtttcaggtatttctttagagagatgcaagagtggactaatacattctcaaagtgttgcccccagaccagcaacatcagcatcacctgggaacttgttagaaatgtaaattcccaggctgcgttcaagacctactgaatcagaaacactggaggggaggcctggtgacctgtgtttcaaacccctctccccaccccagggattctgatgaatgctgaactttgagaaccgctggtctcaaggagaggtcagtagactttttctctaaaaggccagagaagaaaagttttagatgttgcacttcatacattctctgtcacaaccaaactctgctgggtagtgcaaaagaagtcatagataatatgttaacaaatgggcatggtgatgttccaataaaattttgtttacaaaaacaggtcagagactagatttggcccatgggccattgctgatccctgatacagaaaacaaatgggtgggaggaagaagaggcagcaggtttgctcctcctctgaaaaaaagtagacttcagactgaaatatcaacaccataaccatcgtttatccaagttttgtgtgtatcatttttctaaaagaaatgttctctgtgattctgtttggcctcaaggaacaagggggtaaaaaggagcttgacagctcttccttcactaaaaaaaaaacaagcaaacaaaacaataacaacaacaaaaacccataagactaagcacaaggaagccaaggaagttcgagaccacaaacttcgctgaatgtcctgctggaacattcaacaagcctcaggtggaaagtattaccttacatccaaacagaagctctcaaattccaacatagatcagaattacctggacaggttcttagatcactgggccccacccccagagtagacgagtgtgcagtctgagaattgcatgtccaacaagtccccaggtgatgccgatgatgctagtccaggaaccacactttgacaaccactgctccaaaacatgctcttctcttccttctgtgttcccaatcttagttggcaaaaccaccgctacctatttaggcacctaagcaaatacttgggtcatctttgactcctcactatctctcacccccatattaatcaatcaccaagtctaatcaagtttgccttatcagcatcttggaaatataattcctctttactgtcctcattgcccataaattagtttaggcaagggttttcacactttccacataaaagtgaaattattttcacattagaaaataattatattctataagtacaggccataggggtaaaagatcttttttctttctttctttttattttttttttttccgagacagagtctcactgtgttgcccaggctggagtgcagtggcatgatctcggctcactgcaacctccgcctcctgggttcaagctattttcctgcatcagcctcctgagtagctgggattacaggcacctgccaccgcacctggctattttttgtattttagtagagatggggttttgccatgttggtcaggctgctctcaaattcctgacctcaggtgatccacctgcctcagccccccgaagtgctggggttacaggtgtgagccactgtgcctggacaaaaatctgattgtataagttactggaaacaagactcagaatccttcaaccatcctgaggggtgagggggtccatgttcctgtacagctattctccattcattcagtagggaagccttgacttaggccctcatcatcacctgtctaggcattctaccaattctagatcaaacacttcactctttccactagccaaagttatttacttttaattactgtataagataaccaaatagtctaagaccaaccatgttatttctccttgtgcacttcaaaatgaacttcaaattcatttagctttgcatacactctgtatcagtcactaattccaacaggatacagatgtcatacttaaaatacgataattcaaggaaggtttatttacaaaggtgagagtttagggcagtgcttctcaagtaacagtagttttactcttgggacatctgttgatgtctggagacattatcaagactaaggggggttgagcgtacccctggcatctagtgagtgaatgccaggaatattgctaaacatcctacaatgtgcaggacagcacagcacagcatagaattagacaacaaaatgtcaaggcaaaatgtcaagagtggcaaggttgagaaaccttgctacagagtaaggtcttgttaaatgcttgtcaaactgaattaaatgagaagtgcaaacaaacttcccaggtgcaactaactctgcttgagtcaactgaagagaaatcatgatgggtaactggtgtggaaagatggaaactgcacctcacgttgggcccttgtattagtcagggatctccagaaagacagaaccaataggatgcatataaattctatattagaggagatatgttawgggaattgactcagcaattatgaaggtccagaagtcccacagtctgacatctgcaactggagaccccggcatgatggttaatattaggtgtcacttgattggattgaggaatgcctagatggctggtaaagtattattcctgggtgtgtctgtgagggtgttgtcagaggagactgacatttgagtcagtggtctgggaaaggaagacctgctttcagtatgggtgggcaccatccaattggctgccagcactgctagaacaaagcaggtggaagaaggtgggataggtttgcctaccaagtctcctggctctctttgttcttcctgtgccagatgcgtgctttcacttcccctgtcctttgagatcaggctccgggttctttggtctttgaactctaagacttgcacccgcagcttcctggggacttttgggcctttggccacagactgaaggctgcattgtcagcttccttagttttgaggctttcagacttagactgagcctctaccggcttctctctttccccagcctgcagacagcctaatatgggacttcaccacgtaaatgtgtgagccaaatctctgtaataaacttccttttatatatacatatatcctattgattctgtc

SEQ ID NO: 93901 - DNA, 65054 bp, Homo sapiens
  misc_feature (1)...(65054): n = A,T,C or G
tgccaagaagtaagaggtaatcaggcaggtaagagatcacttttattcctagggagggcaaacagggtggggaaggcctttgacagtgaaacctgggcttgggaaaccctgactttgtgctgctcatcttcgtttctgtctggccacccacatattccgattcccttcccctaggccttctcttaaatccaaacagatggagggaccaagagaaggaagggaaaatggactaaaagaaacaatcctcactcactgtattccaaccaaaattgtgacttttgggagacggctcattaagggacaaagggcctaatccaaactcctctggctagctggctggaattctgcaggggctggatatttggggcaaatgacaagtatacgaagtcagacttgatggtggcaaaattcatactgagtgtatttggtctatagttcttccctctactaaccactatgagggcagggaccatgagttcctgctctatacttatgacacaatacctggctttcagcaagtctttaataaacaggaggaagagactgaatgaacatgtttttgccaactcacttcccttgctaggtatcccagaaaagaaaatgagatgcagaactgctgagcagcacgagttagggagttctgattgtccaccagtgatgcctccatctaaatgtccctacgatcaggggccctttaactcagtaattaataatctacgaatttatacctcagatatattttcacatgtgaaaaaatgacatatgtacaaggttattcactacagtttcttttttctttcttttttttttttttgagatggaatctcgctctgttgcccaagctggagtgcagtgggtgcgatctcggctcactgcaacctccgcctcctggattccagggattctcctgcctcagcctcctgagtagctgggattacaggcgcctgccaccatgcccagctaatttttgtatttttaatagagacggggtttcaccatgctggccaggctggtctcgaactcctggcttcatgctatctgcccacctcggcctcccaaagtgctgggattacaggcatgagtcaccacgtctggcccactacagttttatgtatccaaacaagattagaaataacctaaatgcacatcaatagaaaactcattaaataagccactgtacatctatgcagtgtaataatatgtagctatatataacaagggaatgaatactcagcattctgatagggaaagatctcctagctatattaaagttttttttgttttttgttttttttttttttgagatggagtcttgctttgttgtgcaggctggagtgcagtggcatgatctgggctcaccacaacctccacctcctgggttcaagtgattctcctgccttgccctcccgagtagctgggattacaggtgtgtaccaccatgccaggctaatttttgtatttttagtagagacagggtttcactgtgttggccaggctggtctcgaactcctgacctcatgatccgcccacctcggcctcccaaagtgctaggattacaggcatgagccactgtgcccagcaatttttttttttttttgagacagagttttgctcttgttgcccaggctagagtgcaatggcgcaatcttggctcaccgcaacctctacctcctgggttcaagtgattctcctgcctcagcctcccgagtagctgggattacaggcatgcgccacgacgcctggctaattttatatttttagtagagatggggtttctccatgttggtcaggctggtcttgaactcccgacctcaggtgatctgcccaccttggcctcccaaagtgctgggattataggtgtgacccactaggcccggtcccatttttttttttaaaggtacaaaataatatatagtatgcaaccttttgtgttaaaaacgtggaaataaaatagatgcagctaaccaccatggcacatgtacacctatgtaacgaacctgcacgttctgcacatgtatccgagaacttaaaaaagaaaggaaataaatatatacatttgcttctttttatataaagaaattctagtcacatatactgtataagaaactaatacttttagggaggtggtagaagctgggtagatagggaacgggagagtaagagagacttttctcagcataacctttttgttgttattttttaaattttgaaccatgtgaatgtattacctattcaaaaaattagattatacaagtccccacaaagctagaataagagcaaaccaaccagataactttcatgctagaacatgaaagacaactgtcaatctcagaagttgaccctggcaagaaggttctagaggtaggctcgctagccctggtcactggaaaccaatgatagaaatgtgtggagagaggaatgggtacacacacgtacacaaacacacacgatgccttaccagacacaagctggaaagagttcccacagttggagatgtctgcatgatcaggcaaaggctaagaaagagagaatatccatcatgatttggattcaggacacactgacagatttctaggaagccctcttcagttctcctctgcgattcatgagctacagggatgttagggacattaagtgttcttcctcttgtcttcccaaagttagtaagtcaaacaatccacatcttccaacatctcaaacccttctccacccaagttttgctgtcccttctctatcggtggaaaaatccctgcccccttccttttgggctgggttttgagccattagtgkgctcttccaggttaagtaccatgattcatacagcacaggacaagagtaaagtaatagcaacaatcagcctcagaaaaaagggggagggggtcgtggagaagcaggaagactggtcttttaccagactgatgctgaagcgtgtgcatttcagctcatccagagtctgcttctgtagctgctcagtgatcagggttatcatgattctccccaggatttgacttgcacactttggagcaaatgatggatgtcttccctgttgttcttccagacctcacttgtgagccgtcttctgccactgcagcaccattctagcaccattgggacttccctctccagtcatgcctgctgagtctgccaattagagggaccagccccaagtgatattagagatgcacctggtccagagatggaaaatgcatggcacacataccacagcacccctaagccaggcctctggcagacatcaattgatcacagctctttccagctaagcctaaacacagcttcagaaattatgaacttggcagtccagatatgaaataaaatagagttggcaatcaagttgaaacttatttgcyacccttaaactggttcatgctctgttgtttctaactggaataccagcaccacttagaaaacagctgctcaagtgagagagagggatgcccaaatgattatttccatcaagatcagcccagtattttatcttccagtcagaagtgaaaagaggtacccttctcctaaactacagaaatagtaataagagaacaaggaagaacagtggttgtaggcaagactttctgctttagacctgagtacataggattttatgtcctcccacagcctaaacatctgatatattattgttttccaatagatacagtgtttgttttcttatcaaatgggaagataaagaaatggtcagggtaattccaatacatttcaactctacagacgtcgtaaacaacaactccatgactgttcaactaagtttttagcctcatctgatgcaaagtccatggatacagttaaccaagattctttctcgtggtcaacttctgatagaagcaaactaactgtatcagataacaggcttcaagcccacacaattacctgaggggccttgctcaagggaaaaggggaggttaagccagtgtcttgattttgttctatctattcccggaaatgagcagcaagctgacagcttaccagagaatgtgtgtagcattagctagtcaagagaacaaatcatcaagaaatctaattattaatccaatttgctaagagttttgacaaatcatttaatactccttggcctcagtttacccatatgtaaagtgggcagaataatcttaacctgtcacaggaacaatataacatattaaaatgtacaaaatgtaccatctgacctataaaaatcaggagtccacacagactaccatttctcgttcccgtttgtgaatcttcaaggcctcagaatgtcagaagtaatgaaatcaataagatgaagaaggcaatagggtccatctctctggctgaataccatcctccctcacctgcacactaagaaaagcccaagagggctcttccttctgtgaccttgggggcagatcactctacaaaaaagaggaattatctctaccccactcacaccttagaaggagggcacaaggaagagcaaagagataaacctggatgtacctggagttctctggaagaaaggtgcaagagaagtcaatcatcattacagttaactatcattttcatgcataattattaccaccctgaacaaaattctagcttccggggagctctcttcagctgcttcccctatattcttacgggagaagctaaagcttatatcacttctgctcttggtttcttaactctgctgccctcaaagatcaaccagagaggraacctaagtgcaggattttaccctagagaccccaggcctcaggctaaccagctatgaggagcagggaatgaagcaaactctccagcttttcatgaggcatttggacaaacagcaaactcccagccacctctaggatcaagtcaagacagtgaatttgtgtttttctgcattttaattgttgggatgtggccacacacagtggtaattggaacaatgcaactrccaccacgcaactgatactctcagcctgagtttcctaaaacaggccaggctgcgagggggaacagaacggaagccataaggaatcaaaccaggacacaaaagaaggcaaaccagctccgcgaggggcctcctctttctcaagcaggcattgaaaaaagtgtaagaagccctctcttgccgccttccttccccttccattttgtgtatctgaagggtagagacagccctgaatattcactaaacaagttaaaacttctcagtttaacaactggcacggggctcagcccttcacagagcagcaggccgctaggccytctcagcaaccccaccagacctaactctcagtccaggctttccctccaccagcagcccccaaaaataaagatcagacccccaccccatctcctattggatggcagtaacccctgacactcctgtttcagggatgctgaggttrtgctgtaccaagacaaggtaggatcaggtcaggccaacagggaggagagtcacaaaccctttggggaccttcccctcaggtcccagccccacacctcctggggagactgaagaaaaacatgaggaaggcagggagctgcatgaacaggtaggtggagatctgcctgctcttcttccatatggttctggtggggaaaggggtgacaagtggggaacacccctccccccacccccatgaagaagcaaaaggstaggcccctccaatcttcaacctctccctctgttgccctgcctgtccccgcggggtggggcatggggcgtccgctggtccccggggcgggggggggggtgcgccagggctcgctcaggggggctgtcgttcgcctcttcccactaggttccatcatctggccgcgggaagcgaactcaggacgcaggggatggggagggtctgggacttagcactccgccaccccctcccccaccgggtcccgtgctctccccgcagaggcggccagcgaggcccggccgcgcgggcggtcgggctgggggaggggaaagagggaaggagggagggacggttgaggtgcccgccccgaggccccagcgccacctgccctccaccacctaccgcggttcctccarctcccagggccgcggccggagcagctctsagcgctcggttcgccccacggtgcccttaaaaggcgctggcgcgaaccaacgagtccctgaggagagtagggggacagctccggctcgcagaatccccccaagccayccatggagggcgcagctccgtgtcgtgtctctctcaaagtgtctctcggacagcgctgttgggaacgagcctggcgctttgatttagggatgggggtggtttcctcactaacgagtcaccccctccaaaatatcgcagaaagtggacggccccagttggaggcacatcttgaaacccgcgggggaggccatgtcggaagaaggtaaacaaaggcatcgcccctkccctccctccctccaacggcccaactgcagcctcccactcggttcgggccgcgtcacgcaattagccacagtgcccctcacctgctctgctgccccgccctccacgaycacctcttcgaaggaatcccccttcccccagcaaaggacccgtccgyggcgtgaaggctgctgggaagtgtggtccaagcgcggattagggcctgctcggagtcccaggagcccctcttgcagctgccggatcggcctgaaccttaaaaacccaggacttataatggttgcggggacgtttccacttggttctgtaatttgccctcacccagaacactttgtaaagctcaggatagcccagggctgttcactccctctcttctctctccgccccctcccccccagcaggatgaggtaatgggattgtgattatgacatcataggcggttcagttgcttgcgtttgccnggggggaggtgcggggaggtggggagaagtgcggtggttagactttccttaaacagaargggaaggaggaaacaggcagatggggaaaagatgttgacggcgctatatttccacttcaggaagacaaaaccaccttttattaagtctccaccactaccaccayctcccacatgagccaaaatttaagtcttttttaaagagattgaatgtagacgttagtgtgtgaagaggttgggttgatggtttctggctcttatgtaaattcgagtctcagctagcatcacagatggtttagggagacaagcaaaaaagtggataaaggagaggctttaaacaatgcgttcgtgttgtgatctctttgtaatacaaagttttctatttcttttttttaattgattggaaagtagcagtaatgcaagtaatcttcactattacacttagcagcaagtcctctgaaagacatctgttttctgtaaatattttgtgccttactcaagactgggacaggtaaatagctgtgatcagctggaaagtagagccagtggcgggggtcgtcctcactgagccagggaggggaggaggcaggagccaccaagtctacaaactgaaaaasagtagaggaaaaatgaggtacagtactaactgagaaaataggggtggaaagatttaccttgcactgcttatttccccttggcaaaaggagcagagttaggggccatgaagtaggggacacatggtttccaataattgctcttatgtaccagacaccatgctacatttttttttttttgtaaaaacagggtcttgctgttgctcaggctggagtgcactgaggcgatcacagctcactgcagccttgaacttctgggctcaagcaatcctttccatctcagcctcctgaatagctagaactacaggggtgtgccaccatgcccagcatatttatttctatttttgtagagagaggcgtcttgctatgttgcccagggtagtctcaaactcctggcctcaaacartcttcccatcttggcctcacaaagtgctgggattggcgtggtgtctcacacctgtaatcctagcactttgggaggctgaggcagacggatcacctgaggtcaggagttcgagaccagcctggcaacaaagtgaaaccccgtctctactaaaaaatacaaaaattagctgggcattgtggcgcccatctgtaatcccagctactcgggaggctgaggcaggagaatcgcttgaaccggggaggcagagattgcagtgagccgagattgtgccactgcactccagcctgggcaacagaatgagactctgtctcaaaaaaaaaaaaaacaaatgaacaaaaaacgaagtgctgggattccaggtgtgaaccaccacacttgacctacatactttgatatatattctcattttttcttacaatcatcaaatgaaacaaaaccttctctttgacaaatgaaacagcccaagaagttaagtgactgcccacatggtaggcaaaggtactctcaaaaagcagtctaaaagcccttgcttttcaccactaagctgttcacctttttattattaattaaattaataatttaattattatgaattaaatggttgagttaaaagtaggcattggctcatttgcaaaacattgaaagaaactgagacccaaaacaaaacaaaaaaaacaaaacaaaaaaaaaaaccctgcaagtcaagtttcaggcctcatttcaaaggaaggttacatcccctttcgtcatctataaaatggcctcccagtgcagcccaacactcctacccataattaaatctccttattccacttttagttcccaaggattttttactcatgtsctgctctttccctgctgccccctttttagtcttttgttcttgagccactgctttgaactgcatcttaattatgccctcatgggccaaaccccatctgtgaccctgctccagtgggtttcagcaaaggatactctccatccatattctgagggctccagggcctggagccagtcatccaggaggtcatccaaaggagtggaatccattggttctaagactcttcattccctgcctaggaaggaacagcygagttggaggaacatgcactcgattcagaccntcccttttcacccagtgaaagctaaacctctgcaaagtggggagaagtagggctaagcctaccagtcataaaaagaaccaggaatagaaaacacacccctcagcccctctgccctgcagaggctggctgggaggatcccaggaatgcagggctcttctccactgcctgatctgggcatcccaggagtgatggctgtacctcctgttcttgtttggtgtttcagggtgaagccygggctgtcactgtgccctggcaacaacatgtatgagtcagactgaggtcaaggtgaaggaacacagctcactgcttatcacagtgaatcaggagcctagatagggattccccaaggatgacataggatcaatgccctcaatccaacagaaaaagtaaatcttcaaatcagattaaacaccaaacttcccacctccctaatattctttcttctgggaaggataacttagatatattccaacaccctcataaatcaagatataaaagacaatatttgacttccctttaaaataattctaccatttcacagtttgtatgtatgyatgtaaacttacatgtaattagctaagtatgttgcaattagctaagccagctggaatcatgaggagatagtgaaaatgtttgctaggaaaacaacctcattaacaaacgtagagcttttaagagttttgttggctgggcatggtggctcacacctgtaatcccagcactttgggaggccgaggtgggtggattacctcaggtcaggagtttgagaccagcctggccaacacagcgaaaccctgtctcaactaaaaatacaaaaattagccaggtgtggtggcrcatgcctgtaatcccagctactcaggaggctgaggcaagagaatcacttgaacagaggttgcagtgagctgagattgcgccattgcactccagcctaggcaacaagaaagaaactgtctcaaaaaaaaaaagtttttttgttgttgtttttaggagacagtctcactatgttgcccaggctggcctcaaactcctgggctcaagtgatcctcccaagtagctgggactacaggcgcaccactgcatctgtaaaaagtcttaagggcggccgggcgcagtggctcatgcctgtaatcccagcactttgggaggccgaggtgggtggatcatttgaggtcaggagttccagaacagcctggacaatatggtgaaaccccacctctattaaaaatacaaaaatcagccaggcgtggtggcgggcacctgtagtcccagctactcgggaggctgaggcaggagaataacttgaacccaggaggcagaggttgcagtgggccaagattgcgccactgtactctagcccgggagagagcgagactccatcttaaaaaaaaaaaaaatactcttaagagctaggtgtataagttccatttgagaaatctcagaaacttatttttggggctagatttttggagaatttgttttaggaatgctgcaactttgtcagagtgctcagattttagtatatttccatcacctgacattgaactaaagccacttggctgamacctttgttgtgaccacccacaactgcacttacttgaggacctggtgcagaaagcactggtagccaggtgtgcacttgccataatctatctgcttttgccaccaatagagaataactttgtctctacttcccacctgcagggaagtatacaatttcccacaaagtgtgattatactgtagtcgtcaaagcagataacaactcatcccacactcccttaatccccagcctgattttcaaactcacctggcatagcaaggttctgtgctaactcctacactcactgtctgtatcctagaggacaaagaatcttcacacatctcctttctggggaagcaggttctgcagatgaaaagggtattaggataaaaaccagctggctacactgtgcctctcagccactaccaccaccaagatcctgacaacagacacaagttgcattttgactttttttctcaaagcatgatctgcaagccgtctgcatgggtagcacctgggggccttgataatgaccccactttagacctatcgaattatcgtttttggagcctacatcttaaagagcttccaaggttattttgaacatttttattatggaaattttcaaatatacattgaagtaagaagtatggggtaataccttaccacgcaaagtatggtcgtaggaccagctacctcaccatcagctgggggcttgttagaagggcagaatcttgggccgcaaccgcaacccagacatcccgaatcagaatctgcatttagcaggtcctcaggtggttagtgtgcaaattaaaccttgagaagcacagatatgatggaccctcctgcccccatcactcaacagtcagggtcaatcttgtatcatcaataccttcccccagcacaggattatttaaaagcaaatccctaacattaggaatgtctttttgtttgtttcactctaatgcccaggctggagtgcagtggcgcaacctctgtctcccgagttcaagcagttctcatgcctcagcctcccaagtagctgggattacaggtgtgtgccaccacaaccggctaaattttgtatttttagtagagacggggtttcatcatgttggccaggctggttttgaacccctgacctcatgtaatctgcccgcctcggcctcccaaagtgctgggattacaggtgtgggccaacgcgtccggccaataatttataaatatcacctcgtcaatgttcaaattttcattaataaccaatctttgaggtcctctggattgcgataaggattataccaagatgatttaattcctccactttccctgcaacggaatttctttttacccacgtgagctagagtctctgagatgctgcacactaaaagaaacaccaaacaaagctcttggaaggggctaatgcctctcagcataaacacacacacccgtctcgccccaacacttgccacgccggcagcaaacgctccatctcccgtggaaggccagcaaaacttagaagaaaacgtccgcgaaaacggcacgagaaagaagcgaagaaaatgaaacgcttacaacaccctccacccaaaataatctctcctagtattaccctagtgaatggacatcactagtaaggcgcggtttaaatctcccggggttcgtggggctgagggaacgaggaaaacagaaagggtgtggagattggtgagagggagagccaatgatgcgccaggctccccgtgaggcggagcttaccccgcagcctgcctaacgctggtgggccaaacactatcctgctctggctatggggcggggcaagtcttaccatttccagagcaagcacacgcccccaggtgatctgcgagcccaacgataggccatgaggccctgggcgcgcgcgcggagattggctgacgcagcttagaggcgagcggggataggttactgggctggcggaaggtttgaatggtcracgcctgcggctgttgatattcttgctcagaggccgtaactttggccttctgctcagggaagactctgagtccgacgttggcctacccagtcggaaggcagagctgcaatctagttaactacctcctttcccctagatttcctttcattctgctcaagtcttcgcckgtgtccgatccctatctactttctctcctcttgtaggcaagcctcagactccaggcttgaggtaagtccgcagccgtctccgccacggaatcacggagaccccattgtcccccttagggtccagtcgggcccccacagacagaggttgggagggccgaatggggactatcgcgagttacgagacccgggttctttctagtcaggagtctcgagctgtgtggcgtggaacaagtcaaaatcctctcttcattccatctttaaggtcctaaggttgcctctcgtcggtgaattcaggttctaaccttaagccaggctgtgaatcacccttcggggttgcccctcttccagtgttgattcgcctggctggaaagggtggaggagtttaggaaagctgagggaactgtgatgtaccgatttagatgacgttttcctcctagctaggttttgtttttctcctggtgagaattcgaagaccatgtctacggaactcttctcatccacaagagaggaaggaagctctggctcaggacccagttttaggtctaatcaaaggaaaatgttaaacctgctcctggagagagacacttcctttaccgtctgtccagatgtccctagaactccagtgggcaaatttcttggtgattctgcaaacctaagcattttgtctgggtaaatatacttttatttttacactgtattgcctttgctatttccaaacagttgggtttgtttgttggtttgttttcaattatcccggctcaaaggtcaggctttaagtctcaactctgcccttgactgtgtaacccttttgagtctcaccttcttttctgtgacaagaaataatctcagccaggcgaggtggctcatgcctgtaatctccgcactttgggaggccaaggagggcggatcgcctgagtctaggagttcaagaccagcctgggcaacatggcaagacgccgtctctacaaaaaatattaaaagttagctgagtgtggtggtgtgcacctatagtcccagcaactcgggaggctgaggtgggaggattgcttgagcccgggaggtggaggctgcagttagccaagatcgcctcactgcacttcagcctgggaaacagagtgagactctatctcaaaaagaaaagaaaagacaaagaaataataatcgcttcctatcttactaggatcttgtgagaatcaaatgatgtgataactgggaaaagtctttgaaaaccgctgcattacgagtcggtcactttattagtattaatattagtgttattgcagttgtactttgaattctgatcataccatgtctcaactagcaaagagaagtagtacctgagaaaaactagggaccccagggagaaatcaagcctgtgttcatagtgctcaggaccgggaatgtggagtcaagatccccctcggccaataaactctgggcctcatttaaaaaaaaaaaaattatctgtttcagtatgttggtaaggagaaaataaagtacagattatggtagtgggagatttttctcagcccagtctgatatatttcccaaaagcaattagatttatttggacactgttcagatgatctgatagtcattaaggggtgtttcaaatgaacaggcttggccaggcgttgtggctcacacctgtaatcccagcactttggaaggccgaggtgggtggatcacctgaggttaggagtttaagaccagcctggctgacatggtgaagccccatctctactacaaatacaaaaattagctgggcgtggtggcaggcgcctgtgatcccagctatttgggaggctgaggcaggagaatcgcttgaacccgggaggcggaggttgcagtgagccaagatcgtgccactgcacttgagctgsggggacagagcaagactccactgcaaaaaaaaaaaaaaaaaaaaaagaagaggatgacatgatctttgacttttaaggatataataatctaatgggaatttcgatgtactattatgtctcaacagaggaaccccaaaaygttgcctcgatctttcgaatcttagcagtggggagataactgccactcagcttaccacttctgcagaccttgatgaaactggtagggagaagggagataaaggcctcaaagggaagaataacttttaagggagaaaacagggaaggaggatagagacggaaggtggtgaaagtataaaaagaatctgcctagagagatggaattttgtgggtaactagaggatttttgagaatgattaagccaatgggaagagaaagataataacactaataggagctactttgcatatgaaaatgttagacaagtaggaatatattttgttgactgattaatggtgggaatgaaagtatagtcattaggatatgagaagttttgtgcctcagtctaatctcagcagaggcaaagaaaccagcataaagaaatatgttgttggccaggtgcagtggctcatgcctgtaatcccagcactttgggagggcaaggcgggcgggtcacgaggtcaagagatcgagaccatcctggccaacatggtgaaaccccatctctactaaaaatacaaaagttagtttggcatggtggcacgtgcctgtaggcccagctactggggaggctgaggcaggagaatctcttgaacccgggaggcggaggttgcagtgagccaagatagcaccaatgcactcccgcctggcgacagagcgagactgcatctcaaaaaaaaagaaatatgttgtcaactaatttttatatgttttatatgaaatattccaaaaggaatgtttcataagttaaccttccagaattctaatttcagattttctgagtgataacctttcttttctacccataagaaaaaaaaaaactccataggtagcatagtgtagtgtttcccaacacttgatttcttttagtgacacatataaattcttacgtttctgtgaaattgtaccttgtaccatgaaatgggtaccaatcgagaggctttgtattcaaaagctcagtccttgaaattaatacggcttactggtaatgaagaaaatctgaaggaaaaacaggatgcatggacaagaataactccttttactgattctttatatttgattgcaggtcacctggattcttcaggacttcaggaagtgcatttagctgggatgtaagttctgttgttaaatgaaccccacacaaaagccttttagcactggtcatagagattttatcctgtgcagactctgcagagtacaaaacctttcatactgggtataagtgggctttgaggcctagttccttaccttgaacagtttctaagttttccacatctaaatagtgttgtgaaaatgaaggctattcattttaaccatcataatcagaagtatctataaggaaatgaaggaaaatggtatactacacttatgtataggcttttatttgtatgtgaaaggtgctgtatcttagtaattgaaagtacagagtggccggacacggtggcttacatctgtaatcccagcactttgggaggccaaggcaggcggatcagttgaggtcagcagttcaagaccagcctgcccaacatggtgaaaccccgtctctactaaaaatacaaaaattagctggatgtggtggcacatgcctgtaatcgcagctacttcggaggttgaggtaggagaattacttgagcccaggaggcggaggttgcagtgagccaagactgcgccactgccctccagcctgggcgacagagcgagactccgtctcagaaaaaaaaaaaaaaagaaagtacagagtataagctctggaatcagtgtgtggattcctggcttactacttcattcaccagttgtgactctgacaagttttttttaacttcattggaccttaattttttttatttgtaacgtggagacaataatagcatttctcataaagtagctattgtaaggagtaaataaactgtgtatctagcacataccaagcattttacttatgtatttatttttatttttgagatggagtctggctctgttgccaaggatggagtgcagtggtgccatcttgacttactgcaacctctgcctccctgggttcaagcgattctcctgcctcagcctcccgagtagctgggattacaggcgtccaccaccacgcccggctaatttttgtattttagtaatacaaaaatggaggcttcaccatgttggccaggctggtcttgaactcctgacctcaagtgatcagcgccccacccccacccaccccttggcctcccaaagtcctgggattacagatgtgagtcactgggcccagcttgaattgctttaaatgctctaacccagatagataatgaaatccatggagggaggatagaaattaatttttttttttttttgagatggagtctcgctctgttgccaggatggagtgcagtggtgcgattttggctcactacaacctccgcctcccgggttcaagtgattctcctgcctcggactcctgagaggctgggactacaggcacatgccacgacgcccagctaatttttgtatttttagtagagacagggtttcaccatgttggccaggacggtctctatctcttgacctcgtgatccgcccgccttggcctcccaaagtgctggaattacaagcatgagcccccgcgcccagccttttttttttttttttttttttgagacggagttttgctcttgttgcctaggcttaagtgcaatggcgcgatctcggctcaccacaacctctccctcccgggttcaagcgattctcctgcctcaggctcccaagtagctgggattacaggcatgcgccaccatgcctggctaattttgtatttttagtagagacgggtttctctgtgttggtcaggctggttgcgaactcccaacctcaggtgatccgcctgcctcgaactcccaaagtgctgggattacaggcgtgggccacagcgccccgccagaaattaaatttttttaaaaagttagccccggccgggtgcggtggctcacatctgtaatcccagaagtttgggaggctgaggcgggcggatcacgaggtcaggagatcaagaccgtcctggctaacacggtgaaaccccatctctactaaaaatacaaaaaattagctgaatgtggttgcaggcgcctgtagtcccagctactcaggaggctgaggcaggagaatggcgtgaaaccgggaggcagagcttgctgtgagccgaggtcgtgccactccagcctgagtgacagagccagattccgtctcaaaaaaaaaaaattagccccaatacactgtgctggaaaattagtaaattgtaaattgtataaaactcgttcatctttggaacatgttatatggttatgcaggcaaaatgagggtcttatccccaggatgtcacttgagtcttgatatttaccacagagaataccctatgtattgttgttggaagagacatatcaactaggaatagggctcctagaatgaaatagaaaaatgttgggatgcaccaatccactgaagaataatcaaacagtatttgggactaacctgacaggcagtttgttttaatctgcaggaatcatgaccagcacctaatgaaatgtagcccagtgagtagcctctctttttttgggttttgttttgcttttcaggtgggaggcagagggtttccattgcacctgtggcttgaggatgctggacgttctcagcaaactctcttttttaggcacagcttctttgtagcactccgaatggtttggaccgtggccatagaaagagagatgcaatgtgtagttcatctgcaaataaagaaaatgtgagtgtttaatggaaacctagatatattggcagttttattttttgagtgaagaaacttggtatcatantgagacatagaactgtttatacctcgtatgctagacaaggaaactgtattactataggggagaaaatttctttgtttttgttttttcttattaaagtttggccctaggacagacacccagctccaaatcttccacagtaggtcatcattatttctcatgttcagttgatcattttgaggacaaaaattacccttactgtagtgtaagggatttaggagttttttgtttgtttgtttgtttgttttaacaggtagggataacttgcataacttgttcatggatttttttttaccactttacatgcaagtgtagattaatttcttatttcccccttagtctagcttttaagcccttattccgaggaggccatggtactttttatctaaaccttaggccatccgtcgttccaagttaaatctagcctctccggagccacctcatcactaagatarttctgtatctaatccctcatctaagccccttttctagacatcgttttttcttccctgcctcccatccctttccccaaatcattaccataaaagatagctgctcttcttttcttacattgacttaagataaactcatgttttcggctgttcttatcagttttttcttgatttaatactgtccttctaatctccatttataatcactttttattcatttatttttgaaactgagtctcgctccatcgcccaggctggagtgcagtggtgcaatctcagctcactacaacctctgcctcccgggttcaagtgattcttgttcctcagcctgccaaatagctgagactgtaggcacgtgccaccacggcccagctaatttttgtgtttttagtagagacggggttttgtcttattggccaagctggtctcaaactcctgacctcaagtgatccacctgcctcggcctctcaaagggctgagattacaggtgtgagccactgcctggcctataatcacttttttttctttttttttggtgagacagagttttgctcttgttccccagggtggagtgcagtggtgcaatctcggctcactgcaacctctacctcctgggttcaagcgattttcctgcctcagcctcccacgtagctgggattacaggtgcgtgccaccacacccagctaatttttgtatttttagtagagacagggtttcaccatgttgaccaggatggtcttgatctcctgacctcgtagtctgccctcctctgccccccaaagtgctgggattacagccgtgagccaccatgcccgacagcatcaatatttttaaagtttttttttttcctctccctagaaataagggtctcactatgttgcctaggcaaatcttgaactcctgggctcaagccttaaggttttgatactttctccgattcatttctaaaaaagttacaagaatttacattttcattagcaatccaaatctcatagaatttacttatttatttatttatttattttgagacagagtctcactctgtcacccaggctggagtgcagtggcgcagtctcagctcactgcaaccgctgcctccctggttcaagcaattctcctgtctcagcctcctgagtagctggaactacaggcgcatgctgccacgcccagctaattttttgtattttagtagagatggggtttcaccatcttgcccaggctggtcttgaacttctgagctcaggcaatccacttgcctcagcctcccaaaatgctaggattacaggtgtgagccaccctgcccagtcttctcatggaatttgttttttttttttttttgagatggaatcttgctctgttgtccaggctggagtgcagtgggacaatctcagctcactgcaacctctgcctcccgggttcaagagattctcttgcctcagcctcctgagcagctgggactacaggcgtgtggcaccacgcccagctaatttttgtatttttagtagagacggggtttcaccatattggccaggctgatttgaactcctgaccttgtgatccacccacctcggcctcccaaagtgctgggattacaggcatgagccaccatacctggacttctcatggaattttttaaaaaattactttctgctgagcagtctagtttgagggaaaatgctaattaggccagatgttgtggctcatccctgtaatcccagcactctgggaggctgaggtgagaggattgcttgagtccaggactttgagttccctagctggggaacacagcaagaccacatctctaccccaccccccaaccaaaaaaaagaaatggctgggacttggtggtgcatgcctgtagtctcaggtactctggaggccaaggcaagaggatcgcctcggcccaagagcctgaggctccagtgagttataattgggaggattgcttgagcacaggagtctggggctgcagtcagctgagatggagactcagtctcaaataaataatacacacacacatacatacatggtaaaatagtttattttatgttaaaaataattagcaggccaggcatggtggctcatgcctgtaatcccaccgctttgggaggctgaggcaggtggatcacctgaggccaggatttgagaccagcttggccaacatggcaaaaccctgtctctactaaaaatacaaaaattagccaggcgtggtggcacctggctgagaaacaagaatggcttgaacctgggaggcagaggttgcaatgagctgagattacaccactgcactccagtgcagtgaatggacaggtgacaaagtgagactgtctcaaaaaaaaaaggaaaaaaaaataaaaataaaaataattagtagtggctgggtgcagtggctcacacctgtaatcccagcactttgggaggctgaggcaggctgatcacttgaggtcaggagttccagactagcctgggcaacatggtgaaaccccatctctactgaaaaaaaaatatgaaaattagccagggccgggcgcggtggctcacgcctgtaattccagcactttgggaggccgaggtgggcggatcacgaggtcaggagatcgagaccattctggctaacatggtgaaaccccgtctctactaaaaatagaaaaaattagccgggcatggtggcgggtgcctgtagtcccagctactctggaggctgaggcaggagaatggcgtgaacccgggaggcggagcttgcagtgagccgagatcgtgccactgtactccagtctgggcgacagagcgagactccatctcaaaaaaaaaaaaaaaaaaaaaaaaaaaaaaaattagccgggcgtggtggcaggcatctgtaatcccagctacccaagacgctgaggcaggagaatcacttgaacccaggaggcagaggtttcagtaagccgagactgcaccactgcactccagcctgggcgacagagcgagactctgtctcaaataataataattataggccgggtgctgtggctcacgcctgtaatcccatcactttgggaggccgaggcaggcggatcacaaggtcaggagatcgagaccatcctggctaacatggtgaaaccctgtctctactaaaagtacaaaaaattagccagtcgtggtggcgggcgcctgtagtcccagctactccggaggctgaagtaggagaatggcgtgaacccgggaggcggagcttgcagtgagccaagatcgcgccactgcactccagcctgggcgacaaagcatgtctctgtatcaaaaaataaaataaaataataataataattagtagtgatttcatgtgattattatccatgcgtaatttctctagtgtcttttgtgcccttataatactggggtcttaacttacccaggcattgacttgcctttcatagaccatggactccagagatttggattattatttctaatctcaaccctgagggaaagctattttaacatattctatcctatgaagataaagttgatcatggttttttttttttttttttttttttttttgagacagagtcttgctctgtcaccaggctggagtgcagtggtgcgatctcagctcactgcaacctctgcctcctgggttcaagcaattccactgcctcagcctccccagtagctgggactataggcgtgcaccaccacacccagctaattttttgtattttagtagagacggggtttcaccatgttggccaggatgctctcgatctcctgacctcgtgatccacctgcctcggcctcccaaagtgctgggattacaggcatgagccaccgcgcctggccactaagttgatcatgttttatttaggtttttggtttctaggatggagggaagacctggagtatgttcaattattggatagtcttatatgtgattttttttaattgcagtaaaatgtacataatatttacaattttaactatttgtgagtgtgcagtctagtgacagtaagtatattaataatgtgagactatcaccagaactcatttccagaattttttcattattcaaaacagaagctgtatacccttaagtgataactccccatccctgtttctgcccagccaatgataacctctattttctgtgtcagtgaatttgactattctagatacctcatatgagtagaataatattatattttgtcctttcatgtgtgtgtgtgaggtctcactctgtcacctctgctggagtacagtggcacaatcataactcactgcagcctcaaactcccgggctctgattattctcccacctcagcctaccaagtaggtgggactgcaagtgtgtgccactatgcctggctacttttttttttttttttttttttttttttgagacagagtctcactctgtcacccaggctggagtgcagtggtgcaatcttgactcactgcaacctttatctcccaggttcaggtgattcttatgccttaacctccctagtagctgggattacaracrtgtgctaccatgcctggtgaatttttttgtatttttagtagagacggagtttcaccatgttggccaggctggtcttaaactcctggcctcatgtgatctgcccacctcaacctaatttttttgtatattttgtagaatcagggttttgccatgttgcccaggctggtctcaaactcctgggttcaagagatccatctgcttcagcctcccatagtgctggggttacaggtgtgagccactgcgtccagcctatattttcatttagcgtaatgtcttcaaagttcatctatgtcatagcatgtattagaatttcatttcttttgtatgyatatatcatattttgtttatccattcatctgttgatggacattttgagttgtttccaaccttttggccattgtgagtaatgccgttatgaacataggtgtacaaaatctgcttgagtccttgcttttattttattttgtgtattttttttttccaagatggagtctttgccctgtcacccaggctggagtgcagtggaacgatcacagctcactgcaacttccacctccctggttcaagcagttctcctgcctcagcctcccaagtagctgggattacaggcacatgctaccatgcccggctaatttttgtatttttagtagagatggggtttcaacatgttggccaggctgctctcgaactcctgacctcgtgatctgctggcctcggcctcccgaagtactgggattacaggcgtgagctactgcgcccggcccctgcttttaattcttttgggtatatattcagaagtagaattgcttgattacatgataattctacatttaattttttgaggaactgccatgctattatccatagaatgcctctgcacccttttacattcccaccagcaatgcacaaacacttgttatttcttataatggctatcctaatgggtataaagaagtatctcttgcaattttcatatgcatttccataatgattactttgttgagcatcttttgatgtgcttatgggccatttgtatatcttctttggagaaatgtctattcatgtcccttttgattgttattgttgttgttactgagttgtaggagttccttatatattctgatattaatctctcatcaaatataagacttgcaaatgttttctcccattttgtgggttgccttttcattcccttaatggtgttctttgatgcacaaaagttttccattttgatraagaccaatttatctgtttttttctttcgttacctgtgcttttggtggcattatccaaatccagtgtcatgaattttttcccttatcttttcttctaagagttttatagttttagctcttacatttagaactttgatatattttgaatagtttttaatgttgtcaatatacttgacaggacaatggaaacttggtggacagtgaaatgaaatatttgggcagtcccattactactgttccaaaattggataaaaatccaaacctaggagaagaccaggcagaagagatttcagatgaattaatggagttttccctgaaagatcaagaagcaaaggtaaagtgttctgtggtagtatctttgtattcttcatatkccttcattctgttaaaagaagaactagacaaattaaacttaggagagtttatttgagcaaaaaaataactagtgaatccagcaaccctcatagccagaacatgttcagtaaaactccagtttgccatgtggtcaggcagtattatggacagaaaatggaaatgaagtacagaaaatagaagtgaggtacagagacagcccagttggttgcagccttgagtttgccttatttgaacatggtttaaacagttgattgcttgtggttgactgaagctcagctgctgtgctttcctgagactcagctttttgatacaaaagtatacttctaaattaggctttcagttagtttaagtactaagttaggttgcaacttggtatataaagactcaagtacagaggcatccccaggccaaatttagtttaattaagaattcattcttcttttttttgttgtttgttttttttaagacagattctcgctctgtcgcctaggctggagtgcagtggcgccatcttggctcactgcgacctcctcttcccaggttcaagcgattctcctgcctcagcctctcgagtagctgggattacaggtgtgcaccaccacacccgggtaatttttagtatttttagtagagacagggtttcaccatrttggccaggctggtcttaaactcctggcctcaggtgatctacccacctcaggcttccaaagtgctgggattgcaagcgtgagccaccatgcccagccaacaattcattcttgaataaacattttatgcctgatatgtatgagtcactctactaaatgctagagctacagagatcaacaagatgtgataacctatctttatttatttatttatttttgagatggagtcttgctgtgtcacctaggctggagtgcagtggtggtatctcagctcactgcaacctccgtctcctgggtttaagtgattctcttgcctcagcctcccaaagcacgccatcatgcctggctaattttttgtaattttagtagagacggggttttgccatgttggccagactggtctcgaactcctgacctcaagtgatctgcccgccttggcctcccaaagagctgggattacaggcatgagccaccacgcctggcgtaacctatctttagactgtagggttacctgactgataggttatcaggtcactacagaaatcttcttactgctggtgaacaggttccagtcaatagtttgagtggatcaccatcaaagtaatctaggataagtaatgtctccaggataatggtaatgtataaatgtatagaatatacctaacattacttttcaggtattttataatacagtcttttgtttccttttttctttcccatatcactgatagatatacctgaagcatgtgggttatagcctatatgctgatatgccaaagatagtttctgaggcatttagctttttttggtttttggtttttggttttttttttttttttttttttttttagatagacagggtctttctctgtagcccaggctggggtacgtggcacaattaaagttcactgcagcctcaatctccccaggctctggcagtcctcccacctcagcctccaagtagctgggactataggcacatgccatcatacctggctaattttttgtattttttgtagcgatgtggtttcacaatattgcccaggctagtctcaaactcctggactcaagtgattcacacaccttggcctcccaaagtgctgggattacaggcatgagctaccatgcctggcctacatttagcatttctaaatcaactttgttgctttgaaacaagtagggctatgggtttgtctttaaaatttattcatttcacaaggccagtatggtatagtggagttagaacagttgcattctagtcctcatgcttttattttttttaattatttaattaattagatagggtcttgctctgctctgtcacccagactggagtgcagtgttgaactcctgggctcaagtaatcctcccacctcagcctcctgagtagctaggactataggtgcataccaccatgcccagctaatttttaaaattttttgtagagatggggtcttgatgtgttgcccaagctggtttggaactcctgcgctccagcaatcctcttgcctttgttgcgggatctttagggtgttgcttttctggccagaaacctttctgcccagtggtgcctttgcctgagttgttgtcctgcgtcgaggtaagcagacaagtrgagggttagcaagacgaagagaagctttattgagtgttagaacagctcagaggagacccacagggggcagctcctctctgtaggcagtttgtcttatcccgtattcagctctcagcagagaggaggccctggagtgggtggctcctctctgcaggcaggtcctccctgttgatttcccagctttcagcagacagcatagctcctctctcctctttggttgtctgatcttttctccatcctctaccctgctctggctgagcctgggccttttatggacctcagaggggagaaagtgcttcctgattggttcatggactgtgagaaaaggcagcacaaatccccatccagtgggtgggactagcagccyggtccccagcctttaagccctccccgtcctgaaggtggggacttacaggaacctcccttctacccaggagcctgtctgtctctctcagcagtccatggcaccaggctgctcacaccaaggtgcacctaaaggccagcactgaccaccctcagtccctacttggcttcccctcttttgcttctccgtgcccaaattctagagggggtcaaggtggcagggtgctgccctgagggtgcacacacagatccgcccccggactgtaacagcacctggacttgccccaaccccactctgagattggagtgggtgccaagagcagagagaagtggggatatgggggtggtggggaggccttcctgggcccccaagggtgcaggctgcagagactattaggtcctgcacctgggagggcagctgcagctgcacccgggaaggcagggatcctgcctgctcccggcccccacaagaccacagggaggctcggatctgcagccacaacttgggcggctgcaagcccacccaggagggcagggcttctgcctgctccgtggaacaggaggcccaggttaacagctgcagtttgtgtagctccagcagcaccaggggagctcctgccccaactcagaaggggaagggctcccgctagctccatggatcatgcagccctatccatacctctctgctgcagccagtttgatgacagcagcaagccctctggagttgcagctgccaacaccttggcctctcaaagtgctggaattacaagtgtgagccaccgtatccagcctcattcttttatttacttggtggtatgactgttcacaagacaaccacttgacctcagtttttaatttataaaatggagagcatgataaaacaactacctccttaataggcttgttgtaaataaaatattaaaagcagtttatgtcctcatcacatacacacaaatggtaactgtgtgatgaaggatgtgttaatgaatttcattgtggtaatcctcatgtaatatatacgtaaatcattatattgtactccttaagtatatacaaattttatcatttatacctccataaaatagaaaaaaaaatttaaagagcagtttgtaatacagtagtcctctgttatccacagagaatacattctgagaccccccagtggatgcctaaaattgcagacagtactgaaccctatatataccatgcttttccctatgcatatgtacckgtgatggagttttttacttaggcatagtaagagattaacaataataactaataataaaatagaacaattacaacaacatactataataaaaattataggaggctgggcgtggtggtttatgcctgtaatcccagcacactgggaggccgaagcgggtggtcaggagtttgagagctgcctggccaacatggtgaaactccatctctactaaaaatacaaaaattagctgggcgtggtggtgagcatctgtaaccccagctactgggctggctgaggcagtagaatcgcttgaacttaaacccaggtggcagaggctgcagtgagccgagatcgcaccgctgtactccagcctgggcaacagagtgagactctaactcaaaaaaaaaaaaaaaaaaaagtgctggctgggcatggtgagtcaggcctgtaatcccagcactttaggaggttgagatgggcagatcacctgaagccaggagtttgagaccagcttggccaacatggtgaaaccctgtctctattaaaaataccaaaaaaaaaaaaaaaattagccaggtgtggtggcgggcacctgtaatcccagctacccaggaggctgaggcaggagaatcgcttgaacctaggaggcagaggttgcagtgagccaagatcgctccattgcactccagcctgggcaacaagagtgaaactctgtctcaaaaaaaaaaaaaaaaaaaaaagtgctataggctgggagcggtgactcacacctgtaatcccagaactttgggaggtcaaggtgggtggatcacctgaggtcaggatttctagaccagcctggccaacagtatgaaaccttggctctactaaaaatacaaaaattagctgggtgtggtggcaggtgcctgtaatgccagctacttgggaggcttaggcaggagaatcacttgaacccaggaggtggaggttgcattgagccaagatcacaccgttgcactctagcctgggcaacagaatgagactccatctcaaaaaaaaaaaaaggtgctatgaatgacaggacgatttgaataaaggacagcactttgagaggccaaggcaggtggatcacctgaggtcaggagtttgagaccagcctgaccaacatgttgaagcctcgtctctattaaaaatacaaaaatttagctgggcatggtgttgggcacctgtaatcccagctactcaggaggctgacacaggagaattgcctgaacccaggaggcagaggttgcagtaagctgagattgtgccgctgcactccagcctgggtgcgacagagcaagactccatctcaaaaaaaaaaaaaaaagaaagaaagaaagaaagaaagaaagaaagaaaaagggacataggtgtttgggaggatattatttttgactttaccctgagtaactggagaaatggtgacaacagtataatgaatttgaaaagaagggtggattcagcgggaatagatgtgttctgttttggacattgagttatagatgctaaggaggaaatttagatggaaatactaaatgaggagttgaagctatcaggatgagaaatgtacatttctggggcagctgtatagaggagaaaatggaagctaatgactctaagtttaaagtgaagagaaaggctgggaagaaagagcagtagccactgtgggactgataatgaagtagacacatataggaataatattagccaggaatcagaaaggagagatctaggacacaaatacaggtggcacatttatatattaattctttttatacattttttgttatggtaaaacaaaatttacaattttaatcatttttaagcatacagtttagtggtattaagtgccttcattttattgtgagtgtacttacccatctctaggatttttttattaccccaagcagaaattctctctttttttttttttttttttttttgtgagatatagtcttgctctgtcgcccaagctggagtgcagtggcgcaattttgtctcactgcacctccacctcctgggttcaagtgattctcctgcctcagcctcccgcgtagctgggattccaggcatgccccaccgtggccrgctaattttttttgtatttttagtagagacaaggtttcaccatgttggccaggctggtcttgaatatctgacctcaggtgatctgccctcctcagcctcccaaagtgctgagattacaggtgagccactgcacctggcccccaagcagaaatgctgtaccccataaacaataactccccatcttctcccccttccccagcccctagtaaccactattctattttctgccctctatgagtttgctytaggtacctcatataaatggaattttatcatccttttatctctggcatatatctcatagtgtaatgttttcattggtaatcagtgttgtagcatgtatcagaatttcattctctttaaaaaaaatcagttttatgttaaattgtaaaatgcacataacctttatcatcataaccattttcaagtgtatagtttagtagtattacatacattcccattgttgtgtaaccaatctccagaactcttttaatcttggaaaactggcactctgtgcccataaaacaacttcccattttccccttctcccagcctctggcaaccaccattctactttctataaatttgattattctagatatctctgataagtggaatgatacagggtttttttgttttgtaactggcttatttcaactagcataatgtcctcaagctttatctatgttgtagcatgtatcataatttcattcctttttatggcagaataatattccattgtatgtatatatcacattttgtgacatttgggtttccatcttttggcaattgtgaatattgttgctataaaaattggtttacaaatatctgtttgtgtccttgctttcagttcttttacttttttggagacaggtctcactcagttgcccaggctgcagtgcagtgatgtgatcatggctcactgcagccttgaactctttggctccagcagtcctcccttctcagcctcccaagtgactgggattacaggtgtgagccaccacacctggccctgctttcagttctttagggtatatacccagaagtaaaattgctgggtcatatggttattctgtgtttaattttttaaggaactctcatactgttttcatagcaactgttcattttacattcccaccagcaatgcacaagggtctcagtttctccatatcatagccaacacttgttatttcctgattttgatactatccatctgatgactacgaaatggtatctcatcgtaattttaatttgcatttccctaatgattagggatgttgagcaccttttcatatgcttcctggccatttgtatatcttctttggagaagtgtctattcaagtcctttgcccattttttaattgagttgtttcttttgttgttgttgagttgtagttctttatatattctggatatcaatcccttatcagataaataatttgcaaatcttttttcctattccgttggttgcctattcactatgttgattgtgccctttgttgcaaaaaagtttttaattttgatgaagtctaatttatccactttttttgttgcttgtgcttttggtgtcatatctgagaaatcattgccagattcaatgtcatgtgcctcccccaaccccctcccctttttaaaagaaaatagtagggacagggtctcacccaggctggartatagtgatgcgatcacatagctcactgtaacttcaaactcctgccctcaagggatcctcccacctcagtgtccatagtagctagtactacaggcatgcaccaccacacctggctaatttattttttgtagagatagagatgaggtcttgctgtgttactcttctggtctcaaaattctggcctcaagcgatcctcttgcttcagcctcccaaggtgctgcgattacaggtgtgagccattgggctcagctccctatgttttctttaaagagttttatagttatagctcttaagtttaggtctttgattcatttcgagttaatgtgtgtatatggtataagagaaggctttaactttgctctttgggacaaagaacaaagcagtgttggctacaatatggagaaattgggacccttgtgcattgctggtgggaatgtaaaatccagttgtcccaccactaattgttgaaaaaactctcctttcttcattgaatggtcttggcacccttttcaaaaatcatttaactatatatgcaagaggttatttcttggctgtgttccattccattggtctatatgtctgtctttatgccagtgccacactgtttactgcagctttgtagtaagtcattttataaatctttaatttcacaaatcatccttgaatatattctcctttatggaaaagttaaaacataacagctaaggataactaaccctatctgaccaccattcgaagtccctattgaaggaaagggctcagtgggaaaagttaagagcatgtgagtcagtggagcgcagtggtctgagaagtagcctctggggccagactgcctggattcatagcttgactctgccacttttagatatatgactgtaggtgagtcatatgatctccttgtgttcaatttcttgggttgttgtcaggatcgaatgagttaattacacataaaacatgtagagcaatacttatcaattaatagtacttaactattattgtgtagtgtaagtgcttaattattgtagtatacractaaactatgtggagttatgaagaaggctgataggtgagggkatgctcaatggccttgatgtcctccgcaaagtaaacattgaagtaatctgatgattcagaggagagtgcgaggcgagagtcttaaaagtgtgtgaagaaggttataattgacttttggagactgtggaattactaaaagcctagtaagatgatatttgtaaggtcctatgagggcattatcaggtagacatgcatggcacttgttcgaagtgtcttcctacaagaatgttctggcctggaagcgagattggagactttggaactccagggatgatagtaagggttgaagattgccaatggtggatgaacaaggggttgaggaagaataggtatggtgaaggcagcagaaaagtcgacgatgattcaaagcctggctaaaaagccagatatcattaggtggactcagtaaagtaagagcagtaatgtgattgaaagttgctgagaaggtagaaagtggctggtttagaaagttttgagagctaggctgggagcagtggctcatgcctgtaatcctaacactttgggaggccgagacaggtggatcactggagatcaggagttcgagaccagcctggccaacatggtgaaacctcatctctactaaaaatacaaaaattagccgggtttggtggcaggtgcctgtaatcccagctacttgggaggctgaggcaggggaatcgcttgaacctgagaggtggaggttgcagatcacaccactgcactccagcctgggtgacagagcgagactccatctcaaaaaaaaaaaaaaaaaaattttgagagccaggggaggttttagttagtttgagggcatgccatgtttgagctcttgatagtataataatagatgatgattgcagttgtttttatttttatttttttattttgttttcttaaattcccctcacctccccccatcgcccttttattttgagacggagttttgctcttgttgcccaggctggagtgtgatggtgtgatctcggctcactgcaacttccgcctccagggttcaagagattctcctgcctcaacctcccaggtgggtaggattacaggtgcccaccaccacccccagctaattttttgtatttttagtagagatagggtttcaccatgttggccaggctggtcttgaactcctgatctcaggtgatccacctgctttggcctcccaaagtgctgggattacaggcgtgagccactgtgcccagtcaaatttcctgttttaagaatgaagtatttttatgtttttttttttttttaataccagtttgttgagagcctgatgtggagttctagagaagcttagtggaagtattgtgaagtcatgctctccaaagtgttgtcagtggacattgtaagaatgtggaaaatacaatgggttttagtattgaagacagtacagagactagaatggaaaggaaaaatgagggccacgcaataacaagagctcccatttattgactacttagagtatagtaggcaccatgtgctaagcagtatacatccataatcacatttcattctcatatccaccctgaaatatgactgttgtctccctttgaggggagcccattgggtcatgaggtaaggtgtgatacccatggttacatagttagaagcagcagagccagggtttaaactaagatctacctgaccccagagcctgtttttagcaattttcccaggtaattctgatatacactaaattttgagcgttatgttctataacatagtattaagtcctattttatttttaatttcattggtttgtgggaaaacaaaaccaagatacaatctgaagaaggcaggatgggtgttgggagaattgacagtgaccttcctaaaacataaaacagttttgaggacttgctgataatgggcagtagatctatagaaaaacagtgagttgggaatagtcggcatggggaaaaggtttctagggcttccgaaaaaaagagcaatgtaaaatgaagatttaggatcacttttacaaatatgttagtcttcacatttgcagaatgttgtaattaatatagttaagtctcagctggtattaacttagcaaattgaatttaatgttaatttaaaaaatccttttattttctatttcattgttgaaaacttgtctaagttatgttgatctgcttttatgaaattaagtacagtacagtgaacataattgaatctttctctggtgattgaagatctttcatagtctcagaaatatcattctgaattgcataatatagacagtatagaagcatggacttaaaatagattgaccccaggaaatattctggaacaggttttcccaacccgtgggccatggatcaacacaggtccatggcctgttaggaaccgggccgcacagtaggaagtaagaggtgggccaggccagcgagcattaacacctaagctctgcctcctgtcagatcagtggcagcattagattctcataggaggcaaactcttttgtgaactgcgcatgcgagggatctaggttgccggttccttgtgagaatctgagaatctaactaatgcctgatgatctgaggtgaaacagtttcatcctgaaaccatatccccacccagatccatggaaaaaaatgtcttccacaaaactggtccccagtatcaaaaaggctggggaccactgctctgaaagttttgtttaggtggaagagtggcatagggctatgagtatttatttgatttttgttttaagagacagggtcttctatattgtccaggctgatctcaaactcttgagctcaagtgttccccctgtcttggcctcccaaagtgcattttgatggtctttgaaaaatatttggacaatagagccttgacagaaaatttaaataattaaataaaaaatgttttaaaattgtccttttatgggctcattttcttagattgtaactcttatgcagtcattttctctttctttttttccttctttctctttttcttttttttttttttttttttgtggcagtctcagtctgtcttccaggctggagtgtagtggcgtgatcagggctcactgcaggtcacaacctcctgggctcaggcgattcttccatctcagcctcccgagtagctgggactacaggcacatgcaaccatgccaagctaatttttgtagagacaatttcaccatgttgcccaggctggtcttaactcctgggctcaagtgatctgcctgcctcaccctcccaaagtgctagggttacaggtgtgagctaccatgcatggccataaagtcatttttgattgatggcccatcctataagaatatgcatagcagtaggttttaggttacaaaagggatagggggctgggcacggtggctcatgcctgtaatcccagcactttgggaggccgaggcaggcagatcccttgaggtcaggagttcgagaccagcctggccaacatggcaaaaccccgtctctactaaaaatacaaaaattagccaggcatggtggcatgcacctgtaatcccagctactaaagagcccgaggaaggaaaatcacttgaacctgggaggcagagattgcagtgagctgagatcgtgccgctgcactccagcatgggcaacagagcgagactctgtctcaaaaaggaaaaaaaaaagaaaaggaatagggatttttttttgttactgttttacctctttgatgttaaatggaaaaaaaaaaaataggccaggcacattggctcacgcctgtaatcccagcactttgggaggctgaggtgggcagatcacctgaggtcaggaatttgagaccagcctggccaacatgatgaaaccccgtctttactaaaaatacacaaattagctgggcatggtggtatgcacctgtaatctcagctacttgggaggctgaggcaggagaattgcttgaacccgggaggtggagkttgcagggagccgagattgcgccactgcactcctgcctgggtgacagagtgagaccctgtctcaaaatataataataataataataataaacggaaataaatagatacttgtataaagcagtgacctccttggagattgtcgtaaccttagtgatttttcattcatttctttacttaaaaaatatttattgagtacttgctacatgttgggaagtrtgmtaggcactggtgatacgatggtgaacaaaacagactagaatttatattcttgtcagggatgcatcaaaacaacaaaaatttttttcaagttaatagatattctagttagagttcttggttgcaaataatagaaactgattctagtttcctcaagcagaaaagggatttttctggagggtactgaggaactcagaattacaaggaaggctggaaaacaaagtaaggcccagccaaaatactattccaggaacattgagctcaggatgccaccacttgctggctagacactcaatgccaccgttactggcaccctgccatggaacatgatcaggcttgctgctagatagactgtgctgctcatggatatttgctaccacctagtatattctctactgtgatgcagccaccataaaaagtctggaccaaccctttgctttttgagcttctttaaggttgaaaatcccaggcaggaatatctagttggtcacaagggcatggaaaagggaatatctgtctcccattggccacctcatgaggaggcaggactgcctctctaacttkagattttactgaaacagtatgttaggcagccaaattgtaaatgtctgccataacagacaaaataatttagattttgggctgggtgtggtggctcacacttgtaatcccaacattttgggagtctgaggcagaaggatagtttgagtcgacaagtttgagaccagcctaggcaacacagtaagcccccatcgctacaaaaaaataaaaattagccaggcatggtggtgtgcccctgtagtcctagctactccagaggctgaggtgggaggactgtttgagtccagcagttcaaggctacagtgagccatgatcatgcctgggcaatccagcctgggtgacagagcaagaccccatttctaataataataataataatttagtaattgcaaatagtccaagtgtaatgatggaaacaaaatgaggtctgaaatagaggctaacaaaaggaaatctttaaatggagaataataagggaagatctccacaagtgggagatatttggttaagaatcgggtgatgaactctctgtttgcctgggactagaatgttctaggatatggggcttccattgctaaagctgggaaagtcccggacaagctggtattaagttagggccactctaattgtgaaggaatcatatatgacaagagtagaggcaggagcatttcatgaagaaggaatgttgcaggtacagaggccccaggtggamaaggtcttcacatgttggagggactgagaagtcagtgaatgagaggagtgttatgtgagctgggaaagaataagtagtcaggaggtagatcacgcagggtctttaggctatggtgagtgtttggattctattctaagtacaatgagttgctactgaagggagggctttaggcaggggaataatatggtctgatttgttttgtgaagaccactcttgttgatggatggggaacagattagaaaggattaagagttggaagtcaacgggtggtttggctttcacctgtaatcctgtcaatttgagaggctgaggcaggagagttgcttgagctcagtagtttgagaccagtctaggcaacatagcaaaacctcatcactactaaaaataaaaaaatgttagttgcatgtggtagtgcatgcctgtagtcccagccacttgggaggcagagacagtaggattgcttgagcccaggaggtcaaggctgcagtgagccatgatcgtgccactgcattccagcctgggcaacaaagggagaccctgcctcaaaaaggagaaaaaaaaaaaaagagttggaagcaggtaagagtaggagccattgtgttagtcctagctacagttggtggtagcctgaactaaggtgttgactatggagacagagaaatggatgcattcaaaatatattttgtctgcctgcctcagcaacatgtctctacaaaaaaaaaaaaaaaaaaaaaaagccaggcatggtgtgtatgcctgtagtcccagctactcaggaggctgaggtgggaggatggcttgagcccaggggtttgaggctgcagtgaaccacgatcacaccactgctctccagcctgggcaacagagcaagaccctgtctcaaaaaaattaaaaaagtaaaaagatacatagatatatmtattttggatagagaatcaacaggacttgaagggttgggtgcaggctgtgaaggaaggatgagatcaaggatgactttagtcatatgcagtttgaagtgttttgttgtgaagagaaaacagatgctatcagaagaaaactgccttcttttctcaccagatacagcaatcaatctccttttatacccatataatctgcagtcgctcttgccacagagcacgaagtgtccctgctcctatctaaagcccttccttcacactgtgtcctattcattcattcattcatttattcactaatgccagagatacagtagtatctgagcttacattctagttatgaggaaacagacagacaaatacatttgtaatatggcagatggtaaaaatactatggtgaaaaagcaaagggagattatagggagtccctggattggagtagggcagggtgagagttgttatttttgataggttgcataggtcagaggagacttatttgagagtgacgtttgagcagacatctgaaagagcgaggaagccaacaagcagatgtcaggaggaatgagtcattcccagcagaaggcaaagcaagtgcaatgcccctgaggtgagtatgcttggcgtgtttatgggacagcaagaaggccagtgtggctgaagcggagggagcaagtggagaagggtagaaaatgagggcagagaggagttagcagaaggacagatcgtgtagggccttgtaggcatttgtaaagactgcaaaaaccgagtcagatggaagcatctcctcatgtgtactactgcagtatttccccactcctatattaccaattttcccttctactagaataagagttctcaaattttttggtcttagaactcctttgtaatcttaaaaattacttacaaccccttgccttacacctgagcttagagaaaagcattcagctttttatacattgagtatgatgttagctatacatttcttgagaagcccatcatcaggttgaggaagttcccttctatttcctagtttgccaggagattttagcaggaacaggttttttgtttttgtttttgtttttaaagagacatggtctcactctcttgcccaggctggagtgcgtggcacaatcacagctcactgcatcctcaaactcctgggctcaagagatcctcttgcctatgcctccccaagtagctgggactacaggcaaacacagtcacccctggctagttcttttttttttttttcccctatagagatggggatctcaccattttgtccaggctggtcttgaactcctgggctcaggcaacccctctgcctcagcctcccaaagtgctgggattacaggcataagttaccctacccagcccttttctctgtatctattgagataatcaagtgagttttttttttaatctgttaatatgatgaattactttttttttttgagatggagtttcgctcttgttgctcaggctggagtgcaatggtgcaatctcagctcaccacaacctccgcctcctgggttcaagcgattctcctgcctcagcctcccgagtagctgggattacaggcatgtgccaccacgccttgctaattttgtatttttagtagagacggggtttctctatgttggttagtctggtctcaaactcccgaccttaggtgatccacctgccttggcctcccaaagtgctgggattacaggtatgagccactgtgcctggcctacgtttttgaatgttaaacaaccttgcaatcctgtgataacctcacttggttgtgacatatgatccttcttatatgttgttggatttcattgctaacattttgttgataatttttacatcggccgagcacggtggctcatgcctgtaatcccagcactttgggaggctgaggcaggtggatcactcgaggtcaggagatcgagaccagcctggccaacatggtggaacccccgtctctacaaaaaaatacaaaaactagccgggcatggtggcacacacctgtagtaccagctactcgagaggctgaggcaggagaatcgcttgaatcagggaggcagaggttgcagtgagctgagatcgtgccactgcagtccatcctgggagacagagcgagactctgtctcaataaaaaggccgggcacagtgactcacacctgtaattcccagcactttgggaggccaaggcaggtggatcacctgaggtcaggagctcgaggccagcttggcctacatggtgagaccccatctgtactaaaaatacaaaaattagccaggtgcagtggcacacacctgtaattccagctacttgggatactgaggcaggagaaacgcttgaacccaggaggcagaggttgcagtgagctgagatagcaccactgcactccagcctgggtgacagagcragactccatctgaaaaaaaaaaaaaaaaatttttttttttttttgtgtacctctatgttcatgagagatattgatcttcagtgttttagcttttcatgttaatgttttggtattggtatcagtgtaatgctagcatcatgaaatgatttgcaaataattccctctttttttttcaattttctggaagagtttatatagaattggttttatttctcttttagatgtttggcacgattcaccggtgaagccacctgggcctagagttttctttgtgggaatgtttttaacaaattcaacttactttacagataggaactactcagtttaactgtttctttttgagtgagtttggtagtttgtgtctttgaaggaatttgtccattttaattaggttgtcaaatatagtggcataaagttgttaaaaatacttccttattagcgttttagtgtctgtagaatccatagtgatgtctctcattcctgatattggttatatgtgtcctctgtcttattcctgataagtctgggtagagatttatcaatattgatctttttaaaaaatcatcttttggttttattgactttctccattgtttttctgttttctattccattgattttgcactctaatctttggatactttgagttcaatttgatcttcatgtttagttaaggttgaagctaaggtcattgatttgagacctttttaaataaggrtatttagtactttagctgcatctcacaaattttgatatgttgcattttcagttttattcagttcaaaatactttccaatttccttttttggtttcttttttgatgtaggggttacttagaagcttgttatttaattatttgcaaatatttgaggactttttgaggacctcatatttgaggacctttctgttattgaattctaatttaattcgattgtcaagaatatattttatatgacttaaatccttttaggtgcattaagattggtttttatggtccagagtatgactcagaacatcttggtaaatgtttagtgcaacttagaaaatgtatagtctctattcttgagtagaatattctatgtatgtcaagtaggtccagtttatttatattgttgaacacatctatatgcttattagttttctgtctattaatctatcaattttttttttttgagacagagtctcactctgttgcccagaatggactgcagtagcacaatcacggctcactgcagcctcaacctcctgaacacaaacaatcctcctgcctcagcctcccaagtagctgggactacaggcatgcaccactgtacccagctaatttttgtatttttgtagagacagcgttttaccatgttgcccaggctggtcttagactcctgagctcaagcaacccacccgtcttagcctcacaacgtgcagagatgagtaatcatatggtttttgtcatttattttattgatctggtgggatacggtggctgattttcagatgttatatcaaccttgcatttctgggatacatcctacctggtcatggtttcagtcttttgttttgttttgttaattggagttggggcggtgcctcactatgtcgccttgaactcctgtgtgctccagcaatccttccacctccgcctcctgagaagctaagactaccggtgcacaccactacacctggctagtttcagtagtttttgtcttgttaggaattagtccatttcatctaagtggtctcatttgttggcacacagttattcactaatatttcttcatgatcctttttatttctgtaaggttggtagtaatgtcccactttccattcctgattttgataacttgagacttttttttaattgttcaggctaaaagtttgtcgatttttgctgatcttttcaaagaaccaacttttggttctgttgtttttctattctcttaagttctgctctaatcttttttatttccttccttctgcttgctttggatttagtttcctcttaggtgggagtttaggtaattgatttgagatcttcttttttattttaggcatttatagctttaaatttttttctaagcattactttagctgtatcccataagctttggtatgttgtatcttagttttcattcatctcaaagtattttctgattttcctatgatttcttcattgacccattggttattaacaagtgtgttatttaattttctttttcttttctttcttttttttttttttttgagacggagtcttgctctgtcccccaggctggagggcagtggtgtgatcttggctcactgcaacctctgccccctgggttcaagcaattctcctgcctcagcctcccaagtagttgagattacaggcgtaccctaccacgcctggctaatttttgtatttttagtagagatggggcttcactctgttggccaggctggtctcgaactcctgaccttaagtggtcctcccgcctcagcctcccagagtgctggaattacaggcatgagccactgtgcctggcctttttttttttttttttttttccagacagagtctccctctgtaacctaggctggagtgcagtggtgcgatcttggctcactgcaacctgtgcctcccaggttcaggcaattctcctgcctcagcctcccgagtagctgggactacaggcacccgccaccacacccagctaatttttgtatttttagtagagatggggtttcaccatgatggccaggctggtctggaactcctaaccccaggtgatccgcccgcctcagcctcccaaagtgctgggattacaggtgtgagccaccacacctggcctatttaattttcataaatttgctaattttccagattttttctgttaactgatttctaattttattccattgtggtcagagaacatattttgtgtgatttcaatccttttaaatttattgaggcttattttattttattttatttttattttattttatttttgagatggagtctcactctgtcaccaggctggagtgcagtggcacgacctaagctcactgcaacttccgcctcccaggttcaagcgattctcctgcctcagcctcctgaatagctgggactacaggcatgtgccaccacccccagctaatttttgtatttttagtagagacaggatttcaccatgttggccaggatggtctcgatctcttgaccttgtgatctgcccgcctcagcctcccaaagtgctaggattacaggtttgagccactgcgcctggcgaggcttattttatgttcaggcatattgtctattgtgagaatgtgccatgtgtactggagaagaatgtgtattctacggttgttgggtagagtgttctctaggtgtctgttaggtctggttggtttatagtattgtttaaattagtttttgaggtttctaaaaatggtatcactgggtgtggtggctcacatctgtaatcccagcactttgggaggctaaggcaagaggacatttgagccccaggagttcacaaccagcctgggcaacaaagagagaccttgtctctacgaaaaaaaaaaaaaaaatgcaaggtgtggtggctcaagcctgtagttccagctacttgggaggctgaggtggaaggatcacttgagcctgggatgtcgagattgcagtgagctgtgatcatgccactgcactccagcctggatgagagagtgagaccctgtctcaagaaaaaaaaaaaaaggtaccatactaaatgtggctgtctcactggctgccttgttattctcacccagggccattgcatttgttgttccttcatcctagaactttcttccccaaggcaatgcatgattttcttcctcatttcagtctctgtgcatatgtcttataaggacctttcctgacagacttcccaacccctgtgtttttcttttcatccttctttgttttgatttatgccatttatcactatgtgaaaaagtacagagtatatttattagtctacttctttgtttcttttactcttttgttcattgctatgtcacctagtaggtactcaaaacgtatcaagcttccaaatgtgaatttggaagttctgaagtcagagcagaggacttgactaaagatagaaatttggaaatcattagcttagagtgaaaatttaaattcacaggtagaagaaattacctatggctagagggaggagataaaagagaaaagggccagggcctggccctgatgaatccagcatctattagaggtttgataggtaaggaggcctaacaaagaaaattgagaaggagcagaggagagggcacagaggtagaagcatcatagttcttctagtgtaggggctgcctgtactagaaataaagaactaggccgggcacagtggctcatgcctataatcctagcactttgggaggccgaggtgggccgatcacttgaggtcaggagttcgagaccagtgtggccaacacagttgaaccctgtctctactaaaaatacaaaattaaaaaataataataatggccaggcgcggtggctcacgcctgtaatcccagcactttggcaggccgaggcaggcgaatcacgaggtcgggagatcaagaccatcctggctaacatggtgaaaccccgtctctactaaaaatacaaaaaaattagcctggcgtggtggcggatgcctgtagtcccagctacttgggaggctgaggcagaagaatggcgtgaacccgcgaggcagagcttgcagtgagccgagatcgtgccactgcactccaccctgtgtgacagagcgagactgtgtctaaaaaaaaaaaaaaaaaaaaaaagtggccgggcgtggtggctcacgcctgtaatcccagcactttgggaggccgaggcgggcagatcacgaggtcaggagtttgagaccatcctggctaacacggtgaaaccccgtctctactaaaaatacaaaaaattagctgtgtgcggtggcgggcgcctgtagtcccagctactctgggggccgaggcaggagaatggcgtgaacctgggaggcggagcttgcagggagccgagatcgcgccactgcattccggcctgggtgaaagagcgagactctgtctcaaaaaaaaaaaaaaataattaataataataaaataaaaatacaaaattagccaggcatgatggcgcatgtttgtgatcccagctactcaggaggctgagacaggagaatcatttgaacctagcaggcagaggttgcagtgagctgagatcacgccatttcgctctaaactgggcaacacagctagactctgtctcaaaaaaataaaatacaaatacaaaaattagccaggggtggtggtgcacgcctgtaatcccaactacttragaggctgaggcaggggaatcgcttgaactcaggaggtagaggttgcagtgagctgagatcgtgccactgcwctccagcctgggttccagagggagactccatctcaaaaataaataaataaataaataaaaataactaaaagagtaggaggtgccattaaagccatcaaaaatggagtagctaacttaacggaagccgacatgaggttcagaaagataatgtggctagagaagtgactgtcagatgctgcaacatgaaggctgttgatagccttgacaagagcagaagagtggtgcagacagaagccgggctggcttatgtgtactcaagagtgtgtaggccagtttataaaataataattattcaattcagtttataaaataataattatttaattaagccttttaatagaatctgcaggttgaatctagtaagttttcctcccttctttttggctttctcagtgtttaaaaactcccatatttggaaactctctggtgattccttaaagattgaaaatgggtagatgttgaatgctatctaagccagatgatcctgggatcttcccacaccagcttctgggaactgggaaacttctaactagctagacagaactaaagtaccatcttcattatctctccatggcctagcacttatatcctttgcaatcagttgacatttattttcatgtaagtgtataggaaagaagtagcttgctctttccttttttttttttttcttaagagaagacaggatcttgcactatcacccaggctggaatgcagtggcatgatcacagctcactgcagcctcaacatcctgggctcaatcgatccttccacttcagcctcccaagtagctgggactacaggtgcacgctaccatatctggctaattattgtattttttgtagagacaaggtttcaccatgttgcccaagctggttttgaactactggactcaagcgatttggactcaccttggcctctcaaagtgttgggattacaggtgtgagctaccatgcctggccgctgaagtagctgtttctgtttgcgaaagtagttttctgctatcatttatttttgacatcttgtccttggactatatgcagatgttaatcaccttaattatcactatattagctaccagaaacctaaaacattgaaacaagggaatagagatttgagaaatagacctatgcatatatgtaactggtaattcagccaagatacaaaataatcaaatggagaaagtacagtctttttaacaaattgtgctggagcaattggaaatccatacgttaaaagataaaagtactttaacccataccgtacatcatatattaaaattaacacaaaatggatcatagctccaaatctaaaaccttaaaccataaagcatctgaagaaaggcctggcacagtggctcatgcctgtaatcccagcactttgggaggccgaggctggtggatcacctgaggtcaggagttcgagatcagcctgaccaacatggtgaaaccccatctctactaaaaataggaaaattagctgagcggggccaggcgcggtggctcatgcctgtaatcccagcactttggagggccgaggcgggcagatcatgaggtcagaagatcgagaccatcctggctaagatggtgaaaccccatctctactaaaaatacaaaaaattagctgggcatggtggcgggcgcctgtagtcccagctactcaggaggctgagggaggagaatggcatgaacccgggaggcagagcttgcagtgcgctgaggtcgcgccactgcactccagcctgggtgacagagcaagactctgtctcaaaaaaaaaaaaaaaaaaaaaaattagctgagtggttgggcacggtggctcacacttgtaatcccagaactttgggaggctgaggtggatggatcacgaggtcaggagttcgacaccagcctgaccaacacggtgaaaccccgtctctactaaaaatacaaaagttagctgggcatggtggcaggcacctgtaatcccagctactcgggaggccgaggcaggagaattgctgaaacctgggaggtagaggttgcaatgagccgagatcgtgccactgcactctagcctgggtgacagagctagactccatctcaaaaaaaaaaaaaaaattagccaagcatggtagtcagcacctgtaatgccagctactccagaggctgaggcaaggagaatcacttgaacctgggaggcggaggttgcaatgagccgagatcatgccattgcaccccagcctgggcgacagagtgagactctgtctcaaaaaaaaaaaaaaaaaaatccaaagaaaacggagacaatttttgtgaccttgagttggcaaaaatttattagatacaatgcttaaaaatggatacagactgggcgtggtggctcatgcctgtaaacccagcactttggtaggccaaggcggatggatcacttaagcccgggagttcgagaccagcctggacaacatggtaaaaccctctctctataaaaaatacagaaattggctgggcatggtgatgcgcatctgtagtcccagttactcaggaggctgagttgggaggatcgcttgagcctgagaggcagaggttgcagtgagctaagattgtgccactgcactccaaccagagtgacagcgagaccctatctcaaaaaaaaaaaaaaaaagataagtttcaattagctaattaattccaaactcttagtaatatggctcttagcataattattatggtgtgttctagagaagccccttttgaaatcctcatctagctttcccctgccttctcaggggaaaattgaagttatatgaagtcctgtctgtcatggagaccaggcaccctactcctcagtgcctcaccatatctcctttcytaccctacctttggttgatccattcatgcatcactggcttcgtggccttgactgtatctcttggcttcttccttttgggctttggcttctgctactgcctaattatttctccatcttccaagttaggcaaccaagagagggaacctgattggcctagattatttttgcttattctagaccactaaatagatgtgttcaaccagcaatatggtccagtcatcagtgtctggggggtagggtggatggggacatagggcgatgtttggaaggagtctaagggtacgtataatgtggacggtaccatcagctggtatcacgaacaagaggtaggaccatgtgtgtgataaacaacataatatccatagctgtcataaagcaaaatgttgttattcttatttcgttcttccagaaaccattgatcatcaagctgccttccagttatggctctcttattgtatagcccccctcctaaatcagtccataacaggtagtgcgataagtgtttagagaaggagcttttgcctgttctctaggtgagaggtagagatctcaaagtatgtggcaacagaggatagaattgtggattagttggaaggtgttatcagaggtcatttgatagaccctcaactctgaatatagcacccaaaccatgcctttcaaataaacaacagtctatcctcttatactttaatctgttcctgtgtaagcaattctcaaggctagttcttcatgacgtttgagccacttttttttccctgatgggtttcatagtatccatcctataatggtcagcatgctatttgattttagtgtgtccttttttcttgcatgatgcttcttttgctatttttcttcttggcttttcatctttaggtttgttgaggtccttaaatcctgattgtcaatgtcctaggatcccagagacaaaatggacttatgtttttttttttttttttttttttggtcacataactggagggactgagcttgtgtttgctttctgttagaagaactggtgcatctaagacagtcagctgcagaatttggtttggctagttaagacgtccatggagatggaatatcatgcagtccaggtagaaagatattaacgggcctatgaagacaggttgcctacccaaggcttctcaaacttgagaaatcacctgggcatcttgttaaaatgcagattttaattcagtaggtttggggtgtggcctaacatctggaaacctgcatttcaaagaagctcccaggagatgttgttgctgcaggtctgcagacacacttggaggagtaagaactagggggtttaatattcccaaacaggtgagcagaagtggcctatatcgctccccgtcgatgccagagaacttgaacaggccaagactgaagcaggtggaaaaattcaaggacaacacaataccagataaagttaaaaaaaagtatttttctggccaaggaaagctcaggaaggtaagaactttttaagatgaaaatcttgttcatcttctatctcatgtctttgcttttctggtatgaggattgttttattatgccttttttgtcttcttcctctttacttttactttttcctctttgttctttccatctttctgtcttttctacatctgtatccacgtgaaatatatatatatatataaaatatttatataacatagatacataaagtatatctatattgtacttttagaaatgttgtcataggccgggtgcagtggctcacgcctataatcctagcactttgggaggccgaggcgggcggattgcctgagctcaggagttcaagaccagactgggcaacacggtgaaaccccgtctctactaaaatacaagaaatcagctgggcgtggcagcatgtgcctgtagtcccggctactcaggaggctgaggcaggagaatcgcttgaacccgggaggtggaggttgcagtgagccaagattgtgccactgcactccagcctgggcaacagagcaagactccgtctcaaaaaaaaaaaaaaaaagagaaatgttgtcatcataccgtcttcccaaccctttttcttaagatctgaaagaatacaagggaactttggtatggatattttactgctgttttacatgcagtctgacagaaacaacatcatatagcaggttggttttgtggaaagcaacttctgaaaaacttagcctttgtcctttaccctccccaactttaaaaaaattaaatagatgggaggatcacttaaggtcagaagttcaagaccagcctggtcaatatagcatgaccccatctctaataaaaaaaaataaaataaaaaattaaaattctaaaatctttggatattttataaaatcaacttatttatttatttatttattttcccctgagatggggtctcactctgtcacccaggctggattgcagtggcatggtcttgactcactgcagcctcaatatttatttattattaaaaataataaataaacaaatggagtctcactctgtctcccagactggagtgcagtggtgcaatcgtagctcactatagccttggcctcctgggctcaagtgatctccctacctcagcctcccatgtagctaggattacagatgtgcgccaccatggcccactccatccactggtttttaaacctttaacatgaggattgggtgtggggtgggaatcttgtcatcttcagggcttatgtttaaagaagacagtctctctgtgtgacattactatcactcagatgctggaggaagattctaaccaggggcacctgattggtgatttttccaaggtgagtttggctacacccatcctgtatttcagtgagtcattttggatctgaatcttctctgtttgccgagaatgcctggtgtaaatatgcatcctcaccaagtactctttggtaacctgacagtgctctagtggtagatccaggccctaagcctttccagagagaaagtatttcttattcttctgggaagatccagaacaggggaaagtatgagactttttaccttttttctgtttaaaaacatattttaaaattatgtaaataatacttggttgttacagaaaaagtagaaaatgaagaaatttatcccaaactttattaaccagggtaatattgcttagtatatactctttttttcccccctactgtctgtgtaattgcagaaggtacatattcttacagatttttttctgtgttttcacaaacacatatacaaatacagtttttgcttttctacaaaaacagtttatattgttttgttatctgttgtttttcctctcatttaataattatatcaggggcatcttttttcatattaataagcagttatgcttcattctttctttttttaagattcaaggtcttgatctgttgcccaggctggagtacattggcatgatcatagctcacttcagcctcgagctcctggcctcaagaaatcctctctctccttggcttcccaaagcactgaggttacaggcatgagccaccatgcccagcccatttcattttaatagctccatattatttcttttttttttttttttggctgctcataatttcttcataaatcccttcttgtaagatatttggttttacaattttttcttatgaatgataccaagatgaatatatttgtagagaaatctaaaacttcgtacacatccttgatttgttctttaggatcagttcttagaaatggacttgatgtatatgcactttatagagacactgatttttttgaaggcctctggggttttaagggtcacttggaaagaaggacaaaataagggtctttgatctcaaacttgggtgtggaatacttgctgttatttcagctcttgtgtatttctaggtatgtgcgctgccaaccgtgtcagggaaacaccaagatctgaagtatgtcaacccagaaacagtaagcagatttctggagatggtaactggttacataagctaccatctggtctcttctgtccctaaaatgcccatttccatttgtatttctttcactgtgttcactcacacaggctccttattcaactgaagttatattgaaggactcatttttttccccattcttctctctccttcgtttttagttaaacaaatgatacatagtttttgtaaaagggaaaaagggaggggtcaggcatggtggctcacgcctgaaatcctagcattttgggaggctgaggcaggcagatctcaggcacttgaggcagggaattcgagaccaccctggccaacatggcgaaaccccatctctaataaaaatacaaaaaaattaaccaggcgtggtaatgtgtgcctataatcccagctacttgggaggctgaagcacaagaattgcttgaaccccagttggggaggttgcagtgagcagagatcgtgccactgtactccagcctgggcgacacagcgagactgtctcaaaaaataataattacttaagaaaaaagggagaaagaaaggaaaataaaaaatcacacacaagaaatggtctcaattaaggtctcaattagggtgaccatgcaccctcgtttacattttacaatcccattttcatctattagtgagggtaattattaatagtgtttgctttcattctcaaaagtctcccagtttgtacaaaaattatttggtcaccatacccacaatctcatcaccagagataaccactagtcatattttcctatggccttccagattttattttatttttagacatggagtttcgctcttgttgcccaggctggagtgcaatggcacaatctcggcttgctgcaacctctgcctcccggaggtcattctcctgcctcagcctcccaagtagctgggattacaggtgccagccatcacaccgactaatttttgtatttttagtagagacggggttttactatgttggtcaggctggtttcaaactcctgtcctctggtgatccaccctcctcagcctcccaaagtgctgggattacaggtgtgagccactgcgcccagccccagattttattctagcatatgttttatagaaatgggatcatgggcctagcacagctcacacctgtaatcccagcactttgagaggccaaggcaggcgaatcacctgaggttgggagttcgagacgagtctgaccaacatggagaaaccccgtctctactaaaaatataaaattagctgggtgtggtagcgcatgcctgtaatcccagctactcgggaggctgaggcaggagaattgcttgaacccgggaggcagaggttgcggtgagccaagatggcaccattgtactccagcctgggcaacaagggcgaaattccatctcaaaaaacaaaaaaaaaggatcatgatgaacgtatagtattgcaatttgcttagtgagacattatagacatctttctatatcaataaggtatctatattrtcattttaatggctatataatgccgctctattctactgacatgtacaatttattttaccaaacccctattattgaatattgaagttatttctaatatattgataatataaaacaatgctgagatgaatataattgtgcctacatctttgtgtacttttcctgtttacttaagatgttagaaattgctgagtcaaagtgtgattacatttatttgtatatgtatttacaaagttcccttcagaaaggctgaaccaatttgcactcctacaagtagcttcagtttcttccttcctttaggtatcaacctttcccttccatatcctttcctgaaagacttactttcttcctttttgatggtgggtagggaaccattttgcatttcttcctgcaatttcaagctctctagctgctgcctctgccactgcagaagtccttgggcatctcctgagtccagccatgcctatccccagatgggtagcctgaatatggttttccttggtatcttgtcagtgccagctattttggttctctaaaagggccacttcctgtttcattctcttttgtggagtggggctgaatcattgccacatatcaaatatggggtgactttggaggctggacatacagtggacagaacaggagtatgcttgtaaggaactgtgtcattgacccttctctccctcagagtggcagtgagcagaatattcagtcattgtttctgtccaggtggctgccttactgtcggggaagttccagggtctgattgagaagttttatgtcattgattgtcgctatccatatgagtatctgggaggacacatccaggtgagacgacattgtggccattagtaggggagggctggagataactctttattgagaagagtctgtggacaaaggggtctatgaactctagagtcaggacaaagattacatatttgaagcacctcaaggctgaggtcctcattgttttaattctgtataccttaagcaggttactttccctttccctcctagatctatctccctcttttctgtaggagccaaggggtcctacctagaaataaaaacattaatccaaggactgaagcactttgcaaacacttactattcatgaacattcctcgcagtgatctctatacttccagtggttcaggtctataaacatttattgaccatctacaagctctatgccaggcgttcagggtatatacagagatatacttagacccctgccctraaggtgcttatagtccagcttttctggtccacattatcccaggttggcgtctcastcatttctaagtattggcactgtctataagcccctgaggaaatacttactaaaattcttcttctacagggagccttaaacttatatagtcaggaagaactgtttaacttctttctgaagaagcccatcgtccctttggacacccagaagagaataatcatcgtgttccactgtgaattctcctcagagaggggcccccgaatgtgagtgtctaaatggggtctggcgggtgatggaaatggattttgagttggacttcccacaccagttcagacagagactgactggattctacagtttgaagaatgttagggaggttgaaggaagacgtttctaaaattgaaaagtttgaaacaataaaggaaaagggattgagaatgaggctgcagtggaggaaaggaggaagggtggtactacttggacctttttttgcaaacacagggagattggaaagtcctttttgaggttggcaatagtctactcctctcccccctccccagtgaatggcccctgggatcctgaccttgtttctttccaccccacccatctctgggttctctctaaaggtgccgctgtctgcgtgaagaggacaggtctctgaaccagtatcctgcattgtactacccagagctatatatccttaaaggcggctacagagacttctttccagaatatatggtaaagggtggggcatgcggggagccaaactttaacaactcaactcccagggcctgcaaagccttcagagaagaaactgctgctcctccttagccactgccagcagcagcatctctattatccttcataggtagagttcaggagtctagagaatcccttactctgttccttacctttcaggaactgtgtgaaccacagagctactgccctatgcatcatcaggaccacaagactgagttgctgaggtgtcgaagccagagcaaagtgcaggaaggggagcggcagctgcgggagcagattgcccttctggtgaaggacatgagcccatgataacattccagccactggctgctaacaagtcaccaaargacactgcagaaaccctgagcagaaagaggccttctggatggccaaacccaagattattaaaagatgtctctgcaaaccaacaggytaccaacttgtatccaggcctgggaatggattaggtttcagcagagctgaaagctggtggcagagtcctggagctggctctataaggcagccttgagttgcatagagatttgtattggttcagggaactctggcattccttttcccaactcctcatgtcttctcacaagccagccaactctttctctctgggcttcgggctatgcaagagcgttgtctaccttctttctttgtattttccttctttgtttccccctctttcttttttaaaaatggaaaaataaacactacagaatgagaggtgtgattgtgagcctagcctgctcctagaagatctgtctacagaggagatcaccaagttagactacttcagacatactatctttattcatagctgaggccaacatgcttttctctaaaccagtaattcttaggccgtggctcacacctgtaatcctggcactttgggaggccgaggcgggtggatcacttcaggtcaggagttcgaggccaacatggtgagaccctatctctactaaaaatacaaaaattagccaggcatggtggcgtgtgcctgtagtcccagctactcaggaagctgatgcaggagaatcgcttgaactcaggaggtgaaggttgcaatgagatcgtgccaccgcactccagcctgggcaacagagagagactgtctcaaaaaacaaataccaaacaaccagtaattctcaaagtttggaccctagatcatcaacatcatctgaacttgtttgaaatacagatgttcaggcctcaccccagacctcttaaatcagaacttgtgaggttagggcacagaaatctgggttttaaaaatctcccttttcagttaattctaatacatggtaaggcttaagaaccagtgctcagtaatcccagcactttgggaggccaaggcaggcagatcacttgacgtcagaagttcgagaccagcctgaccaacatggtgaaaccccatctctactaaaaaaaatacaaaaattaaccaggcatggtggcacacacctgtaatcccagctactagggtggctgaggcaggagaattgcatgaactcaggaggtggaggttgcagtgagccaaaatccactgcactctagcctgggcaacagagtaagactccatctcaaaaaaaaatgaaccaatgctctggaattaaggtaagcctttcaaacagttttcttcagcaatgtcctgggctttcctttcctagatcattccatggtatgcgttactaaaagtgcaccacagactcagcagcatgtggtatctagacattctctaaggcaaatgacagatctcagctgggctcaaaggttccctcttggcagtggctcacacctgtaatcccagcactttgggaggctgaggctggcggaacacctgaggtcaggagttcaagaccaccctggctaacatggcaaaacctcgtctatactaaaaatacaaaaattagccaggcatcgtggtggctgcctgtaatcccagctattcgggagactgaggcaggataatcacttcaacttgggaggcagatgttgcagtgaacaagatttttcactgcactccggcctgggtgtcaaagcaagactccatctcaaaaaaaaaaaaaaaaagttccctatctatagccttaggggggttttgacttttaagtcttttctccactccatttcacgtctcacaaagacaagttttaggatttaggatggttggaagtagagatttgtgatatatgaagataggaataaaacaaagcaagatccattagacttcaggaagattttttaactgtactcttctgcagtatgccagggtttcctttcttggagctttttaatatgaataggcctttatctgtagtaaggtgtggcactacttggtcttgggtggcagtagaactgactgaacattgtcattctctggtattaacctagtaggactgatagcccaggacggaacaggacgaagccctctacagcctaggctgagacagaacagagacaaacataccctcttcccaggctctggaacagagacacttttttaaagtgagtgggagggaaggggggttgtagccatagggcggcccatgcacgtgcctgagtggttggactggcttttaatttttttatttgacaaggtttgcacatgctcttgccctagagtgtcacatgcatgcttcacagcagagggcactgctgttttctccaagccatcctgctgaagtctgtagcttccattcctagctactgcctgtctgtcaaaaaggaagctgtctctgtggccttctccctaatcccttgaactcaaagcccagaaggtctaggggaaagagaaaagctgctgctacgttaggtggagatggccaaaggaaagatgctgctcctctgccccacccacacacgtgcccctataggaattcctagtagccagaaaagaaaactgcttgaagcacctcttcgaagtgtgaggagaggtccttaactcactgcctaccctagtgggtcatttccatttcctgataattctccccagaaggctagaaccaagtcccaacatagatagagattgatgtacatgtgcccactagtcagtagtcttaagtggaaaatctgagttgcaaaacaaaacactaaggcttaattatcttcctcatggaaaattgtattttcacccaagtcaacattttttggtattttttattttattttattttatttgagacagagtcttgctctgtcaccaggctgaagtgcagtggcgcgatctcagctcactgcaacctccacctcccgggttcaagcaattctcctgcctcagcctcccgagtagctgggattacaggcatgcaccaccacgcctggctaatttttgtatttttagtagagacagggtttcaccatgttggtcaggctagtcttgaactcctgacctcgtgatccacccacatcggcctcccaaagtgctgggattacaggcgtgagccaccacgcctggcctaatataagcccactgatttcttgtaatatcctctcattgtatagggactatatgatttgattcatgttattttcaggaataacaatagtagctaacatttttcaggtgcttactgtatacaaggctatctctaaactcatatatatatatatatatatatatatatatatatatatataaactcctatataaatacacactaatttaattttcacaagcctgtgaaagaggtattcattattatgagcatttctttatgaagataaagaaattgaggaacagagggattaactcttttttattttattttatttttttttgagacagggtctcacttgttgcccaggctggagtgcagtggtacaatctcagctcactgaaacttccacctcctaggctcaagcaatcctctcacctcagcttcccaagtagctgggactacaggcatctgccaccacacctggataatttttgtatttttttcttttctttttttttttttttttttttgagacggagtctcactctgtcgcccaggctggagtgcagtggcgtgaactcggctcactgtaagctccgcctcctgggttcacaccattctcctgcctcagcctcccgagtagctgggactacaggcacccaccaccatgcccggctaattttttttttattttttagttaagacggggtttcaccatgttagccaggatggtcttgatctcctgacctcatgatccgcccacctcggcctcccaaagtgctgggattacaggcgtgagccaccgcgcctggcctgcatttttttttctaatttgaattttttttttttttttggagacacagtctcgctctgttaacaacctggagtgtagtggcgcgatctcggctcactgcaacctctgcctcccaggttcaagcgattctgcctcagcctcctgagtagctgggactactggcatgtaccaccatgcccggctaattttttgtatctttagtagagaaggggtttcaccatgttggccaggctggtctcgaactcctggcctcatgatccatcggcctcagcctcccaaagtgctgggattacagttgtgagccaccgcacccagccctctcccttctaactttcatggaggcaatctgagctctagtcttcaattggagcctcccaaagtgctgagattacaggcgtgagccactgcacctagtcaagtaataagatctcaaagctaattaatggtggagtagggatttgacccaagacagtatggctccagagcctgtccacttcatggattttgctgttaccaaaccttcatcaaagaacagtgtgcctggccaggtgcagtgactcacatctgtaatcctagcactttaagaggccaaagtgggaggatcccttgagaccaggagtttaagaccagcctgggcaacatagcaagaccccatctctatagaataaaaatcaacttagctgggcatggtggtgcacacttgtagtcatagctactggggagggtcaggcaggaggatggcttcagcccaggaggttgaggttgcattgaactatgatccatccactatactctagcctggatgacagcaagaccctgtctaaaaaaaaaaaaccactgtgcctttccagagttggccctgtattgggtgttaaatctataagagcctcaatggtaagctcttgagaatttagggccataagggttgctttggcttgagagataaggatatgagcaggcactaaaaccccagcccagagacctcagtatgaggctatgtagggggtgtgctcggcattggtgtccttgcactggtatttattcatcaggaggtaaagaaatattgaacagaaatgttttgagctaaaaactgcttctcgaggctgggcgctgtggctcatgcctataatcccaacactttgggagcctgaggagggtggatcacctgaggtcaagagtttgagaggagcctggccaatgtggtgaaaccccatctctactaaaaatacaaacaggccaggcatgatggctcacacctgtaatcccagcactttgggaggccaaggtgggcagatcacgaggtcaggagatcgagaccatcctggccaacatggtgaaaccccgtctttattaaaaatacccagctactcgggaggctgaggcaggagaagtgcttgaacccaggaagtggaggttgcagtgagccaagattgggccactgcactccagcctggtgacggagactctgtctcaaaaaaaaaaaaaaaaaaaattagccaggagtagtggcaggcacctgtaattccagctaccaggaggctgaggcaggagaatcacttgaacctgggaggtggaggttgcagtgagctaagatcacaccattgcactccagcctgggtgacaacagcaagactctgtatcaaaaacaaacaaaaacctgcttcttgggctaggtgcggtggcttaagcctataatcccagtactttgggaggctgaggtgggaggattgcttgaatccaggagtttgagaccagcctgggcaatatagtcagacctctgtctctacagaaaatttaagaattagccaggtgcagtggtgcatgtctgtagtcccagctactcaggaggctgaggtgggaggattgcttgaacccgggaggtggaggttgcagtgagctgagattgcaccactgcactccaacctaagtgacagagggagactctgtctcaaaaaatatacataaattttttttttgcaattgcttcttgtcaatctcagcccaggacctgggtgacctctgccatagagaagggaatgtattaagccattcttcctttgctataaagaaataccctgtaatcctaacactgggaaactgaggctggaggatcacttgagcctaggagtttgagaccatctgggcaacatggtgaaaccctgtctttacgaagaattttttttttttaagatggagtttcgctgggtgcggtggctcacgcctgtaatcccagcactttgggaggccaaggcgggcggctcacctgaggtcaggagttcgagaccagcctgaccaatatgatgaaaccccatctctactaaaaatacaaaaattagccgggcatggtggcatgtgcctgtaatcccagctacctgggaggctgagacaggagaatcacttgaacctgagagctgggaggcggaggttgcagtgagccgagatcgcgcnnnnnnnnnnnnnnnnnnnnaaaaat

SEQ ID NO: 93902 - DNA, 42308 bp, Homo sapiens
  misc_feature (1)...(42308): n = A,T,C or G
taattaactcatctgacaacttctgacttttttaaaaaacagggtcttgctgtgttgcccaggctggcctgaactactggcctcaagtgattctcccaactctctctcccaagtagctgagattataggcacatgccacctcagccatcttctgacttttttttttgtttgttttgtttttgttaagatggagtcttgctctgttgcccatgctggagtgcagtggtgtgatcttggctcactgcaacctccgcctcctgggttcaagtgattctcctgtctcagcctcccaagtagctgggactacaaatgcaagccaccatgcccggctaatttttgtattttttgtagagatggggtttcaggctggtctcgaactcttgacttccggtgatctgctcccccccgtggcctcccaaagtgctgagattacaggagtgagccaccatgcctggcccgtcttctgacttttttttttttttgagacggagtctcgctctgtcgcccaggctggagtgcagtggccagatcttggctcactgtaagctccgcctcccgggttcacgccattctcctgcctcagcctcctgagtagctgggactataggcacccaccaccacgcccggctaattttttgtactttaagtagagacggggtttcaccatgttagtcaggatggtctcgatctcctgacctcgtgatccgcgcacctcggcctcccaaagtgctgggattacaggcgtgagccaccgcgcccggccctggcttttaattgaagcatttagtctactaacagaaggtgacctgacccattgactaaagactcccccatgaagacaggactgccttgttatgtttatttgtttctttatgacgtgtaagcacaccctgggaacatgatgaactggagttttcccagcagcacccagccagaaaggcaagtgagacaccctttgggccctcagcagtcatttaatgaggtgttacgatgcaccaacctcatggtggcctctggagctgacaggcatgacctaggacctcactataggatcctgtaatataattaaaaggtcctcagatcacaaatgcaaaggttaaatgtgtcgctgttaacatgagataatctccattcctgtagcatgtttctctttctttccttccttcttttcttttcttgtccctccctccctccctcccctcctcccttccttccttcctcccttccttccttcctttttttttttttgagacagagtctcactctgtcactcaggctggagtgcagaggcacgatctcggctcactgcaacctccgccttccgggttcaagcaattctcctggctcagccttccaagtatctgggattacaggcaccaccaccatgcccagctagtttttgtatttttagtagatacggggtttcaccatgttggccaggctggtttcgaactcctgccctcaggtgaattgcccgcctcagcctcccaaagtgctgggagtacaggcattagccactgcgctcaggctttcctgtagtatctttcttatggaaagcttttctctgctttttaaaattgtttcttttcattttctatatgcagtaggtattagcagtcatgaatttaaccttatggtttcagtcatgaagattcatggatttgcatttgttgctgatgtacaagagagccggtcacacagcgaagagagtgagccccactggccactgactcctcactttaacacagcttggtgcttctgttcttcatccccgtgaaataatgagcacttctcaatggaagcacttcttactgagttcatgaaggttgcgagatccgttccttgaagctgttgagagactcttgttttcagaggctatttcagagaaacagaggctactctgtttcacacatacttactgaaaccctaaatgcaagcctcgcactgggatccaaaggtaaattaagatgatggtccctgcctgcagaagctctcagcctagtgcagggaacaaacatgtgaatacatgcccttttattttgtaaaaggagtggttgagagagtgaggaaggaagaaatggctctgctcatgaaggtgaagagggcatcaggaaaaggaggtgttacttcaactgcatcttaaagggaggtaacacctgaccagacagggaaaggggtttcccttcttggtacaggaaaccacatgttcaggtgaacagaagtgtcaacaggaggacaggtaggaggaccacaagtattcccatgggactgcagccaagtatatggggttagcagccagataagactgtggagattggccaggcgcggtggctcacacctgtaatcccagcactttgggaggccaaggcgggcggatcatgaggtcaggagattgagaccatcctggctaacacagtgaaaccctgtctctactaaaaatgcaaaaaaaaaaaaaaaaatattagccaggcgtggtggcgggcgcctgtagtcccagctactagggaggctgaggcaggagaatggcgtgaacccgggaggtggagcttgcagtgagccgagactgcgccactgcactgtagcctgggcgacagagcaagactccgtctcaaaaacaaaaacaaaacaaaacaaaaaaactgtggagatgggtcagcagcaggggccaggtgatgatgccagaccactgggtcctgggcgcttatcaccttgtgccttgctggtccccaagatgtggtcctcaaaaaactaaaaagctatagtcacatgcatttggaagaagccaagttaaggctaaacaggtttttatttatttatttatttaatttacttatttatttatttttactgcaggatttctagagcttacaaagtgctaagtgcatgagggctctaccaagggggaaatatatagcgcagtgtgtactgaaccccttttgcaggaaagccctcagaatcctcacctggggaaattctgctgtaagcaatgaaaggccatggaaggattcagattttcatttggaaatatgcattctgcggaatgagtgagggctgggtggggtgggtagtgagatgagacataaggagaccagtggggaggaggtgctccatgaaacacctgagtgcaaaggggcgtgcacaggctcagggattcaagaggcatttgaaggtagaatcaatagactgaactgcccttgggagggagggacgtgtgtctgcgccagggttttggcttctggctctggtcatgtcttatcggtcattggatgtagcttctggcatctagcaggaaggcctgccctactaatatatttggagttgggtgtgactgtatggcggcactgaagcctcagtggatgagctcatcaccaggtcgagtctaaggggagaacaggactgtggacagacccagcagacatccatgttttagaagtgggcagggaggagtggtcagcaagggagcaggcgtccttgaagccaggggaggacagggtttcaaaaacaagagagcagtgtgtagtaaccctccacatgcaagttacaacagcagagaggttttcatctatcaaaccagcagagattgatttatttatgtatttaacagttatatctagtgttggtaagggtgatagaaaataagcaccctcgtgctattggggcaacagataatatgtatcaaaaaccataaaaagtgtatatgctctttgattcaaatattccatctctagacgcctgtaatcccagcactttgggaagctggggtgggcagatcacctgagcccaggagttcaagactagcctgtccaacatggcaaaaccctgtgtatactaaaaatacaaaaattagccaggcatggtggtgcacgcctgtaatcccagctgctcagggggctgaggcacaaagaccacttgaggcggaggctgcagtgagccaagatcataccattgcactccagcctgggtgacagagcaagactccatctcaaaaaaaaaaaaaaaaaatccatctctagaaattcatcctaaagaaatcaccatggatgtgcacagattattctacaagattgttcataacaacatagtatataatataaaaatataattatcccataacataagcttgattaaaaaaattatgataacaatatgatgaaaaaataccacgaagccagtaaaaaaagtgtgcaataattaatggcatagtgaaatactgcaatataacgtgaagctaataaagcaaataagatcctgttttttgtatgaaaaaatacacatacatgtaagaaaaagagacatcaaatattaccagtgattatctctggaaacagggatttgggtgattttaaaatttgttgggggtaatatttttacttttctgtactgacctggcataagttccttaatcgctgtgtgcctcagtttcctcatttgttaaaagaggaggttccaatggtatgtaccccctgatgatgtgcaaaagtgattatgaaactattttcaaaagtttctacaaaagcaagttacctctgtaatcaggaaaaagtagttcttttagtgctctgaatagtgtaataataatatttattttatttcattttattatttacccttgcagaaatttacttcttcggtaaaagacagactaggcatgtgcttaaggagccagcaaatgaccatttacattaataatttatttaatatagaaatttttattgaagtgatgacttctaaatgtgatttttgggggcattatacacttgcttcgaggtttaatcttcaatccacatgggggggcaccataatcactggtgcccagggccctcgtctagcccctgtgaggccctttgcagtccctcccttgccagcccctccagcctccgccatttgccccgtgggctctccaggttccacttgaggagctgccccctgccccagcccagctctactgctgtgtgacctagcgtaagtcccttaaccgctgtgtgcctcagtttcctcatttgttaaaagaggaggttccagtggtaggtaccccctgacgatgtgcaagcatcacagaaatgacacaagacacacactgagaacatgcctcgcgcgtggcaagtgctgactgttacctgccattattaggctcccccgccggggtctcagggccttggcacaagctcttccctctgcttggagcactttcctccactgacctttcctggcgctccaggtcaactccaggagccttcccagtacagtctaggtgccttctccttccgcagcgcctgaaccacacaggaataagtaaggcgagagcgcgcccagagaagagcagagagtgcagaaaggggctgagttagtagaggcatttccgcggggatccttctcctgccaggcctgcaccggggccgtggcgactgagaagtgcacaggtggctcccgggtgctccagaagggccccagagctcctggcccggctaaaggcaggaggcgggtgcgcgtctcccccgcgaagctggatcagtactgggggcgcagggggcgcacgccgcgcagcgagggctggcgggggcggcctgcctggggcgctgcccaggctcacgcgggagccaggtgggggcgcggggaggagcagctgagcaggtgccgggaaggaggcgcctgcagcatgccatggcgacccgcgcacgcgacggcggggcggccgggtggcaccactggcgggaccggaagggcgccgcggccctaggatctctgcgccgaggcccgcggcggaagccacgacggccatgaccacgctgacgcccaggctgcgagcccctcgcccgggccgcctgcccacccgccacgcccaggtagcacctcggggtcgccccacccgcgacaccggccgcagccccgggccccctcgcaggcgtggcccccgctcccaggccccgcccccgcccccccattggtcagtcccggggtgggggcgggcgacgcggaccgctgggcagggcagggcagggactcgcgggaaycgcaccaagcgggtggctgcaggagctcgcccatcgcccctgcgctgctcggaccgcggccacagccggactggcgggtacggcggcgacagacggattggccgagagtcccagtccgcagagtagccccggcctcgaggcggtggcgtccgcgtcctctcgtscaggagccaggacaggtgtcgcgcggcgggcgctccagggaccgcgctgaggccgcggtcgccgcccgtcccgccccgccccgccgcccgccgcccgccgagcccagcctccttgccgtcggggcgtccccaggccctgggtcggccgcggagccgatgcgcgcccgctgagcgccccagctgagcgcccccggcctgccatgaccgcgctccccggcccgctctggctcctgggcctggcgctatgcgcgctgggcgggggcggccccggcctgcgacccccgcccggctgtccccagcgacgtctgggcgcgcgcgagcgccgggacgtgcagcgcgagatcctggcggtgctcgggctgcctgggcggccccggccccgcgcgccacccgccgcctcccggctgcccgcgtccgcgccgctcttcatgctggacctgtaccacgccatggccggcgacgacgacgaggacggcgcgcccgcggagcggcgcctgggccgcgccgacctggtcatgagcttcgttaacatgggtgagtgcggccgcccgcgcggggaccctcggagtaarctggctgcaggggaggggcgcgcatccgcgggctgtgccgggccctggccgaacggggartcacagacggtggacgcgaaccacaggggagtgggaccgccgtggttagggaaggtctaagggtcatgggggccccctgggctgcggggtggtcaggagcannnnnnnnnnnnnnnnnnnnnnnnnnnnnnnnnnnnnnnnnnnnnnnnnnnnnnnnnnnnnnnnnnnnnnnnnnnnnnnnnnnnnnnnnnnnnnnnnnnnnnnnnnnnnnnnnnnnnnnnnnnnnnnnnnnnnnnnnnnnnnnnnnnnnnnnnnnnnnnnnnnnnnnnnnnnnnnnnnnnnnnnnnnnnnnnnnnnnnnnnnnnnnnnnnnnnnnnnnnnnnnnnnnnnnnnnnnnnnnnnnnnnnnnnnnnnnnnnnnnnnnnnnnnnnnnnnnnnnnnnnnnnnnnnnnnnnnnnnnnnnnnnnnnnnnnnnnnnnnnnnnnnnnnnnnnnnnnnnnnnnnnnnnnnnnnnnnnnnnnnnnnnnnnnnnnnnnnnnnnnnnnnnnnnnnnnnnnnnnnnnnnnnnnnnnnnnnnnnnnnnnnnnnnnnnnnnnnnnnnnnnnnnnnnnnnnnnnnnnnnnnnnnnnnnnnnnnnnnnnnnnnnnnnnnnnnnnnnnnnnnnnnnnnnnnnnnnnnnnnnnnnnnnnnnnnnnnnnnnnnnnnnnnnnnnnnnnnnnnnnnnnnnnnnnnnnnnnnnnnnnnnnnnnnnnnnnnnnnnnnnnnnnnnnnnnnnnnnnnnnnnnnnnnnnnnnnnnnnnnnnnnnnnnnnnnnnnnnnnnnnnnnnnnnnnnnnnnnnnnnnnnnnnnnnnnnnnnnnnnnnnnnnnnnnnnnnnnnnnnnnnnnnnnnnnnnnnnnnnnnnnnnnnnnnnnnnnnnnnnnnnnnnnnnnnnnnnnnnnnnnnnnnnnnnnnnnnnnnnnnnnnnnnnnnnnnnnnnnnnnnnnnnnnnnnnnnnnnnnnnnnnnnnnnnnnnnnnnnnnnnnnnnnnnnnnnnnnnnnnnnnnnnnnnnnnnnnnnnnnnnnnnnnnnnnnnnnnnnnnnnnnnnnnnnnnnnnnnnnnnnnnnnnnnnnnnnnnnnnnnnnnnnnnnnnnnnnnnnnnnnnnnnnnnnnnnnnnnnnnnnnnnnnnnnnnnnnnnnnnnnnnnnnnnnnnnnnnnnnnnnnnnnnnnnnnnnnnnnnnnnnnnnnnnnnnnnnnnnnnnnnnnnnnnnnnnnnnnnnnnnnnnnnnnnnnnnnnnnnnnnnnnnnnnnnnnnnnnnnnnnnnnnnnnnnnnnnnnnnnnnnnnnnnnnnnnnnnnnnnnnnnnnnnnnnnnnnnnnnnnnnnnnnnnnnnnnnnnnnnnnnnnnnnnnnnnnnnnnnnnnnnnnnnnnnnnnnnnnnnnnnnnnnnnnnnnnnnnnnnnnnnnnnnnnnnnnnnnnnnnnnnnnnnnnnnnnnnnnnnnnnnnnnnnnnnnnnnnnnnnnnnnnnnnnnnnnnnnnnnnnnnnnnnnnnnnnnnnnnnnnnnnnnnnnnnnnnnnnnnnnnnnnnnnnnnnnnnnnnnnnnnnnnnnnnnnnnnnnnnnnnnnnnnnnnnnnnnnnnnnnnnnnnnnnnnnnnnnnnnnnnnnnnnnnnnnnnnnnnnnnnnnnnnnnnnnnnnnnnnnnnnnnnnnnnnnnnnnnnnnnnnnnnnnnnnnnnnnnnnnnnnnnnnnnnnnnnnnnnnnnnnnnnnnnnnnnnnnnnnnnnnnnnnnnnnnnnnnnnnnnnnnnnnnnnnnnnnnnnnnnnnnnnnnnnnnnnnnnnnnnnnnnnnnnnnnnnnnnnnnnnnnnnnnnnnnnnnnnnnnnnnnnnnnnnnnnnnnnnnnnnnnnnnnnnnnnnnnnnnnnnnnnnnnnnnnnnnnnnnnnnnnnnnnnnnnnnnnnnnnnnnnnnnnnnnnnnnnnnnnnnnnnnnnnnnnnnnnnnnnnnnnnnnnnnnnnnnnnnnnnnnnnnnnnnnnnnnnnnnnnnnnnnnnnnnnnnnnnnnnnnnnnnnnnnnnnnnnnnnnnnnnnnnnnnnnnnnnnnnnnnnnnnnnnnnnnnnnnnnnnnnnnnnnnnnnnnnnnnnnnnnnnnnnnnnnnnnnnnnnnnnnnnnnnnnnnnnnnnnnnnnnnnnnnnnnnnnnnnnnnnnnnnnnnnnnnnnnnnnnnnnnnnnnnnnnnnnnnnnnnnnnnnnnnnnnnnnnnnnnnnnnnnnnnnnnnnnnnnnnnnnnnnnnnnnnnnnnnnnnnnnnnnnnnnnnnnnnnnnnnnnnnnnnnnnnnnnnnnnnnnnnnnnnnnnnnnnnnnnnnnnnnnnnnnnnnnnnnnnnnnnnnnnnnnnnnnnnnnnnnnnnnnnnnnnnnnnnnnnnnnnnnnnnnnnnnnnnnnnnnnnnnnnnnnnnnnnnnnnnnnnnnnnnnnnnnnnnnnnnnnnnnnnnnnnnnnnnnnnnnnnnnnnnnnnnnnnnnnnnnnnnnnnnnnnnnnnnnnnnnnnnnnnnnnnnnnnnnnnnnnnnnnnnnnnnnnnnnnnnnnnnnnnnnnnnnnnnnnnnnnnnnnnnnnnnnnnnnnnnnnnnnnnnnnnnnnnnnnnnnnnnnnnnnnnnnnnnnnnnnnnnnnnnnnnnnnnnnnnnnnnnnnnnnnnnnnnnnnnnnnnnnnnnnnnnnnnnnnnnnnnnnnnnnnnnnnnnnnnnnnnnnnnnnnnnnnnnnnnnnnnnnnnnnnnnnnnnnnnnnnnnnnnnnnnnnnnnnnnnnnnnnnnnnnnnnnnnnnnnnnnnnnnnnnnnnnnnnnnnnnnnnnnnnnnnnnnnnnnnnnnnnnnnnnnnnnnnnnnnnnnnnnnnnnnnnnnnnnnnnnnnnnnnnnnnnnnnnnnnnnnnnnnnnnnnnnnnnnnnnnnnnnnnnnnnnnnnnnnnnnnnnnnnnnnnnnnnnnnnnnnnnnnnnnnnnnnnnnnnnnnnnnnnnnnnnnnnnnnnnnnnnnnnnnnnnnnnnnnnnnnnnnnnnnnnnnnnnnnnnnnnnnnnnnnnnnnnnnnnnnnnnnnnnnnnnnnnnnnnnnnnnnnnnnnnnnnnnnnnnnnnnnnnnnnnnnnnnnnnnnnnnnnnnnnnnnnnnnnnnnnnnnnnnnnnnnnnnnnnnnnnnnnnnnnnnnnnnnnnnnnnnnnnnnnnnnnnnnnnnnnnnnnnnnnnnnnnnnnnnnnnnnnnnnnnnnnnnnnnnnctagttgctggggatataacaatgagagaagtaaagtccctgccctcagggagatgactttctagtctagagacacataatacatacatgagccctaaaggtaattgtcrggtgtgctagacagcaacgccccatcgggaaacaggaggggctgaacaatggcaggacagacagggctagattgggggtttctgacctgagacccacacacaaggaatttgcatcctgacgccaacacctgatctcagtgtgatctgggctttccagtcaacctccccaagcctcagtttcctcctctgtaaaatggagatactcatcttatggggctgttgtgggcttgtgtgagatgatacccagcgatgcccacgtgcccagaacctctgcatctcttccttcattggtatctcacaattgccrtcacatctgtgtttgaaagagaggagagagaggctcagagcagataggtggttttcctaaggccacacagcagattgtccccctgcctccacatcttctgctcttctccaaaatagcagctgcctctccacacagcccagggcctggcccaccgttaaatgcagtgtgtgctgctgaaatggactgtgttgaatgggaacgtgtgatgtaaactgagactactgcttaaaaaatatgtttttattttcagagacagggtcttgctctttcacccagactggaatgcagtggcatggtcatagctcactgcaactgcaaactcctggcctcaagcaatgttctcacctcagcctcctgaatggctagaactacaggtgtgcaccaccatgtccaactaattgcttcaaatcttttgtagaggcgggatctcattatattgcccaggctggtctcaaactcctggcctcatctgatcctcctgcctcagcctcccaaagtgctgggattacaggcatgaaccactgtgcccagcgttttcttttctttcttttttttaactgcatacgttaatgctcactgttttgcaactttgttgtttttcatttaacaataaatcttttatccatcttaaaagtcaactattagggtgactgtatgcccaaaggtatttgtccttgcaataattgaaggtgggtcccttttccccaaagttctgtctggccaccagaatggtgcaccctttccatccctagtgactggtcctacccatttccgcagtgttttctcacccctgagtaaatgattatgactgccctcattcacagaggaggaagctgagtctcaaagagtgtaagtgactggccccgggtcctggatgcacagacccacaggagcagatatgaaaggtagatcacagctgtaggagggtaggccctggaagtggggcagcagagtggtggttagtgaccctggagtggggctcactggctttcaattctgagtctactgcttaagagctatgagctgttgaacagatcatttaaagtctcggcatctcagtttcctcatctttaaaactgggataataatgcctgtatccggccaggtgtggtggtgtgcggatcacttgaggtcaggagttcaagaccagcctggccaacatggtgaaaccttgtctctactaaaaatgcaaaaaaaattagccagkcatggtggcgcgggactgtagtcctaactactcaggcggctgaggcgagagaattgctggaacctgggagatggaggttgcctgggagacagagcaagactctgtctaaataataataataatgcctgtatcataatacaatgattaaataggttaaggcacataaaaacctagcaagtgtctggccaggcacggaagctcacgtctgtaatcccagcactttgggaggccaagcgggggcggatcacctgaggtcaggagttaaagacaagcctggacaacatggtgaaaccccgtctctactaaaaatacaaaaattagccgkctgtggtggcrggcgcctgtaatcccagctacttgggaggctgaggcaggagaattgcttgaatccaagaggtggaggttgcagtgagccgagatcgcgccattgcactccagcctgagcaacaggagcgaaatgccatctcaaaaaaaaacaaaaacaaaaacaaaacttagcragtgtctggcactgctcaataagtggctgtattatgagggaagggcctgcggattatgccccatcccccagtcatttacttagggacctagagcagagtagtaaaaagcatagctccagaatctgaccaggctgcctgggtgagatcctcattccacctaggcatccttgtagtggatgctgtggggggcttcccagagcttctcttcagcattgagtcgctcgtgacccagctgcctggagtgccggctgctgacagctcacaggggagtccttctctaggttttttttgtttttttttttttttgagatggagttttgctcttgtcacccatgctggagtgcaatggtgcgatcttggctcactgcaacctccttgggttcaagcaattcttctgtctcaccctcccaagtagctgggattacaggcacccgccaccacgcacggctaattttgtatttttagtagagatggggtttcatcatgttagtcaggctgatcctgaactcctgacctcaggtgatccacccacctcagcctcccaaagtgctggkattacaggcgagagccaccacgccctacccttctctaggtattgattgactgggcctaaagaactgcccaaggttaggcaccatccctggggacacccaccatccaacagctggtctatggcagtaccagtgcccagcccccttgccttaaagagagacagctctaaagggccaccagcccccagagctcccagtgtggtctcagttgtctgaggcctttgttgtgggtgcatccaaaacttgctcccttcattcactacaaaaagcagtaaactttccagttttcccagtaaactttccgacccagtgtctgttgcccagagagcctaacctaagatacaatttacacgattatggtctaatttatttaatgctctgagcctcagtttcctcatctgtaaaatgggagagctacctcattagatgattaggagtattaaatgagttaatctgtgtaaaattatgaaaaragtggctggtcagtgctcaataaatgtcagctttatttgtttttagcccaaggccagctggttagtggcaagaccagaagcaaaagttggtgatttcctttaactgctggctctatcttgagtagcagccgttccttctgaacagtcctggaccctgcacacatcagggttctggggaagytgatggctgcaagacctgggtgtggagaaagttgactcattcagggctttaagagcagtctatgaacactccttagcaagcactgctgcaaacctactgtgtgctgttcctcttcctgtttatcttgggggctaataaaagtatagccccagcccaacccaaagtctgctcatttactgagaargagaagcccaaagacaactcaatataaatgatccccaaatggaagaaatgtccattcacccacctggcaaacatgggtgtgagggttcaacagttcagaagaccgacaagatccttctctcgttttctgggagacaaacaaggccaaaggagaggaggcatggctcccggctggagatggggtctcgctgtrtcacccaggctggmgtgcagtggcgcgatcacagcttgctgcagcctcaacctcccasactcaagtgatcctcccacctcagcctcccaagtagctgggaagtacaggtgcctaccaccatgcccagataatttttaaacatttttttatagagacgaggtctcatgatgttgcccaggctggtcttcagctcctgggctcaagccatccatccacattggcctcccaaagtgctgagatgacaggcgtgagccactgcgcctggcctcttgcatgtttttgaaatgccagttcctgaagtgaaaatcccatcatggcttttcctgctcaggagcttctgtgtgtcccttcaagccagaatggaattcacgtttccccagcctggcattcagagttcagcgttctagtcaactgcaccgcttggtgctcccttgacatatctgcagcttggagaggtcgtggattaggagaagtgaatgtagactttggagtccagacagactttgacccaaatcccaccttggatgcttccagttgtggccttgtgcaaatcagttaacttctgggatctttagtgctctcatctataacctgggatgaataatgtcccccacagtgttgtcatggtgccgccttcaccatggscctcgatggtcccacttcctgagatgcacagagttctgtgtcccctccaacactgtgccagtgctggtctgtgtgaccaatagaatatgacactagtggtgataggtccctgccaggattagtctataaaagaccatggcttccatctctcggatgcctcgttctgggggaggccatgaggtgagcagccctatggagagggccacatggtgagcagctaaagacagcgcgtggaagtggatccgtcagccccagctaagtcttcagagactgcagccctagctgacagcttgactgtgacctcataagagaccctgatccagacctacccagctaagttcctggattattagccctaagaacaatgtgcaacaatatgtgtttgttgttttaaactgctacatttgcataatgagttacacagccacagacaactaacacagtcaggttagcatgaacagaaaggacgtaccacgtgtgcccagcatggtgcctgacacaggtcagtgcttaaaaagtgtgacctggcacagcatctcccgcctctcagcctttccctgggtgactcttcagttctcttcctcagttcttccacccctcttgaatatgttttcaaggaaagttttctctgcctccttcttccaaagccctgtatgtgactgcgaccgtcactgaagcacctgtcctgcattgtgtgcacttctcttaggattccagtcgctttctgtctatgtgatgcaggggctcacctagcccctctttctcctcctccccagcaacctctgaacaacctgagaatagggaccaagtgtgactcttcctggcaccccccatggtgcacccagcccctgagtggcaggaaattgagggaaagaggaacccagcaggaggcagcgagtgccaagagcagggaggagcctgggtctggtcaggtgggacagagtagggccggccctccctgtctgtgtgcgggccgacaatgggtgccatagctccctgggccctcccctggaaccccaagtccccacagggccctgcctggaggaaggtggcttcacgggcattctcgggtgtctgttgataggagggccttgttgacgggtgacccccatcccaatatgtcccattgaactccagggccactcatttcacactggccccaagtgtgaacatccacatcacaggcctctaatctgacacrggcctctaatctaaccctggaaaccctctgtccctccttggcctcagtttccccatctctgcagggttgcctgaaggcctttccaggtctgaccaaagaatgtgcccaccccctgcctgctgatgggggctcttccgggctgaggcacagggtggggaggygcacccagcccccctcctcccggaacctctttcccataggcaagagaggatgcgtcaccatgaccacttctttctggaaaattcccacagttcattctttcccgggatttcactggaggaattgcgtctttcttgctyacatctcctgggatctattcttggccttggcgggcttgatgtggaggcatgtgtgggtgttcccttttaatttggggtccagaactgtctgaggcctggaccggtaattatgagagcagcaccatttatggaaacagcccttgaagcaagccagtgatgagacccrgctggaaatacctcagcatggagccctgggctcgcctygaggcggtgctgagatttctgggtgggagaagccccttcaggacgcagaaccaacaggtcatgagtcccgccctcccttggcctgcagaggctgtggggcccaagccttcttttgggtctgaagtgcccctgccccaccgcctttgctgcctgtgggaccagccaggcaggcccagcccatgcacccggggctctgggggagccgctgtccaccctcaggggccaggccgggagaggaggcaggtccacagcaacgggaatgtcggtggcttctgatggagtcacatggggacatggtagccacacccagactggcagtgatacccagcccaaagggctctgagttccggacactgagccgctgtcctggggacaagagacccttgggaagaaggggccggggcacccccgctctggggccccgaaacayaggggccgatgagttgacgtgcgagcctcccatgtccacccacgtggctccgtcccggccctccaagggctcgctgtccagaggaacagctgaaccagagacagcaagccctggcatgggggccgggagaggctgaaagcctgacctgcctggggtctgaggactgggagccttctcagtcggactgagagggacggggccacccggsgagagcagcttccaggagggactctgcgggaggcgtctgcaggtagaaggcacaagaggccggagggacagatggcagggccagcrmagggagggccctgggacactcttcctgtgggcctttcagggctggggagggtctgaggggaggtgggatgggtcacaggccacaagattctgctctgagctggaggatgagggtgtcttttgaagtcccactttttggtcagaaataagacagatttaggttgtctgggtgagactaaattgcccagagcacaaaaatagccagagcccttgttgatgttgggctgagggtcgcagagtttggcatctggaagcctagcctggagtggcaggcacagggccccagatgtggccagcggaagccaacttctgcccacagggcctttcctggaagcgtggggttgcttccgaagtttgctttatccaaggctggaggaggaggctgagggtttccatcagcacaggttggtgattcatgattgtttattttcccrggagccacattaaggtggtttagaaarcaaattcatttgctgcttccccagacagaagctggttcagcgtgagaccatttggggcagcttttatgattttgtagaaaataaayatttagaggtgcttatggaaccaggtatagcttggtctgtttcctgtgaccaacgaattgctctctgcatatgtcttttcatatttttgccaatacatctttggaattcttgtgtcaaatgtaattttgctaggtattgctaaattcctcctctacacagcattcctatcagcaacgcctgagagaatgttcatgtctgatcttaatctttttctttctcaaaggccatacggagcaccctatgaaaagcacccattactcttgagcccataaccttttctgtttccttcatagcatttacagtagaacaatagaaatgacatcccatattttagttgctttttgtttgcattttatgtcttccgttggaccgtaaactccctgtgtgtggaaaaagtatcttgtttattgttgtattgcccagaacagtgttgtacacacagtaagaactgaataaatttatttctaaattaaacatgatgawcttattagatgagtgaaagaatacatttatttagaaaaacttaattcaaagtattatttctgaccaaaaagtaagacttcaaaagacacccttgggtgckgtgggacaaggcacgttctttccttctccrccctgggctgggatgagcrgccacctcctcctgcccacacacgtctggccccrtcccctgccccgcacagctgttcgcctgcccatggccggaccaggtccccaccacgaggacaggaagtgctccccacatccgcctcggcccgcacagcctggtgcttttmcaaacctgaccgtggtcactgagcccagtaaccasagagaatttttaaaaagactcacaaacatatcattgaaatctcagtgytgggttttggggaaggcactgggcggctcccacccctgctttcyggaaacacagatttctagagtttgaaasggaygggaggctaaagtgagactgccctaaatatagcgtcctgggtatttycggacacctggggaaatgtgggctttattccgcaactacagcctttgtttgattggcaggccagcccctgccacggggccctgctgcccatctcacttccagcctggcctctaccctcacctccactgtgtcttctaattcccctccacccacgccgcctccctgctgcccccgtcccctgtgcttcccactggccagaggcgcagcccaggctcctggcccrggattcgcaccctcagcaggcaggccgcagcagagctcatgtgccgtccccaacatcgctgacctgtgggcgcctccaccctgtgcatgygaggtcccctctccctagagcaccctccctgccaccttctccacctaccaagacccatcccacccttcaaagccagttcagatgccacctgctcagatcccatcacccagtgagaccctccgacttccccagcacctgactggcctctctrggagttgtcactcctgccctggtttttcttgttcctttccacgtttccctccttcctcttccagcttgttccagaaaggaaacgtgggtctcctgccctctgctgtttcctggtgcttgctttccctgccctgccctcagacccctctgctctggccctctgccttggctggccggcccctgcagggccygtctccctgacaccatggcagattcgcactcatgcctcagcccagctcagctgtcagccctgagccctcccctgccgcacctcccatccaggcagygggcaggctctggatgscttrtgtcccctgagatgccrtcrgttatgtcggttatgtycctgtctaccaggtttccctgcagggctggggcccttttctgccttgggtccaatgtccatcttccctttagcctggaagttcccagaggaggctccctcctctgtctcatctctgagtcccaggaccagccgggccgagaagggggcgcaacgggagttcagggtttggagcctggggmctgctgagcaccagccagctgcggggctcagggtgagcctggctgcagggcctcttggccctgtctacaccccgggaccaagcctggaacaaacgtttgcacwaaatgaagccgrccccacccaggcctccctgggtccgctccaccttgagtggtgggtgkctgggggcggtggctcacaccagctctgccccctccagagcccgagccattctgagtgccagcccagcgctgctttgtcttctagtggagcgagaccgtgccctgggccaccaggagccccattggaaggagttccgctttgacctgacccagatcccggctggggaggcggtcacagctgcggagttccggatttacaaggtgcccagcatccacctgctcaacaggaccctccacgtcagcatgttccaggtggtccaggagcagtccaacaggtgccttccccttggcccgggtgccccacctaaccccccacctcacagtctcatggtcaaggcagcccagcagggagtcgtggtgggctgaaagagagcctcaaagatgggaaggatgcttggcccgaggcccctgcactgtgggaagagccccagtgacaatcctgacttcaagtccctgccctgccatcctggctgtggggacttggacaggtcactgagcctcagtttccccatgtgtacacctctgtgggctgaggcaatgagatgaggctcagaaggggcgcagccagagtcaggtgggagacgctccggtgacagcccccagcgggccctggagacacggaggcagctgtgccggccgccggttaattgttctttcatgtccacagggagtctgacttgttctttttggatcttcagacgctccgagctggagacgagggctggctggtgctggatgtcacagcagccagtgactgctggttgctgaagcgtcacaaggacctgggactccgcctctatgtggagactgaggatggtgaggctgggggctctgcagcccctggggcttctctgtgccagcacaggcagcggtagtggcttcctgtggccctgggtgcccggcctcaccagctgtgcccgctgcaagggtcactgaggtccagggcacgaggtctggcctagtgggggtgctccctcctctccctctgcttcccaggaagcaggcggctcttcccacggagcagcctccaccttgggagtttctgtcctgggaagggaaggaggggaagtggctgtaccctcaggcactgaggccaggaggctgggtttgaagcccagcttggcagtgccctgcctcagtgacsttggctgggacttacctttccagaccccgtcttctcttccgcaggatggggattcacgcccttgttcattccacaggtgacactggggagagcctcttttatgccaggcagtaggaatacagaggccaaagtgggcacgagatgggtgtgtttgaggcccggcaagggggcgccatggagcagcggtgagggcgggggacccaggggccattctgagtcagagtaaaccagggccaggtgctggggttcttagcgtcatttattttatttactagcagtggaggacgacaggatctgattcaggttttaaaagagaaccctctgagatgcccccctctcggggtggagcagagctccccaccccttccgtgggctgcacccagtgacttgcttcccgaaagtgcggtgtggacagggcgtgggggacctgacgcgcagcgcctcagccaggtgaggaaggctcactgcagtgaccggcacggygctagcatgtgccctgggtgaaagggaaggagaaggccactgagcctcagagggccccctccgtgaacccgaaaccccagtccagccacgagaaaaccgtcaaacaaacccaaagagaagggctttccgcagaatacctgacaagcgcttctcaaaaccgccaagctcatcaaaaaaaagggaaggttgggaaattggaggagcccagaggcacctaagaagaccagctcagtgcatgtggggtcctgggttgagtcctggaccagcaaaaggtcattagggagaagttatgaaatccagatcgatcatggtgtttacttaataataaggtatcagtattggttcattagttatgagaaaggtaccctrctagtgtaaaatattagcatttcccagaggaaactgggtccaggtgtatgggaactccttgtgtagtttttttttctttgagacagggtttggctctgttgctcaggctggagtgcagtggcgcaatcacagctgacggtaacctccaactcctgggcgcgagcgatcctcccaccttagcctctgtactatctttacaaagttttatgtaactatcaactgttgtaaaattaaaacttaatatatgcataaaataaagaaccccctgacttcagtggagagagcagactgagatggacaagagtgaagtcagagagacgtgtgggggccccacagtggtccaggtgggcgctgtgagygacttgttggtagcagtggagatggagaaagatgagtcgatttcagtgtcaggacatgcttatagctggcgaggaggtgagggaacaggaggaagcctgaatgatgtgtggttggagccagtggatttttttcaatagatttttctttttggggaaaagatagatgaagggcaggtttgaggtgggtggccaagggttctcttttggctggaatattactgacccccctgggatgttactgagatcactggtcctcatggaaatgccattacagggaccggtgagygtgaagacccaggcgagggaggtgctggcatgtaagtggatttaaagcatgggatgggaccaggtcatctagggaaggagggtagtgatggagaagaaagagggcctggcccagagccctgggacctccaacatccagagacctcacaaggaggggccacagagagcccacagagaccagccagggagggagcaggacacctggaggatgaggtgatcyagacgccagagtaaagtgtttccagaagcaagggtttgtcatttgtgtcctgctgtgggcactgaaggcaagaacagagaagtgaccaagggttttgccatcacagaggttgttgatgacctaaatatccgtggagtgtgggtctgactgaggaggtggagggagacaggcagtggaggcaggagacagctctttccagaacctttgctggggaaggggagcagagacatgggctggggctggagagaacccgggacaaggcaggtcctttccaggtgaggagacgcctgcacgctgctgtggtgatgcagtgattctgtgcagagggaagaaaactgcaaaattccgcacaagttggagcagggagctggagtgggggaggtggagagggcggggggatgcagaggacaagacggggggcctcttcagagcagggacccttcctgatggaggtgagggatagtgtccccactgtcgcagtgaggggtgaacctgagctctgggaggctgtagtggggcaggcactcactctccgggttgtcacaggattaaaggagggtgcttggcacagagtgatgcccagtgaaggtgttcatgagcgtcggtgtcacccagcggcgcctgctcattggacacttggtgtctttaatgagctggggaagctggggggaagcttgggcggggtggttggagtttgtgtctgaggctccactggggcaggaggggacctagcctgtgccctactcgcggagcctgacctcagctctgtcctgcgcccgggcctgtgcgctggacacggaggactgactcggggcccccagcccagggcggagccggccccctccctgttgcgggtcgcgggcctggcctagagcctgcgcctggccggggagacctgctgggagggagtgcgtcagggcgcgggcgcccgccctgctctgtgacgcgcggcccgaggcgcacgcagggctcacaccacctgtcctggcctccgacccgggccgactatggcggcgctgcggctcctggcgtcagtgctcgggcgcggggtccccgccggcggctcagggctcgcgctgtcccagggctgcgcccgctgctttgccaccagtccccggccccgtgccaagttctacgcggacccggtggagatggtgaaggacatctctgacggggcgaccgtcatgatcgggggcttcgggctctgcgggatccccgagaacctgatcgccgcgctgctcaggacccgcgtgaaagacctgcaggtggtcagcagcaacgtgggcgtggaggacttcggcctgggcctcctgctggccgccaggcaggtccgtcgcatcgtctgttcctacgtgggcgagaacaccctgtgcgagagccagtacctggcaggagagctggagctggagctcacgccccagggcaccctggccgagcgcatccgcgcggrgggcgccggggtgcccgccttctacacccccacgggctacgggaccctggtccaggaagggggcgcccccatccgctacaccccggacggccacctggcgctcatgagccagccccgagaggtgagggagttcaacggcgaccacttccttttggagcgcgccatccgggcagacttcgccctggtgaaagggtggaaggccgaccgggcaggaaacgtggtcttcaggagaagcgcccgcaatttcaacgtgcccatgtgcaaagctgcagacgnnnnnnnnnnnnnnnnnnnnacgttcctaacatttatgtaggtcgcgtgataaaggggcaggaaatacgagaaacgaattgagcgcttaacgatccggaaagaggaagatggagacgctggaaaggaagaggacgccaggacgcgcatcatcagacgcgcagctctggaatttgaggacggcatgtacgccaatctgggcataggcatccccctgctggccagcaacttcrtcagtcccagcatgactgtccatcttcacagtgagaacgggatcctgggcctgggcccgtttcccacggaagatgaggtggatgccgacctcatcaatgcaggcaagcagacggtcacggtgcttcccgggggctgcttcttcgccagcgacgactccttcgccatgatccgagggggacacatccaactaaccatgcttggagccatgcaggtttccaaatacggcgacctggcgaactggatgatccctrgcaagaaggtgaaaggcatgggcggtgccatggacttggtgtccagtcagaagaccagagtggtggtcaccatgcagcactgcacaaaggacaacacccccaagatcatggagaaatgcaccatgccgctgaccgggaagcggtgcgtggaccgcatcatcaccgagaaggccgtgtttgacgtgcacaggaagaaaragctgacgctgagggagctctgggagggcctgacggtggacgacatcaaaaagagcacggggtgtgcctttgctgtgtccccgaacctcaggcccatgcagcaggtggcaccctgacgggacctggatctgggcggggtggtgcgctcctcagggcggrtgccaccgggttccccaggggaatacatgtccccagctctgggaggggtttgcyactggcctcctactttcctccctaggtggacagtgctcctctagagagctgcgactttaattaaaaacaacaggaaaacagatcagttcctcactgtgtttctcgagcactgcaaggcgcaggtctgcagtggtgaggaatggatgtccgctttgctctgtgatstttacacagagcgtgcacagctcagygcattcacagcaagatttgattcaagcgcctccctcgtacttgaaccatgaaatggagataaaaactgacgagggagaaaatcactcaacccagagtacacctgaagggacattttactactgcagtgagaaataggcgagcaaagatgtgagtttgygattggaagacatgctatcttcaygagcttgttttttctttttccttctctttcttttttcttttttttgaggcagggtctggctctgtcrctcaggctggaatgcaatggaatgcagtgatctcactgcaacctctgcctcctgggctcaagcaatcctaaytcagcctcctgagtagctgggactacaggcgcacatcacaatgcctgcttatttttttttattttttaaatttatttatagaaatggagtttcaccatgttgcccaggctggtcttgracacttgagctcaagcgatccacttgcctcagcctcccaaagtgctgggattacasacatgagccactgagttgggccaattaaccttagcttactgtaatttttttttcttttttagacagaatctcrctctgttayctaggctagagtacagtggtccagtctcagctcactgcaacccctgcttcctgggttcaagcaattctcatgtctcagcctctcaagtagctgggattacaggcatgtgccaccatgcctagctaatttttgtatatatatttttaacagtagagatagggtttctccatattggccaggctggtctcaaactctgggcctcaggtgatccacctgccttggcctcccaaagtacaggcttgagcyattgcacccrgccttcttgaacrtttttatccrttatctggtatttcttctggggcctttgttgttaaattttgtttccctgaagcctcccctcctcctcccacatctctcctcctgggacctatgagatgttaagcttctagatgtccgtagaaggaaagcaggaccatctccaagggaagggaccgggtgatgggagagactgagaggggagaggctgccggtgctgaaatccaccaggaagcttcctctatctgtgtgtggccaaaggctacagcctaggacaggaggagttctagaaccctaaccaagggactagatgagttttctcagcttcatttgaattgttcctgcatcattcacaccagacacttaggccctcctctctgggatggaggcccaaactggccacttgtgtgatggtccgttgtaacccaagaggctgygaggcatttcctcctgaatctatagtctcaaaaactaaaattaagattgtgtgtgtgtgtgtgtgygcatgcacgcgtgcacacgtgctgttgacarccaagcctggcctggtgcatgcactgcataagtgtagctctgggggttcccmggccaytgggggcatgtggtcagagtagtaagttctcactggtcaaggacagactttccaggggcccattggagcctcaccctgcaggaaaggccagatcctgggaaggagagcagrgcagggagagttggcgctcatggagggcacagactgggggtgtggaaaaggggccagggactatggctggggttgggggcttgaaatgaaatgtcatctagtgggcagtggggtgccttttggggctcctggagaggggcacctgatttgccctgggcgtcagtttcccaggagcagtgtggaaaaggctgaggtatctagaagcggacaagtgaccctctgggcctccaactccacctttctggaaggggcctgcccacagctgggcagcctgagagccccccaccttgactgcttggccttccctgcagccagctggagccagggagtcctgcctaagaatgggtgggtaagaagcagagctgatggagaagggaggctctgggctctggaaggagagggctggggatgggggagcttctccaggcctgccagatgcagggctctgaacccagacccactgttagtccccttcaycaccccccatcttgcccagccacatccagctgggccctgcagtttgctggaaaagtatatgacaatcytggctccgacccaccttgctctgggaccttggacagttgctgctctctctgggccttagtttctgcttctgtaaaatgggaacctgggattagctgcttccaaggttccctagtcaggctcgcctggcctgtgagacctacagaggggttcccagcacccaagccaggcctggctcagaggggctctgtgagggtctgtggtgtaactgatctaatgcgacattctatcctgtgtctgggagaccccccataagacccttgaacacagctgcacagaagcaaatagtgaggaaagcctgcaggactgatggcctctcaggccccatggcaggcagggctccccagggagtcacaggacagagctgcaagtggagccaggagggctgccctgggccccaggctgtccccatgggtcagccagtctgcagagtgacactccagtgcccgggctggtgaccaccaccaccccactcaggctgctctgttctctctccgttgtgacctcacttgtcttttcctctgtgccccagctctgttccttgtatttctgctgcttccccataaccttgactcaccgtgamycaagccctgcccagtggattctctctgggcctccttcccatgttagcatctgcagctcacagcctccctgtctcagcagctcttgtccatgctcgtgagagggagggagcctctcctgccagtgcatttgtttgtggcggatgatgtcacrggtcaaaggttggtctctggattcactggttgttcagtcaagtggccaagggacaccagggctgaggcacagctgcttaagggctgacctttgagtgggactgagggtggggcaggcagtgtccttgrcctgtagggtgtactggagaactacgtaggaataaatacatctgtgtgtgtgatgtctgtctgagcgtatgtgcatctgtgtgtttatgcaaacatatgcctgtgtgtacatacgtgtgtacatctgtgcttataacatggaggtgaaatgtactttcgtgtaaactgaacaactggcactgtttaaagagacatgaaaatgagctggtaatcatgcttctgcmattcagtatcaggaaatttcacccatgcacggagtgaagaggctccattgcactcccatctttatcatgaaagccgggaaataacctacatgtctatgatgagccaatatcaagtcaattacggtatactgctccaagggattttataaatttgaaatgtttattgtggagacttatttaaacaaccagaaaaagttttgtgttttgttttttttttcttgaaacacactctcattctgtckcccagctggagtgtggtgacacaatcacacctcactgcagcctcaacctcccaggctcaagcagtcctcccacctcagcttcccgggaagttcaccaccatgcccagctcatttttgtttttatwtttttgttgagacagggtctcactatgttgcccaggctggtctcaaatgcctaggttcaagcaatcctcccacctcggcctcccaaagtgctgggattacaagcgtgagccaccttgcctggcctcaaaagtttctttacttaattgcttttacaatagaaaggttattgaaatccaaacaagtacaggatgatacacagttttattggtgaggcttggcatctccagggttagttatcatgttttcagcggcatcctcagtctggaagcggctgtgggggacaatcccgtttacaggcttcactcctcctggggctgaggcccaagtcagatctctgtttcagccttttctttctttcttttctgtccataagcccagctcgtgcataagaactcgggctctggaatgagactgccgcaggctgcaacctgggctctgggacttggttcaatgtttctgctctgcctggcatctcccttgtgggcatcagggagacagttaatgccctgctcttgggctgtgcccagcagaacaagcactcgctcaacctggcagatgctaccacgagctgtctcggtgataagtttgacattcacaccccagaaagtgcgggacggaagacagaacacaggtctcggggtccttggaccaaggtgggagcrctggttctcggagtcactggcagtaggactctgggtctcctgtgaagtaggagctgcagggtcactgtaaggacccaatgaggtgatccatgggaaaaatcttccaacttgtaaaacacttcacaaatgttattatttgtgacgcagctgtcactaataacaccgcctgcagctcactgagcaccccctcccacctcctccaaatctgtccccaggagagacgtggactggctggggctggaccaaggactccaggcttcagwtgtggaaactgaggctcagcaggaccccttgggtcctcagcctccacgctcctggacctgcccaggccccggcagagagaccgctgctgtgtctgctgcagggccrctgcccgtgagtgacccctctctcctttctgtctcagggcacagcgtggatcctggcctggccggcctgctgggtcaacgggccccacgctcccaacagcctttcgtggtcactttcttcagggccagtccgagtcccatccgcacccctcgggcagtgaggccactgaggaggaggcagccgaagaaaascaacgagctgccgcaggccaaccgactcccagggatctttggtgagggtcgggcaggctggggccgaggccctgtgggcttctggctgagagaggcagggcgagaaccaagtggtggcccagagccctcaggctcaggtcggttcaagctgacggccactctccagccacctttcctgacaccatcttggccctgatgcaccctggtgaccggcactccggaggcctgtcctggctgtccctgctgcccagaagtctccctctctccccctggctcctccgggtctttctcaggagcctccttcagaatcagctgccccttccctgggagccgcagcccctcatgacctgcggttgtgcctgggcaccctgygggatcctcrgttgcttatgcgagttttctccccaactgggccaagcccttcaggatcagggacaggcctgacccaaccccgtgccctccttcccagggagtcggcccttgactggcctggtcgtgagccacttgaacctcgggaatgggtgtggcaggagagggtgggctggagtcacaggggtctccagagaggaggaggcacaggatggccgagggtcctgctgggctgtttactggagcataaagaygctcataggctgaaggacaggggaggactgggcacagtgtcactctagccattgggagccatggcaggcttctragctgggtcatggtacaagcagmgttccagggatgggctttatgagaccaaatggtttcctgtcattcatttatttgacaaatgtgctcatcagggcatcccccaccctggtaccccatagtagctgcacacagyaggaaccccagaaaagaccttgccccttctgtccctgcagatgacgtccrcggctcccacggccggcaggtctgccgtcggcacgagctctacgtcagcttccaggacctyggctggctggtaattgctgactctycttgtttctgaaatgacaatcaccacctgtagatcagaagtgaatctgyagggaggacatagaatcatggtgacttcaattttcttatgtatttttttcttctgtgttttccaagttttctaaagtgagaatatggtgagaaagggttttttttttgttcwgttttttgttttttttaaaaccatgaaaatgaagactgaatcaaccaactaagctgtcagcattgcygcagggtaactgagacctccctgcattggctacgactgcagctctgggaggygtgggcaggggagggccggctggggaggggacgcaaagtgaagatatgggggwtgttgggcctgagctcctgcccagccttttctgccgggggttcctgggtggattcaagcctcttgggggagacggccctgcagggctggaggatgggtttgggccctgaggctcagggaggggcacatggatgggactcaccttctcccttgccccccaggactgggtcatcgctccccaaggctactcggcctattactgtgagggggagtgctccttcccactggactcctgcatgaatgccaccaaccacgccatcctgcagtccctggtcagtaccatgcccatcctgcccagccccctggggtggggggccctgtggagaggggtctggtccagctggctgggagggcagtgaggccacctgctccgcgtctcagggggctttgtctgcacagtcagtaacgtcgctaacttcccacagctctgcaggaactggtccttatacagccacactacacgtagactcgcacccaaacacggacatacgtgaacagtcgtgtacacatgcctgttctatgcaccgaacaaactcctgtgggacacttacgcacctgtgtgcagcgctcagaggcacagcacatgaaacagatgtgtacactgtgtgggggctgtgtgatcttagcacacgggccgccgagtacgctggcaagtctgaccgcccgtgatatgtgtgcacagtgtgtggggtgtgcgtgtgcactcacccacctgtgccgcaccgcaggcaggaagcttctagatggtgtggctctcaaccttttggcttttcccccagtttctctcttggccatctttgttttttctggatcccctggcttttgatgccttggtatctggggcaaccttaaaggacaaaagcaggtttctgatgggatcactggtgctgctcactgttgagtgctctgtgtgtttgtggattctggcaccgaggcttccttctagaactttttacctagaatcccagttcctggtattgcacagccttatgttttccccttaggaggttcaacggtgatgccttgatcaggtgcggtggctcaccctgtaatcgcagcacacgagcccagaagttcaagacaagcctgggcaacacagcaaaaccctgtctctaaaataaaaattaaaacacacacacacacacgtgcgcacactatgccttggtgtgagaggaaataaattaccaaaagctgctctgagcctatgataatgcttcctttctgggcagtcaaatggtgtttgctggacacctggagccacctccttggaaaggcccagggatgatgaggacgcgtggggcggcccagcccagccaccctttatgccgtgtggttctcatggctgcatgtgtgggaggcacgcgggaaggtgactgcatctgcagctcccagactccatctcctctgcccttgcccctgcccctcaggggctcaactaaagtgagcactcgtaacctgctgggcagcaaacagacaggcgctgcgctctaggggaggctgtcggtttgttggtttgtccaaagcaaaacaaccgtggaggtgacgcctcctgtgaggaagagcagagtggctgctccatcagtggggagagactgggcctggcctctccacagaaggagggggccagtcagcagctggaggaggaatgttccagcagaaggagcaattccaaggccctaagacagcagtgagcttggcaggttcagggccagcagggagaaggggctgggtgcagtgagtgggaggagggcggagggaggtgacaccagggtgggcagggccggctcccctagggcctgggggtctgaatgaaggtgttttattccaagtaacccaagaggctgtcggagctctttagcaaagcagtgttctggtccatgtcaccctccagaaggacctctctctggctgctggggraggctgggattgggggtgggggtggtggtggaaggtggaggagcaggggatgagtgaaggctgctgtggtcacctgacaggtgatggcagctggacggggcaggtggtccaaggcagcatggaggtggaggttgagccaggggctgctcccagggaagggaggaggcaagaggagtcatccaggaggcctcccaggcgggggctatgatgtcagggcgggaggaactccatgttccgctgaggccccattagaccccaagtgcagaagtggcgaggggagcaggatccacaagtctggagttcagaagagaggtccaagctgagccwggggagtggagaggtgcgggcacgtgcagggccttgaagtgctgagggyggatgcagtcctctgggggaaggagcagcacaggagaggggcggaggcctggcctcccagagactggggagggaggccagggtgtgggaggcagagcctctgggggtccgaagggccaaaagaagaaagtggtccttccaggctcccccttggggacctcactaagggcacaaacctggccacacagttctccttcccattatccccaggaggaagtctgagcccttggcctgggactccaggcccctcattagcgccttgcccacctgctgcacaccccctgccatgtgtccctccctgggcactgcgtgttactacagctcccactcctggagccttgaggactgctcttattcctgttaatagttattattattgtgctgctcccatgtggcctggagatggccagggcagggagcaggtggagctggggtggggctgggtgggtccttggaggaggccactgggctcatgcccctgcctgtgccctcttcctggccaggtgcacctgatgatgccagacgcagtccccaaggcgtgctgtgcacccaccaagctgagcgccacctctgtgctctactatgacagcagcaacaatgtcatcctgcgcaagcaccgcaacatggtggtcaaggcctgcggctgccactgagtccacccgcccggcccagctgcagccacccttctcatctggatygggcccctcagaagcaggaaaccctcaaacccagccagaccccaggccggggcattgccagggaggaccctcacaaccacgtacatgaccctttctccttcatgccaggctcctatgctccccttgccctgccaggcatttgtgtgactgtcctgtttccagcccaggtggtctcaatcatcaggcagtgttctacccaaatgcaaacgcctctcccggaggcatgtcctggctggttctttggggttggcacagaagtcctgtctgaggtcctatccatgccccttactggctcaggtcgtgagatagatgtggaatgacctgagaggcacctggagcccactgttggccaccttgagctcttcaccatccatcacagggtgtggtgtgtgtagtcagggtctggttggctccccattgcctgsccgaggtgcaaggtggggtataaaactggataacccctgaagtattgtatattcatggatctgaagcactgatccactggtcacaggtagacatgtggagtcaactcaagaaaaagctgagtgaacagcatgatttagggctaaagccaatggcatttatcttcccttgtcttcctgctttgcatttgcctctgccatctaggaaagacatgtaagagcatggacattttactttggagaaacagaaaaatcttggggcttccaattgacccatctatctgccaccatgttgccccaccaggagctcagctctgtggagttttccctttgctgagcaagcatgtggttgcattgggtggcccaggatgacaatgcacagcacagatgccatcatttccctttcccctctgaatggcagacatcagtaatcaatctggaatgtttttcttccaaatctgagtggaattttcaaatgatcagcacagccactgccaacagatatgatgtaaagtgaaacctggttgccatcttctgccatgctgaggagcagtccatccctgcccgagcatgtatcggcaacatgggcagcctgtgaccgggtctggggcgaggccaggggccatcaaaaacaggctgatcaccaaagtcagtgtcaccctggatgcccagcagccctgtcctgtgtcttgggcctgtgagtcaaagaaaaggtccttttcagggagtgacaagtagtaattaggctgagttgggtggagaggtttgtctcagcctctgctgttctcggaaactgctgttctccttggagcagccactgggagttggagtgtttatttgatttctgacttgctaagcctgtaatttacctgctggaatagacagagtccagctgcccaaaccgtgtcattaaaagcagatcctgcgcccgccccatccacaggcacagccyggcagagtggttccacctccccatgggcccaaggatgcgcctctctggagttcacgtgctgcacccccagggaggggcctggggaragctggtccagcagcaggggtggaggctggggccacactgcgggacagcagcccctccacctggaccagggagggcctccatgtgcaagcgcagaggaagagaccctcccatgtacgcaaagggcagccccaggctgtctggaagttggagaattccctatcagcacagggatctcagctctggcctggaggtgaagagacctgccttgtaggtggcttccttatctgcgcctccattttctatctgcactttttgatctccaaacaaccttcagccaaagaatctgtctaccaactcctcatagtgagccagaagcagcctcataaccctgaatgtggggctctggtggctgtcacgaagcagagttggcacataacatggaacctggccaggcatggtggctcacacctataaccccagcactttgggaggccaaggcaggcagatcacctgaagtcaggagttcaagaccatcctggccaacacagtgaaaccccrtctgtactaaaaatacaagattacctgggcatggtggtgcatgcctataatcccagctactcaggaggctgaggcagaattgcttgaacctgggaggtggaggttgcagtgagcagagatcacaacattgcacttcagcctggtgacatgagcaaaactgttgtctcaacaaaatgaaattatggaacctgtttgccatcctagtatttacttaattgttccttcttaacatcaaagatggtcttctaggcaattgtaaattttaaattagccagttattttgacaattaattttttactccacctgtatctttagtgcccagccaatgatctggcatagttaggggtgcaccaagaatgtctgtaaactacctgaaggtttgtagatatggagtacaccttacccattaatcaagctgtgcatagcaggaaccaatacgagccgtgatcctcctggttcatacagaacaatggaaaaacataaggctttgtctacctagttggccatcagactttcagcaacttttatcatccagatagtcaccaaatgaaataaaatagaaaaatcccttgagcaatgaaacaattgtgaatgaacacaaagtccatgaatttaatccttatccgtttgctgagccaagcatgtgcatctgcagtgggtggcccaggctggcagcacagataccaccatttcccttttctttgctcagggcatggcctgtttatctcgttgcaccagatgagggttggaaggatgatggtggtggttgtttcagatctactgacagcaatgagaaatcaatgacagttgacaggaagagaggacgcatacaacaggcaaaagaggaatgcccagcagtcttggtccttgcggtgcaatactggccttgaggccaagtcagcaggggattcgtagtcactaacttctaactgaggcagggaagtaacatgttctggaaaaggtccaaagaaacaggaatagaggcagtgtagcaagaggcagatttttggtgccaaatagatttgaatcctggttctgcttcttcctttgtagagtatgatattggttctttcctcccaaagctattataaagactaaatatgtacacaaatctttgggatgtctgacatataaatgcttaacaataggtatttgctggtattattacaaatgaatttgcttatttttgagccacttctatgtctgtccattaaaccaaaatgtgttctgcaggtgatgatgtatttatttcagagctgtgctctttcctaaaccatctacacatggcatccctcagagggcgggacttgtattcttatagcctttaaaggcctagcaagtgtcacttgtggcagcggctgtgaaactttgctgtgttcccagacaatgggatcccatgtcctgctgagagaggtctgtacccaccaggtgtcttgggtggcaatttgcatgggggaactgcccatccaggtcaactgcttggccccctttttgaaaggaaccctggatgggcacttgaccccctttttcaaaaatgtctttcacttctcaaaaaaataatgcagttttggaggaaagtgggatatataaaaaataaaatacaattcaaatcactacagtcccacaagtcaaataaacacactattaatatttttgtggctttatttctaggctttttttcttaagatatacaaatacctatgcttacatattacagatatttttacaaaattgggatcacactgtactatatatgtttctttgtgatgtgctttttctactttagtttcccatcactgaactctacaagactccattttcaacaataaaaagttggttctataattccttcttcagaggttgccgtgaggctgccatgactgcaacagatgctgggagcacctggaggcggctgtcatgctgttggagaggacactccaacagccacagcactgatcctgggcctgccatccctggtttcagcctttgtaaccgtttcagggccagcatgtggggactcagatggggctcaactctgaatgagttaggggggaaatgaatcagcaaaaggaagccctgtgcccagtcctggtgctggtccagcaatgggaatgtggaatggggaggccagttgggacaggagccacacagtcccagggaaagccgctttgctctccaggctgcaggaaaggacgcccacagagccactggctccacttcccagagaggtcagagttttcccgaggcagccaggtgcagctgctgcatggtgcgtagccgaagcaggtggccaggctgtggggcatgccactgcccagctctggggctcccctcccttctggcctggaagagcagggtcttgtctcctgtgtctctccacacaggtcctggccaatcatggggaccatgactgtgtcactccccagggctgtggaccctgccgccacagattgaggctaaagcctagtaaacctcccaggactccattactactgaagagagacaggctgggcttctaatcccagctctgccaaaccaccctgtgtgacctttggcagtcacgccaataaagcctcagtttacctgtgcagggttccagtgtgcattcaataacatctgtggacacccaggaggaacactgggagaggagtccacacccaatggctccaaacctgctgagctttcagaactgcccactggcctccacctccccagagtatcagggaggaacagagtgacaaggttgtcacaggagtctgtccttttatgggaggctggctgtgctttttctacacactctctcctggttctcgtccaagcactgaagtcagtgctatcatccccagcttcatagatgcctgcctaacacctgtgactgacctctgatggccattatttgcactcagagaaggggctgtgctttgagggagggtctcttttggaagctccataggggtgaggggtaaccatgtagtatatcccagctacatggagcctgaactcagtcaactgtagcagctggagctcacaaagtccagtcggcacatgggagccagaggtagggcagaatgccaccatccctcagcaagagctatcctagggtcatgaggaccacctagcctctcctgcctcctggctcatccagatctcaatccaagatgcaaaagctcagctcagtggattctgaatggtctgagtgacccaacccacaggaggtgtccaacagctacaggactcagtccctgctaaaagccttcagcagatgagattctttataaccgcctggctgaccagcatctggagggggagtggagagaagccagctccaagaagtggctgcacacaggagagccagactgtgagctcagcagggggtgggaccatttgttctcttcagtggctggcaatcctgttttgtaaaggctcagatagtaagtattttaggccttgggactgtgatggtctattttgtgtgtcaatttggctaggccatggtatccagtttttagtcaaacactagtctagatgttgctgtgatgatggtttctttttttcaagacagggtctccctcttgtcacccaggctggagtacagtggcatgaccatggctgactgcagcctcaacctcccaggttcaagcgatcctcccacctcagccttctgagtagctgggactataggtgtgcactaccatacctggcttttttttctccccctagagatgggggtctctacattgcccaggctggtcttgaactcctgggctcaagtgatcctcctgcctcagcctcccaatagtggtggaattataggcatgagccaccatgcctggcctattttttagatggattaatatttaagtcagtagagagtaaagcagattaccctccataatgtgggtaggcctcatccaatcagttgaaattcttaagagaaaaaagactgagatcactggaggaagaattctgcttccaaactgcctcagagctgaactgcaacatcagtttttttcctgagtctccagcctgctggtctgttgtgcagattgcagacttgccagctcctaccactgcttgagccagttccttaaaataaatctctttctacatatatacacaccctattggttctgcttctctagaaaaccctaatacagggaccatagcctgtattgtgtctatagccccttacgcacctctgccactgcagtaagaaaccaccatggacaatatgtaaataaatggacgtggctgtgttccaataaaacctgattcataaaaacaggcagtgggctggattaggcacatgtagtttgttggcttcctgtctcctgacaaataggcatagtacttggcacagagaaggcactttgagttataaaaatttcattttttaaaatctgtagggtgaaagtgaacaaataaacaaatgaaccactgagagtacacttgctggctgtaaggccggcagctgggtttaggagcagaggcagcagaagaccggagctttccagtctttaatttccgttgccctgacatcgatgcctggtgtgaagatacatcacctgacatctaaggggatcggcccaagggaggaaatgaaagctgtgaaaaagatgctctgctctccccactcaccagcctgcctcagaggtccagcttagccacagacacaatctctgacaactcccaagaactagcaggaagagcaatataagaactagggtttattttagcaaagaaaacacgtaagagccacactggtagtcccaggagaggcccagcagcaaatgctgagaaaagccagtggctttttgcacagcctgcccatggtggaggggagcacctgagctggctcctgggcccacagctgtgcctgggaatagtccaggctgtgcctgcagaggagctgctccaagcagaccctgaggaagggcacatatcccaaatgctgcttgcttcaaacaggcaccctcggtgctgcctcctctgaggctggcagttccttcctggatatgcagggtcaagagcggagggggaagcagagagagtgccgcctcacacgtactccccacagtcggcgatgatcaccttctgctttggcttcccgtccttgctgccctgggcctttgtggcagaatagaagtgagggagtaaggccggagactaacagtggtttagggataccaacccctgcctgcccatttgcccacttccaccccggaacctgggcagcagcagcccctcccgctggacacagcccctggccatctctctcaggccacagagactctccagccctcacacagggctgtgctcctagggcctgggtaaggaggaggcccattcctggccacatacctcaatttgccgcaagacatctaggccttcggtgacctctccaaacaccacatgcttgccatccagccagtctgtcttgtcacatgtcaggaagaactgagagccattggtgtttgggccagagttggccatggatagtagacctgagggagagaacaaccatcagctccccgaaccctggctaccagcccttaaaggacgtctgtgcaggctgttgacagcccttcagccagtcaggctcagactcggggatgcacagatcacatgcaaatgcggccaccttatcttggattcagttaatagtcagtgaaatggtaagtgaggtgtttcaatcactttatactggtctgttctttcattaattcatttatttaacaattaagtgtctacttgacaaccaggtccctgttaagccctgggaacactgatgagcagaacatagtccaagctctggtggagctcacaatcagtggaaaagagccattcaaaatgacagctatgacacagtgaggcctggtaacatggacatttgtcacgtaagagaatgtacatgtatatgtgtgtgtctgtgtgtgtatgtgtacatgtatgtatgtgtgtgtgtgtccacaatgactcctaagtttctgatcaagcggctaagtggatggtggagtcatttattgaaacagggaagaggaggaggaagagtttaggggagaaggccaagagctgttttagacatgtaaagtgtgagatgctcgtgggatatccagtgaagacaacaggcaggcagttggacaggagtctggagctcagggagccatcagcatgcagatgccag

SEQ ID NO: 93903 - DNA, 13806 bp, Homo sapiens
aacagccaggggaggcagtttcctgtgctggaattcctgggtggtttatcgatttcacaagcccacagcgcggaagtttggaactcaggtcggttcagttgagcaaaactcttgagtcagcctgggtagacccacaggtcaggcggggagggaggccacagcacgggcgtccccacagagctgatgggtttgtgggctgttccctcagtcctcagatcccacatgaagtcagcatgtggtctgccaacagggacaccactgagccccaggacccacccagcagccctgctgtgccctggggcacaagcacatagagccacgctttgaaagcggacaggagaagccgggactgagctgctccatcactgtcgcatgccctgtgacagccaacagcatggactgattttgtcttgcaaatgggggattcttacacagccatgtaacacagggggatctgcagttcctgaacccactgaaattgtcacccaagtcgtgttgtgtgagtgtgttagggaagagagcacacgtgtgtagatattcatggtaggaggtccagaactctgccatcagtgatctctgcctatgggaagagatcgtggcctgtgtcacggcatctgagcagcccggctctcaggcgagcttttgctgcatgcccagcaccctcaggtgctgtgggacaagacaagttcatttttcctccgccctgggctgggatgagcggccacctcctcctgcccacacacgtctggccccatcccccgccccgcacagctgttcgcctgcccttggctggaccaggttcccaccacgaggacaggaagtgctccccacatccgcctcggcccgcacagcctggtgcttttccaaacctgaccgtggtcactgagcccagtaaccagagagaatttttaaaaagactcacaaacatatcattgaaatctcagtgttgggttttggggaaggcactgggcggctcccacccctgctttccggaaacacagatttctagagtttgaaagggacgggaggctaaagtgagactgccctaaatatagcgtcctgggtatttccggatatttccggacacctggggaaatgtgggctttattccgcaactacagcctttgtttgattggcaggccagcccctgccacggggccctgctgcccatctcacttccagcctggcctctaccctcacctccactgtgtcttctaattcccctccacccacgccgcctccctgctgcccccgtcccctgtgcttcccactggccagaggcgcagcccaggctcctggcccgggattcgcaccctcagcaggcaggccgcagcagagctcatgtgccgtccccaacatcgctgacctgtgggcgcctccaccctgtgcatgcgaggtcccctctccctagagcaccctccctgccaccttctccacctaccaagacccatcccacccttcaaagccagttcagatgccacctgctcagatcccatcacccagtgagaccctccgacttccccagcacctgactggcctctccgggagttgtcactcctgccctggtttttcttgttcctttccacgtttcccttcttcctcttccagcttgttccagaaaggaaacgtgggtctcctgccctctgctgtttcctggtgcttgctttccctgccctgccctcagacccctctgctctggccctctgccttggctggccggcccctgcagggcccgtctccctgacaccatggcagattcgcactcatgcctcagcccagctcagctgtcagccctgagccctcccctgccgcacctcccatccaggcagcgggcaggctctggatggcttatgtcccctgagatgccgtcggttatgtcggttatgtccctgtctaccaggtttccctgcagggctggggcccttttctgccttgggtccaatgtccatcttccctttagcctggaagctcccagaggaggctccctcctgtctcatctctgggtcccaggaccagccgggccaagaaggggcgcaacgggagttcaggatttggagcctggggcctgctgagcaccagccaggtgcagggctcagggtgagcctggctgcagggcctcttggccctgtctacaccccgggaccaagcctggaacaaacgtttgcacaaaatgaagccggccccacccaggcctccctgggtccgctccaccttgagtggtgggtgtctgggggcggtggctcacaccagctctgccccctccagagcccgagccattctgagtgccagcccagcgctgctttgtcttctagtggagcgagaccgtgccctgggccaccaggagccccattggaaggagttccgctttgacctgacccagatcccggctggggaggcggtcacagctgcggagttccggatttacaaggtgcccagcatccacctgctcaacaggaccctccacgtcagcatgttccaggtggtccaggagcagtccaacaggtgccttccccttggcccgggtgccccacctaaccccccacctcacagtctcatggtcaaggcagcccagcagggagtcgtggtgggctgaaagagagcctcaaagatgggaaggatgcttggcccgaggcccctgcactgtgggaagagccccagtgacaatcctgacttcaagtccctgccctgccatcctggctgtggggacttggacaggtcactgagcctcagtttccccatgtgtacacctctgtgggctgaggcaatgagatgaggctcagaaggggcgcagccagagtcaggtgggagacgctccggtgacagcccccagcgggccctggagacacggaggcagctgtgccggccgccggttaattgttctttcatgtccacagggagtctgacttgttctttttggatcttcagacgctccgagctggagacgagggctggctggtgctggatgtcacagcagccagtgactgctggttgctgaagcgtcacaaggacctgggactccgcctctatgtggagactgaggatggtgaggctgggggctctgcagcccctggggcttctctgtgccagcacaggcagcggtagtggcttcctgtggccctgggtgcccggcctcaccagctgtgcccgctgcaagggtcactgaggtccagggcacgaggtctggcctagtgggggtgctccctcctctccctctgcttcccaggaagcaggcggctcttcccacggagcagcctccaccttgggagtttctgtcctgggaagggaaggaggggaagtggctgtaccctcaggcactgaggccaggaggctgggtttgaagcccagcttggcagtgccctgcctcagtgaccttggctgggacttacctttccagaccccgtcttctcttccgcaggatggggattcacgcccttgttcattccacaggtgacactggggagagcctcttttatgccaggcagtaggaatacagaggccaaagtgggcacgagatgggtgtgtttgaggcccggcaagggggcgccatggagcagcggtgagggcgggggacccaggggccattctgagtcagagtaaaccagggccaggtgctggggttcttagcgtcatttattttatttactagcagtggaggacgacaggatctgattcaggttttaaaagagaaccctctgagatgcccccctctcggggtggagcagagctccccaccccttccgtgggctgcacccagtgacttgcttcccgaaagtgcggtgtggacagggcgtgggggacctgacgcgcagcgcctcagccaggtgaggaaggctcactgcagtgaccggcacggtgctagcatgtgccctgggtgaaagggaaggagaaggccactgagcctcagagggccccctccgtgaacccgaaaccccagtccagccacgagaaaaccgtcaaacaaacccaaagagaagggctttccgcagaatacctgacaagcgcttctcaaaaccgccaagctcatcaaaaaaaagggaaggttgggaaattggaggagcccagaggcacctaagaagaccagctcagtgcatgtggggtcctgggttgagtcctggaccagcaaaaggtcattagggagaagttatgaaatccagatcgatcatggtgtttacttaataataaggtatcagtattggttcattagttatgagaaaggtaccctgctagtgtaaaatattagcatttcccagaggaaactgggtccaggtgtatgggaactccttgtgtagtttttttttctttgagacagggtttggctctgttgctcaggctggagtgcagtggcgcaatcacagctgacggtaacctccaactcctgggcgcgagcgatcctcccaccttagcctctgtactatctttacaaagttttatgtaactatcaactgttgtaaaattaaaacttaatatatgcataaaataaagaaccccctgacttcagtggagagagcagactgagatggacaagagtgaagtcagagagacgtgtgggggccccacagtggtccaggtgggcgctgtgagtgacttgttggtagcagtggagatggagaaagatgagtcgatttcagtgtcaggacatgcttatagctggcgaggaggtgagggaacaggaggaagcctgaatgatgtgtggttggagccagtggatttttttcaatagatttttctttttggggaaaagatagatgaagggcaggtttgaggtgggtggccaagggttctcttttggctggaatattactgacccccctgggatgttactgagatcactggtcctcatggaaatgccattacagggaccggtgagcgtgaagacccaggcgagggaggtgctggcatgtaagtggatttaaagcatgggatgggaccaggtcatctagggaaggagggtagtgatggagaagaaagagggcctggcccagagccctgggacctccaacatccagagacctcacaaggaggggccacagagagcccacagagaccagccagggagggagcaggacacctggaggatgaggtgatccagacgccagagtaaagtgtttccagaagcaagggtttgtcatttgtgtcctgctgtgggcactgaaggcaagaacagagaagtgaccaagggttttgccatcacagaggttgttgatgacctaaatatccgtggagtgtgggtctgactgaggaggtggagggagacaggcagtggaggcaggagacagctctttccagaacctttgctggggaaggggagcagagacatgggctggggctggagagaacccgggacaaggcaggtcctttccaggtgaggagacgcctgcacgctgctgtggtgatgcagtgattctgtgcagagggaagaaaactgcaaaattccgcacaagttggagcagggagctggagtgggggaggtggagagggcggggggatgcagaggacaagacggggggcctcttcagagcagggacccttcctgatggaggtgagggatagtgtccccactgtcgcagtgaggggtgaacctgagctctgggaggctgtagtggggcaggcactcactctccgggttgtcacaggattaaaggagggtgcttggcacagagtgatgcccagtgaaggtgttcatgagcgtcggtgtcacccagcggcgcctgctcattggacacttggtgtctttaatgagctggggaagctggggggaagcttgggcggggtggttggagtttgtgtctgaggctccactggggcaggaggggacctagcctgtgccctactcgcggagcctgacctcagctctgtcctgcgcccgggcctgtgcgctggacacggaggactgactcggggcccccagcccagggcggagccggccccctccctgttgcgggtcgcgggcctggcctagagcctgcgcctggccggggagacctgctgggagggagtgcgtcagggcgcgggcgcccgccctgctctgtgacgcgcggcccgaggcgcwcgcagggctcacaccacytgtcctggcctccgacccgggccgactatggcggcgctgcggctcctggcgtcagtgctcgggcgcggggtccccgccggcggctcagggctcgcgctgtcccagggctgcgcccgctgctttgccaccagtccccggccccgtgccaagttctacgcggacccggtggagatggtgaaggacatctctgacggggcgaccgtcatgatcgggggcttcgggctctgcgggatccccgagaacctgatcgccgcgctgctcaggacccgcgtgaaagacctgcaggtggtcagcagcaacgtgggcgtggaggacttcggcctgggcctcctgctggccgccaggcaggtccgtcgcatcgtctgttcctacgtgggcgagaacaccctgtgcgagagccagtacctggcaggagagctggagctggagctcacgccccagggcaccctggccgagcgcatccgcgcggggggcgccggggtgcccgccttctacacccccacgggctacgggaccctggtccaggaagggggcgcccccatccgctacaccccggacggccacctggcgctcatgagccagccccgagaggtgagggagttcaacggcgaccacttccttttggagcgcgccatccgggcagacttcgccctggtgaaagggtggaaggccgaccgggcaggaaacgtggtcttcaggagaagcgcccgcaatttcaacgtgcccatgtgcaaagctgcagacgtcacggcggtggaggtgggggcttccccccagaagacatccacgttcctaacatttatgtagrtcgcgtgataaaggggcagaaatacgagaaacgaattgagcgcttaacgatcckgaaagaggaagatggagacgctggaaaggaagaggacgccaggacgcgcatcatcagacgcgcagctctggaatttgaggacggcatgtacgccaatctgggcataggcatccccctgctggccagcaacttcatcagtcccagcatgactgtccatcttcacagtgagaacgggatcctgggcctgggcccgtttcccacggaagatgaggtggatgccgacctcatcaatgcaggcaagcagacggtcacggtgcttcccgggggctgcttcttcgccagcgacgactccttcgccatgatccgagggggacacatccaactaaccatgcttggagccatgcaggtttccaaatacggcgacctggcgaactggatgatccctggcaagaaggtgaaaggcatgggcggtgccatggacttggtgtccagtcagaagaccagagtggtggtcaccatgcagcactgcacaaaggacaacacccccaagatcatggagaaatgcaccatgccgctgaccgggaagcggtgcgtggaccgcatcatcaccgagaaggccgtgtttgacgtgcacaggaagaaaragctgacgctgagggagctctgggagggcctgacggtggacracatcaaaaagagcacggggtgtgcctttgctgtgtccccgaacctcaggcccatgcagcaggtggyaccctgacgggacctggatctgggcggggtggtgcgctcctcagggcggatgccaccgggttccccaggggaatacatgtccccagctctgggaggggtttgctactggcctcctactttcctccctaggtggacagtgctcctctagagagctgcgactttaattaaaaacaacaggaaaacagatcagttcctcactgtgtttctcgagcactgcaaggcgcaggtctgcagtggtgaggaatggatgtccgctttgctctgtgatgtttacacagagcgtgcacagctcagcgcattcacagcaagatttgattcaagcgcctccctcgtacttgaaccatgaaatggagataaaaactgacgagggagaaaatcactcaacccagagtacacctgaagggacattttactactgcagtgagaaataggcgagcaaagatgtgagtttgtgattggaagacatgctatcttcatgagcttgttttttctttttccttctctttcttttttcttttttttgaggcagggtctggctctgtcactcaggctggaatgcaatggaatgcagtgatctcactgcaacctctgcctcctgggctcaagcaatcctaactcagcctcctgagtagctgggactacaggcgcacatcacaatgcctgcttatttttttttattttttaaatttatttatagaaatggagtttcaccatgttgcccaggctggtcttgaacacttgagctcaagcgatccacttgcctcagcctcccaaagtgctgggattacagacatgagccactgagttgggccaattaaccttagcttactgtaatttttttttcttttttagacagaatctcactctgttatctaggctagagtacagtggtccagtctcagctcactgcaacccctgcttcctgggttcaagcaattctcatgtctcagcctctcaagtagctgggattacaggcatgtgccaccatgcctagctaatttttgtatatatatttttaacagtagagatagggtttctccatattggccaggctggtctcaaactctgggcctcaggtgatccacctgccttggcctcccaaagtacaggcttgagccattgcacccggccttcttgaacgtttttatccgttatctggtatttcttctggggcctttgttgttaaattttgtttccctgaagcctcccctcctcctcccacatctctcctcctgggacctatgagatgttaagcttctagatgtccgtagaaggaaagcaggaccatctccaagggaagggaccgggtgatgggagagactgagaggggagaggctgccggtgctgaaatccaccaggaagcttcctctatctgtgtgtggccaaaggctacagcctaggacaggaggagttctagaaccctaaccaagggactagatgagttttctcagcttcatttgaattgttcctgcatcattcacaccagacacttaggccctcctctctgggatggaggcccaaactggccacttgtgtgatggtccgttgtaacccaagaggctgcgaggcatttcctcctgaatctatagtctcaaaaactaaaattaagattgtgtgtgtgtgtgtgtgcgcatgcacgcgtgcacacgtgctgttgacagccaagcctggcctggtgcatgcactgcataagtgtagctctgggggttcccaggccattgggggcatgtggtcagagtagtaagttctcactggtcaaggacagactttccaggggcccattggagcctcaccctgcaggaaaggccagatcctgggaaggagagcagggcagggagagttggcgctcatggagggcacagactgggggtgtggaaaaggggccagggactatggctggggttgggggcttgaaatgaaatgtcatctagtgggcagtggggtgccttttggggctcctggagaggggcacctgatttgccctgggcgtcagtttcccaggagcagtgtggaaaaggctgaggtatctagaagcggacaagtgaccctctgggcctccaactccacctttctggaaggggcctgcccacagctgggcagcctgagagccccccaccttgactgcttggccttccctgcagccagctggagccagggagtcctgcctaagaatgggtgggtaagaagcagagctgatggagaagggaggctctgggctctggaaggagagggctggggatgggggagcttctccaggcctgccagatgcagggctctgaacccagacccactgttagtccccttcaccaccccccatcttgcccagccacatccagctgggccctgcagtttgctggaaaagtatatgacaatcctggctccgacccaccttgctctgggaccttggacagttgctgctctctctgggccttagtttctgcttctgtaaaatgggaacctgggattagctgcttccaaggttccctagtcaggctcgcctggcctgtgagacctacagaggggttcccagcacccaagccaggcctggctcagaggggctctgtgagggtctgtggtgtaactgatctaatgcgacattctatcctgtgtctgggagaccccccataagacccttgaacacagctgcacagaagcaaatagtgaggaaagcctgcaggactgatggcctctcaggccccatggcaggcagggctccccagggagtcacaggacagagctgcaagtggagccaggagggctgccctgggccccaggctgtccccatgggtcagccagtctgcagagtgacactccagtgcccgggctggtgaccaccaccaccccactcaggctgctctgttctctctccgttgtgacctcacttgtcttttcctctgtgccccagctctgttccttgtatttctgctgcttccccataaccttgactcaccgtgactcaagccctgcccagtggattctctctgggcctccttcccatgttagcatctgcagctcacagcctccctgtctcagcagctcttgtccatgctcgtgagagggagggagcctctcctgccagtgcatttgtttgtggcggatgatgtcacgggtcaaaggttggtctctggattcactggttgttcagtcaagtggccaagggacaccagggctgaggcacagctgcttaagggctgacctttgagtgggactgagggtggggcaggcagtgtccttgacctgtagggtgtactggagaactacgtaggaataaatacatctgtgtgtgtgatgtctgtctgagcgtatgtgcatctgtgtgtttatgcaaacatatgcctgtgtgtacatacgtgtgtacatctgtgcttataacatggaggtgaaatgtactttcgtgtaaactgaacaactggcactgtttaaagagacatgaaaatgagctggtaatcatgcttctgccattcagtatcaggaaatttcacccatgcacggagtgaagaggctccattgcactcccatctttatcatgaaagccgggaaataacctacatgtctatgatgagccaatatcaagtcaattacggtatactgctccaagggattttataaatttgaaatgtttattgtggagacttatttaaacaaccagaaaaagttttgtgttttgttttttttttcttgaaacacactctcattctgtcgcccagctggagtgtggtgacacaatcacacctcactgcagcctcaacctcccaggctcaagcagtcctcccacctcagcttcccgggaagttcaccaccatgcccagctcatttttgtttttatatttttgttgagacagggtctcactatgttgcccaggctggtctcaaatgcctaggttcaagcaatcctcccacctcggcctcccaaagtgctgggattacaagcgtgagccaccttgcctggcctcaaaagtttctttacttaattgcttttacaatagaaaggttattgaaatccaaacaagtacaggatgatacacagttttattggtgaggcttggcatctccagggttagttatcatgttttcagcggcatcctcagtctggaagcggctgtgggggacaatcccgtttacaggcttcactcctcctggggctgaggcccaagtcagatctctgtttcagccttttctttctttcttttctgtccataagcccagctcgtgcataagaactcgggctctggaatgagactgccgcaggctgcaacctgggctctgggacttggttcaatgtttctgctctgcctggcatctcccttgtgggcatcagggagacagttaatgccctgctcttgggctgtgcccagcagaacaagcactcgctcaacctggcagatgctaccacgagctgtctcggtgataagtttgacattcacaccccagaaagtgcgggacggaagacagaacacaggtctcggggtccttggaccaaggtgggagcgctggttctcggagtcactggcagtaggactctgggtctcctgtgaagtaggagctgcagggtcactgtaaggacccaatgaggtgatccatgggaaaaatcttccaacttgtaaaacacttcacaaatgttattatttgtgacgcagctgtcactaataacaccgcctgcagctcactgagcaccccctcccacctcctccaaatctgtccccaggagagacgtggactggctggggctggaccaaggactccaggcttcagatgtggaaactgaggctcagcaggaccccttgggtcctcagcctccacgctcctggacctgcccaggccccggcagagagaccgctgctgtgtctgctgcagggccactgcccgtgagtgacccctctctcctttctgtctcagggcacagcgtggatcctggcctggccggcctgctgggtcaacgggccccacgctcccaacagcctttcgtggtcactttcttcagggccagtccgagtcccatccgcacccctcgggcagtgaggccactgaggaggaggcagccgaagaaaagcaacgagctgccgcaggccaaccgactcccagggatctttggtgagggtcgggcaggctggggccgaggccctgtgggcttctggctgagagaggcagggcgagaaccaagtggtggcccagagccctcaggctcaggtcggttcaagctgacggccactctccagccacctttcctgacaccatcttggccctgatgcaccctggtgaccggcactccggaggcctgtcctggctgtccctgctgcccagaagtctccctctctccccctggctcctccgggtctttctcaggagcctccttcagaatcagctgccccttccctgggagccgcagcccctcatgacctgcggttgtgcctgggcaccctgtgggatcctcggttgcttatgcgagttttctccccaactgggccaagcccttcaggatcagggacaggcctgacccaaccccgtgccctccttcccagggagtcggcccttgactggcctggtcgtgagccacttgaacctcgggaatgggtgtggcaggagagggtgggctggagtcacaggggtctccagagaggaggaggcacaggatggccgagggtcctgctgggctgtttactggagcataaagacgctcataggctgaaggacaggggaggactgggcacagtgtcactctagccattgggagccatggcaggcttctgagctgggtcatggtacaagcagagttccagggatgggctttatgagaccaaatggtttcctgtcattcatttatttgacaaatgtgctcatcagggcatcccccaccctggtaccccatagtagctgcacacagtaggaaccccagaaaagaccttgccccttctgtccctgcagatgacgtccacggctcccacggccggcaggtctgccgtcggcacgagctctacgtcagcttccaggaccttggctggctggtaattgctgactctccttgtttctgaaatgacaatcaccacctgtagatcagaagtgaatctgcagggaggacatagaatcatggtgacttcaattttcttatgtatttttttcttctgtgttttccaagttttctaaagtgagaatatggtgagaaagggttttgttgttgttgttgtgt

SEQ ID NO: 93904 - DNA, 46752 bp, Homo sapiens
  misc_feature (1)...(46752): n = A,T,C or G
cgcagtctgcttgttccgacacttcagaaagcagcgctgcagggggccaaggcaactccaggagagggctaaacaaaccttccaaaatcccaaccatgtctaagaagaccaccactgcctcccccaggactccaggtcccaagcgataacactgtctaagcacccccaagccactatccactttgaatcctgctccatacattgggtgtatatttattctgaacgggagaagttatattgttaaaagtgtaaaagaataattgtgttatgaagctgccttattttttttctttttgtaagttactattttcatgtgaatatttatgtagataaaatttgcctcctggtaaccctgtaatggatggggcccagaaatgaaatatttgagaaaaacaagtgaaaaggtcaagatacaaatgtgtattaaaaaaaaaaaagcctattaatagggtttctgcgcggtgcagggttgtaaacctgctttatcttttaggattattcctaaatgcatcttctttataaacttgacttgctatctcagcaagataaattatattaaaaaaataagaatcctgcagtgtttaaggaactctttttttgtaaatcacggacacctcaattagcaagaactgaggggagggctttttccattgtttaatgttttgtgatttttagctaaagagagggaacctcatctaagtaacatttgcacatgatacagcaaaaggagttcattgcaatactgtctttggatattgtttcagtactgggtgtttaaaggacaaatagctgctagaattcaggggtaartgtaagtgttcagaaaacgtcagaacatttggggttttaaactgatttgttgctccctatccagcctagacaccagtaactcttgtgttcaccaggacccagacccttggcaagggataggctcgttggtgacattgtgaatttcagatttgttttatccactttttttgctatttatttaaatggtcgatcaacttcccacaaactgaggaatgaattccacgagcctgttctgaaaatgtggacgtaagacaaacacgtgctcgtcctttaatggagttcaccagcacacttgttaaccagtcctgtttgctttcgtctttttttgtgcgtaataaagtcaactgaccaagtgaccatgaaaaggggctgtctggggctcctgttttttagctgctgttcttcagctccgaccatgttgctgtgtgattatctcaattggttttaattgaggcagaaactgaagctctaccaatgaactgtttagaaacaagacacacttttgtattaaaattgcttgcagtaacaaatattttgtatttcctgattttcttttcaactattaccttatctataaatgttaccctggggtataatcatgttgtaggtacttaaatgcattccgcaaatcaaaatatcttgatggataaattatagagcttaatagatcttgttttatttcatccttgttaattttgtttaatatggctgggcatggtggctcacgcccataatcccagcactatgggaggccaaggcaggaggatcacttgagttcaggagttggagaccagcctgggaaacatagtaagaccttgtatctactaaaactaaagaaacaattaggcatggtggcacatgcctatagccgcaactactagggaacttaaggtgggaggatcacttgagcctgggaagtcaaggctacagtgagccacgattgcaccactgcaccccagcctgggtgacacagcgagaccctgtctcaaaaaaaaagacaagmtattaacatgaacatgtaggatatctgtcctacttacatgattaaacaaatagtattatgtaaaaagatactagaaatcatggagatcctgggttctcagaatgggaccagtttgtcacactatgtcacagtatgctgaaatttctggttaaatggtagaatttcagaggtggaagcaaaatcggtcatcatatctagctcctttgttttacagatggagaaactgggatgggaaagtacaagagaaagtgatttccctgagctcacaaaatgaataaatgacagaagtgaaccttgaatccagtcctcgactccctgttcaagtctggcacttctatttcctccagcctctagtcagttggctttataatagagcagccaaatgttaacttagtaataagaagaaaagggctagaggcttcggaggtaaaggggctaagactcatgccacctgtgttcttggtcattaggccgcattccttaggacataggcatttggtgagatcgatgcatgtttgccaaagctgttaaggccaaatacccagattaaaaggaatttggagcctaatggattctgaaggaagtgcttactctgttctccatggaactggggaacttcaggctgccaggactttgtataggatagtgttttcaccctaatttgcttccccttctaggcctcttggcagcagaagcatgtgagaccagcttgacctccatcttcccagattgtgggttatggtccagaatcttaccaagtaattaaggttttctggggttttgtggcaaagttcagctggcagcggcaccaacgaaaagtgcatttctttttttttctttttttttttttcttttttttttttttttttgagatagggactcattctgttgcccactggagtgcagtggcgcaatmtgggctgaccgcaacctccgcctcccaagctcaaactattctcctgcctcagcctcctgagtagctggagttacaggcacatgctaccatgcctggctaaaaaaaagtgcatttccattcaacaaatgcctgtacacaagaccatgtaggaaataacaagatgctaggaaaagggttaaagtataatcacagtcctgggccgggtgtggtggcttattcctgtaatcccagcactttgggaggctgaggcgggtggatcacctgaggtcaggagttcaagaccagcttggtcaatgtggtgaaaccccgtctctactaaaaatacaaaaattagccaggtgtggtggtgggcacctgtaatcccagctactcgggaggctgaggcaggagaattgcttaaacctgggagacggaggttgcagtgagccaagattgcgccattgaactccagcctgcaagaaaagagaaactccatctcaaaaaataaataataagtaaataaatatatatatatataatcacagtcctgtgatagaaatgctaaatgaggaaggaaaatttggtgtctgctggggccttgaatgatgcaataactagctcatatttattgactgcttactgtaagccagtgattgtgctaagtgctctatatacattctcactgaatacccttaacagttctatgatcattagcccccttttcttgataagacactgagcctgagagaggttaagatcacagagttgccaggtggctagggaaaacccttgttttgacactactttctccaagaaacctaccccacctcagttcccttccagtcctaatgttctggattccactcacatgtggtctgctcccacttccccgctcctctgcccttccagccactttgctggctcctctgggagcacagctttcattttgctttgggaaattgccgtgttcaccagctgtcacccctgttgctgtgggggctgctcaggggcagggggcttgtctgctccatctctggttcagggcacagcacagagcagctcacggtggttgttgctgaactgaagcgtgggcagaggcccttggaatggctaaaatctgctgtttaggtttatgggaatgtgaagcccgttgtttagaaaacacagctctatctccacatcctaaattgagaaatgatttctgttataagaatcagcccagcactgggcagcttgcagtctagctgggagcccagaattgcacaaaacaaacctgagaattgtacaggctggatctagggcctcaagtgatgtgcagtggattcaaaaggggcgtgcagagaggacagtgaagggggtgtgggcaggagattccgagactctgaccaagatgacatggggacaaagccctgtggattcagcctcctaaacagctttctcctctgcccctccaccccatcaccattagagactcatggtcattgtacccacccccacatctgattgctgtacctgcctccaactgcagggccctgactcctgtctccctctgatccatattccgctctgcttccaagctctggtcttgggtactttcaacggttattctgcattatccttagctcagtatccttatgggacagtcccagtccgcagggtagccccggcttctaggcggtggcatccacatstgctctgcccggagctgatgcaggtgcctcatggggggcgctctggggaccgcgcagaaaatttacgagcagtgtggaaatatacctgttgggtaaaagacaaactaggcgtgtgtttaaggcaccagcaaatgactatttagattaagaatttgttgtagaaaattttattgaagtgatgacttcaaaatgtgattttgagggcattatacacttgcttcgaggtttaatcttcaatccacatggcggggcaccataatctctggtgcccagggccctcgtctagcccctgtgaggccctttgcggtgcctcccttgccagcccctccagcctccgccatttgccccctgggctctccagtttccactgcccccctgcccgagcccagctccactgctgtgtgacctggcgtaagtcccttaaccgccgtgtgcctcagtttcctcatttattaaaagaggaggttccagtggtatgtaccccctaacgatgtgcgagcatcacagaaatgacacgagacacacactcagaacatgccttggcgtggcaagtgctgactgttgccattattaggctccccagccggggtctcagggccttggcacaagctattccctctgcctggagcactttcctccactgacctttcctggcgctccaggtcaactccaggagccttcccagtgcagtctaggtgccttctccttccgcagcgcctgaaccacacaggaataagtaaggcgagagcgcgcccagggaagagcaggtgtgcagaaagggactgagtcagtcgagacgtttccgcggggatccttctcttggcaggcctgcaccggggccgtggggactgagaagatgtgcacaggtggctcccgagtgctcgggaagggccccagagcttctggcccagctggaggcaggaggcggagcctcctccgcaaagctggatcagtaccggggacgcagggcgcacagctagggctggcgggggcggcccgactggggcgctgcctgggctcacgcgggagccaggtgggggacgcagggagaagcagccgagcaggtgccgagaaggaggcgcccgcagaagcgcatgcaggggccacggggaaggcgccaggaggcggtgaggggccgcggtggccggaacccgggccggctgctgcgggcagaggaacaggccccacccgcggggcttggctggcaccgcccggctctccagacggggctacggccgcgtgtcgggcccggtggcgaccacggcacaccacggcgaggcagccgggtggcaccactggcgggaccgggacggcgccgcggccttaggatctctgcgccgaggcccgcggcgggagccacgacggccctgaccacgctgacgcccaggctgcgggctcctcgcccggaccaaccgccagccacgccgaggtcgcacctcggggtcgccccacccgcaacacctgccgccgcccggggctcctagcgggcgcggcctccgcgcccaggccccgcccccgcgcccccattggtcagtcccgggggtgggcgggcrgcacagacggctgagccggggcaaggactcgcgggaatcgcgccgcccgggtcgctgccggagctcgccggtcgcccctgcgctgcgcggaccgcagccacagccggactggtgggaacggcggcgacagacggattggctgacagtcccagccctcagaacagccccggcctcgaagcgttggcgtctgcgtccgcgtcagcgtccgcttgtcccggagccggggcaggtgcgcgcggggggcgctccagggaccgcgctgaggccgcagacgccgcccgccgagccccgccccctgctcgccgaactcagctccccgttcgccgtcggggcgtccccgggcccaggggcggcggcggagctgatgtgcgcccgctgagcgcccccggcccgccatggccgcgcgccccggmccgctctggctyctgggcctgacgttgtgcgcgctgggcgggggcggccccggcctgcgacccccgcccggctgtccccagcgacgtctgggcgcgcgcgagcgccgggacgtgcagcgcgagatcctggcggtgctcgggctrcccgggcggccccggccccgcgcgccacccgccgcctcccggctgcccgcgtccgcgccgctcttcatgctggacctgtaccacgccatggctggcgacgacgacgaggacggcgcgcccgcggagcagcgcctgggccgcgccgacctggtcatgagcttcgtcaacatgggtgagtgcggccgcccgcgcggggaccctcggagtaarctggctgcaggggaggkgcgcgcatccgcgggcggtgccgggccctggccgaacggggartcacagacggtggacgcgaaccacaggggagtgggaccgccgtggttagggaaggtctaagggtcatgggggccccctgggctgcggggtggtcaggagcagagtgtgggggactgtggactcccaggcgctgccttcaccctgccccaracacacccaggagtaagaatyagrtgatgtctttgcccacctgggctgccccgggaagacagcctggtcctggggagacaggtgagtaaacagaggccgggatgctgtcactgtgataaggrcagtactgaggagagggacaaagttcagcgtggaaacctgtggtcacatcatcggagtgaccagagctgagtcgcgtgccctgagtccacagcaggctcttcyctgtgcggagcctgggtggggtgcggctgtcaggggrgcggctggggaaggagcagactcagctcgctggggcagggactgtkgccttgtcaccctgggccctgcacttagcatgtggcctggtatagggtgagtgtccggtcctgtggaatggcccagtgggcagctggacccactgtgttctcccaggcaaagccgggcttttcctgtctgcaaayatcttgtatcaaaccctggagctatttattccttaagatctcagatttttcttttccagtactaaactctttggtctatgctcgtgtagttactgttggtcaggtcmcccgtctgctttgcctcctgtctgtggctagtgacaggccggggtctgggagccaaggaccacagctcagcccgaagtgggggagctgtggggctgagagcagggagtgggtacctgccccagccaycagcctccctccacagacagcatcattaattcttcatcctcccgacaaccctgataacagccacggtcttcatccccatctcccagatgaggacagtgaggttcagagaggcagcgccatgcctaggacagcgcagcctctatgttgctgagccaggacaggyccaggaagcctgactgtccatccagggctcaawgagatgacatttctgttgtcaggtcaggctttcagggtgcagagagctttctgaggagtctgggctgaggaamacagggtactgagctgcagcaggtcttgtggggccatcagccatttgcttcctacactagarcagaagagggcatggccaagcctctgcttcccgcaacccagagctggtggtggaggcgagcagcagaaggcagccattcaccatcgctgagcgcccagtgccagggacaggactctagccggtgggatctgtatgctgcctttgtagttagaggacagggtggggatgtgggacagaggagaccatctgtgaagctggggctggggctctgtcatcaggacaggctgacactgggctyaggaccaagaagagttgtggatggagtcgtccaagaatgtccccagggagccgcccatcagaatgcgtcaccacccagcccacatccgacctcccctggcatcccctgggtcaaggcatgcayagcctggtggggctgttgctgtgaattgggcagggcccacccctctgtgtgaccttagggaagttcctcaccytctcagccttsgttgctccttrtaaaakraggtgcctggtgatctgtcctcagggttgttgtgtgattggtagaggggcaggagtagaaagcctgtgctgctcccctcagagggtgaacctggacctgggcactgttggcctcccagctgtggcccagccttagtgtggaggtgacaggaacatctccacatgtcttgtacacgtgaaacccagaaatgaactctaaaagccaatcaaaggtgtttgtacttatttttaaaatgaaaagtagcatgtgaactttttcttttcttttcttttcctttctttccttctttctttcttttttcttttttcttttttttttttttaagaggcagggtttcactgcattccccaggctggagtgtagtggtgcgattatagctcactgcaacctctaattcccgggctccagcaatcttcctccctcagcctccccagtagctagggctacagtcgcacaccaccacacccagataatttttaaatatttcttgtagagacggggagtctcactgtattgcccagactggtcttgaactcctgaactcaagcaatcctcccacctcagcctcccaaagtgctgggattacaggcgtgaaccaccatgcctggccacgtgtgaactttcacagccttacaattcctcatttaattcaygtgagactgttttgccagccccatttcatgcgctcagagagattaaatggccagcccagggccacacagcacatccaaggtgacatccatggctgtggattccaaatcccagcttcttcccacaccagctctgagcacttcatgaagactcggggcctccagygccrtgggattarcaagcagatcgttgttagtggaagcccaggctgtgggtgggcgcagccagctgtcagaaaggccttctttattctgctgtgctaactgcactagtagaactgtctcagagtagctttaactggtaattactgaggctgggtggggcggggtgggtggggggtggatagacacgtaccaggatgctctcagtgtttggaggcccctgaaggttggtggccccagagccaccatgggatctaatagcagggtcgctgtggtgtcactgcccacacccaggctctcacacctgcttctgccagctccacctctcctatcagcctcatctgastcctgaawagccaggyctggtgcccctagggcccaactcttgatggcagcctgtgggacccagagggcggggctctcgctggcttcccacccatgggttcaggyctccgtgcagagcaggtgctttaggaagccaagcctgcgtcctgatgttcagagcctgcactgggaggccagggctggggtcagagccggggccctgcctggcctgtcatccatatcagcctgtagacctgggctctcttgggcaggacagtgatggagcggttggattctgtccctggtctctctgtgctcagggaggggagagccctgagctgggaggcaggacccaggttcttgtgctgcctgggcccaccattaactcctgcatgtsctgagccacggcccttcccttccctgggcctctgctttctcgtccattctacggtgatggcatcagaaaagcaaggtgcctcccagccctgaccctgtggctctgtggcagaggcgccttctcacaacaccgccatgccttggccccagtgcctcagggcagcccggcccctcctgagggaggaaggatggcaggaaggaccacctctgcacactccttctgaatccttctccacccatctcagcagagaggcaggtgcccatgttccagattgagaaactgaggcataagcaggmctagcaggcagaagtccagccaggatcagaatgcaggcagcttcatttttgtcctgatcccttyctgaaccagacagatttgctcctgtggtctccggtggccatggacaggggtgttgatgaacagagccgtctggatttgggagaagcaggactgagtgggaattcgggacctggcccgggtcctgctctgcccttgccagccgtgtgacctrgaasggtggcaccatctccgtgggccccagggccacttcctttggttctttaccagggacctctttcattttcccattcattcattcagcaaatagttctgtagcacctaccacggaccaggcagagttctagttgctggggatataacaatgagagaagtaaagtccctgccctcagggagatgactttctagtctagagacacataatacatacatgagccctaaaggtaattgtcrggtgtgctagacagcaacgccccatcgggaaacaggaggggctgaacaatggcaggacagacagggctagattgggggtttctgacctgagacccacacacaaggaatttgcatcctgacgccaacacctgatctcagtgtgatctgggctttccagtcaacctccccaagcctcagtttcctcctctgtaaaatggagatactcatcttatgggrctgttstgggcttgtgtgagatgatacccagcgatgcccacgtgcccagaacctctgcatctcttccttcattggtatctcacaattgccgtcacatctgtgtttgaaagagaggagagagaggctcagagcagttaggtggttttcccaaggccacacagcaggttgtccccctgcctccatgtgaaacacagcagctgcctccaccccaggccaggtccccgcctatcattagatgcagtaagtgctgtcgaattgaactgaatgtgaatgtgtattgtaagctgagaagcctgttgttaaagwatttttattttgggggaatttatagaaataatgcatgctcattctacaaaattcagattctgcagaagcatgtaacttgggtgcccctagggagccccattcctaccagacaatccttccggcaactactttctgattttcattgccatggcctgttctttgaacttcacataaatggaatcttacagtgcatactcttgagtctagtctttgactcagcatgcttctttttccattttcctccatgttgttgtatctgtagttctttttttcataactgagttgtattccattgcatgaatatacataccacagtccatccattgttatggacattcgggttgttctgaacacttttatccacatccctctgtggatatattaaagcagggattttaatcttgcgtgtgccatttgggagctgtgcgatgttgagcagcttgtttaaagtccctgaaactcagtttccacacctttgaggcaaggtaagtgagccagcctcccggggttgcatgcagtgtggccagctggargccgacacacagtaggaacttcacaaatgggggctgatcgattgtgccccacttctgcaccattgctcgttgggtagctccttcatagaatacacttacctccatttttgcttgtgaaaactccacccacttttcaatgaaggtgggtcagggtttccataaatctctctgcccctaccccacaatcccacagggacaggctctttccaggcagaagccccacctgcattgcatgcacttttcttaggattccagtcgctttctgcctgtgtgacccaggggctcacctagcccctctttctcctactccccagcaacccctgaacaacctgagaacaggaccaattctgactcttccctgcccctgccccccaccccgtggcaggaagttgagggaaagaggaacccagcaggaggcagggagagccaggaggaacctgggcctggtcaggtgggacagagtggggccggccctccctgtctgtgtgggggccaacaatgggtgccatagctccctgggccctcccctgggaccccaggtccccacagggccctgcctggaggaaggtggcttcacgggcattctcgggtgtctgttgataggagggccttgttgacgggtgacccccatcccaatatgtcccattgaactccagggccactcatttcacactggccccaagtgtgaacatccacatcagaggtctctattctgacacaggcctgtaatctaaccctggaaaccctctgcccctccttggcctcagtttccccatctctgcaggacctgaagtcctttccagctctgaccaaagaatrtgcccaccccctgcctgctgatgggggctcctccggkctgaggcacagggtggggaggtgcacccagcccccctcctcctggaacctctttcccacaggcaagagaggatgtgtcaccatgaccacttctttctggaaaattcccacagttcattctttcccgggatttcactggaggaattgtgtctttcttgctaacatctcctgggatctattcttggccttggcgggcttgatgtggaggcatgtgtgggtgttctcttttaatttggggtccagaactgtctgaggcctggaccggtaattatgagagcagcaccatttatggaaacagcccttgaagcaagccagtgatgagacccagctggaaatacctcagcatggagccctgggcccgcctcgaggcggtgctgagatttctgggtgggagaagccccttcaggacgcagaaccaacaggtcatgagtcccgccctcccttggcctgcagaggctgtggggcccaagccttcttttgggtctgaagtgcccctgccccaccgcctttgctgcctgtgggaccagccaggcaggcccagcccatgcacccggggctctgggggagccgctgtccaccctcaggggccaggccgggagaggaggcaggtccacagcaacgggaatgtcggtggcttctgatggagtcacatggggacatggtagccacacccagactggcagtgatacccagcccaargggctctgagtgccggacactgagccgctgtcctggggacaagaggcccttgggaagaaggggccggggcacccccgctctggggccccggaacacagcggccgatgagctgacatgcgagcctcccatgtccacccacatggctccatcccggccctccaagggctcgctgtccagaggaacagctgaaccagagacagcaagccctggcatgggggccgggagaggctgaaagcctgacctgcctggggtctgaggactgggagccttctcagtcggactgagagggacggggccacccggggagagcagcttccaggagggactctgcgggaggcgtctgcaggtagaaggcacaagaggcccgagggacagatggcagggccagcgcagggagggccctgggacactcttcctgtgggcccttcggggccggggagggtctgaggggagatgggacaggtcacaggccacaggattctgctctgagctggaggatgagggtgtcttttgaagtcccactttttggtcagaaataagacagatttaggttgtctgagtgagactaaattgcccagagcacaaaaatagccagagcccttgttgatgtcgaactgagggtcgcagggtttggcatctggaggcctagcctggagtggctggtggccatgcccggtgaaggccacctcctgcccacagtggcctttcctggaagagcagtgtcctgaggttgccttatccgaggctggaggaggaggctgagggctctctgattgtttattttcccagagccacggtgaggtggttcagaaagtaaccttttctgcctcccatgtgcagctccgcgtggatagcattgtctgtcctggattctgagccaagccccccagctggtgtgtctcactggaactggctgtcaccagtccctgttggctgcagaaagctctacaggcgcactgtggcccaagtgacttctcacctcccaaggtcatgcactgtcacaatattggttggcagcaattgaagttttgaagttcttcccaagtcacagggcttctttgaatcactgtgctgagttcttggaggctgagaaacaggatttcttggagatgaactggccttgcctgtcactccaacctcctcatacacctcrgccccctgaccactagattccaaccacaccagcctccttgatgtttctcaaacatgcagagcctttgtatccactgttccctctgcctagaaggctgtccacatcttcacacaactggttccttctcctacagtcgagggtatttttttccccttactttccaggttttagactaatgaatggatccctagcatttttgaaaggcagtgtttctccactactgacaatcttgcctcccaggaaacatttggcaatatctggagacctttttagttgttgcaaatggggaggggaagggagtgctgctgtcagctaaggggcagaggccaggggtgctgctgaacatcctgcagtacacagaacagcccctgcaaccgagagttatctggccaaaatgtcagtggtgccacagttgagaaacctgttcaaggtgacccgtgtttgatagtgatgatgatgatgggctcaccctttattagatacaaggttgtcttattccatcttgtgttgctgtaacagactccctaaggctgagtaatttacaaaaaaaaaaaaaaagaggtttattttattttatttttgagacggagtcttgctctgtcaccctggctggagtgcagtggtacagtttcagctcactgcaacctctacctcctgggttcaagagattctcctgcctcagcctcccaagtagctgggactacaggtgcccgccaccacacctggctaattttttgtatttttagtagagacagggtttcaccatgttggccaggctggtctcaacctcctgacctcaggtgatccacccgcctcagcctgccaaagtgctgggattacaggtgtaagtcaccacgcccagccgaaaacaggtttatttggcatacaattctagtggctgaaaggctcaaggctgggcagctgcatctggtgagagcctcaggctacttcaattcmtggcagaaagtggaaggacagtgggtgtgtacaaagagagcatgtggtgagaggaagcaagagagcaagccagactttttaacagcctcccccatctagggaactaatccattcccctgagagggaaacccacccactggccccctcctccatggcattagtctgtgagtggttcatccccatgacccagacacctcccactaggtcccacctccgatcacagccacattggggatcacatttcaacctgagttttgtcagggataaaacacatccaaactgtagcaaggggtatattatctgtactgttcaccttgcttttttctttttctttttttgagacrgagtctcaccctggagtgccatggcacartgacagctcactgcagtctccacctcccaggctcaagccatcctcctacctcagcctcctgaatagactataagcaaagtgccattgtgtctggctaattttgtttgtttgtttgttttgttttgagacagggtctcactctacctcaaaacaaagagctaaagtgcagtgatgtgatctcagctcactgcaacctctgatgcctggctaatttaaaaaacttttctagagacagggcctccctatgttgcccaggctgatcttgaactcctggcctcaagtggtcctcctgcctggcctcccaaagtgatggggttacagacatgagccatcacagccagctgggacattttcttggaagtacagtttctgagtcacagcatgtatcattttgctagattactgccagatttcctaccctagggattgtgccattttgcattcctgccagcaatgcccagaagtgttcaggtctgatcttagagtatcttactcatgaggccttctcaaacatcacatctaaagaaaccccacactgggccgggcgcaatggctcacgcctataatcccagcactttgggaggccaaggcgggtggatcatgaggtcgggagttcaagaccagcctggccaagatggtgaaaccctgtctctactgaaaatacaaaagttagctgggcttagtggcaggcacttgtaatcccagctactcgggaggctgaggcaggagaatcgcttgaacccaggcagcagaggttgcagtgagctgagatcacgccactgcactccagcctggccgacagaktgagactgtctcaaaaaaaaaaaaaaaaagaaaaggaaaccccacactggactggaattggaggtgccagtatgatctcagatatttaaaataaaaaatatatatgtaccaatacatacagatgtgtgtttttgcacacattaatgtacacacatatatttcctagctctgtgcactgaaagggcctaaaagtattgacactccaggacagtgagcaacccagtgcccaaatcttggtttctaaatctctctccaaaaagcaaaacaaaacaaaacagaactccttgcagaaatggctgattccaggggtggggatggaaactcccaggatgcacctagagcatcttgtggtgccagttagaagtgctcagaaaaggatgatgggggcagtcagaaggacacaggagccaacctgaaggagctgccagtggccaaaactggaacaatttgagcaatgaaataaataacaatagtattggatatagcccatagaataaaataaatacccttgaatccataatgatataaataaataattaggctgggcacagtggctcacgcctgtaatcccagcactttgggaggccaaggcgggcagatcacctgaggtcaggagttcgagactagcctgaccaatatggtgaaaccttgtctctactgaaaaaagtacaaaattagccatgcgtagtggtacacacctgtagtcccaactactcaggaggctgaggcaggacaataacttgaacccaggaagcggaggttgcagtgagccaagatcatgtcattgcactccagcctgggcaacagagcaagactctgtcttaaaataaatatttaaataaataaataactgtagaagaaaggacaagtcttcctttcaaaagaattccagttaataaatgtagaaggaaagaaggaaatagaaaatcrctattccagcctggacaagatggcaagaccccatctctacaaaaaatacaaaaaaaatagccaggtgtggtggtacatgactgtacatgactgtagtcccagctacttgacaggctgaggtgggaggatcccttgagccctgggaggttgaagttgcgtcactgcactgcagcctaggtgaccaagtgagaccctgtctcaaaaaatgaaaaagaaagaaaatcactattggctcatgtctatgatcccagcaaggtgagccaagagttcaagaccagtctgggcaacatagtgagatttcatctctacaaaaaataaattagccaggcatagtggcattatgcttacagtctttcttttttttttttttttttttttttttgagatggagtctcgctctctcccaggctggagtgcagtcgtgcaatcttgggtcactgcaacctctacctcccaggttcaagtgattcccctgcctcagcctcctgagtagctgggactacaggcacacaccactatacctgactaattttttgttttttggtagagatgaggtttcaccatgttggccaggatggtctcgatctcctgaccttgtgatccactcacctcggccacccaaagtgctaggattataggcaggagccactgcacctggcccatgtatagtcttaactgctcaggaggctgaggtgggaggatcacttgagtttggaaggttgtggctgcagtaagctataatcacaccactggactccagcctgggcggcagagtgagaccctgtctcaaaaaacaaaacaaaacaaaaaaagtattttcctcacgatatttattatttacaaaatgaaaaatcgtgacattacagtggagaaacctggcagacaccaccgtaaccagggaatcaaatttcacgccactagtaataagatagattggtatcatattgtcccatttgatgctctgagaagggcatatcactttgaagggggcctgcccctccacrcctgtgggtatttctcgaaaggtggagatgagagactgagaaaagaaataagatacagagagacaaagtatagaggaagaaaagtgggcccaggggaccggcactcagcatatggaggacctgcaccggcactggtctctgagttccctcagtatttattgatcactatctctaccatctcagygagggggatgtggcaggactatagggtaatggtggggagagggtcagcaggaaaacatgtgagcaaaggactctgtgtcataaataagtttaaggaaaggcgctgtgcctcgatgtgcatgtaggccagatttatgtttgactttacacaaacatctcaatgcagtaaagagcagtattgccaccagcatgtctcagtcggtatagtgtgagactcttaatctcagggtcgtgggttcaagccccacattgggcgtcagatgaagggggcctgcccctccacacctgtgggtatttctcgaaaggtggagatgagagactgagaaaagaaataagacacagagacaaagtacagaggaagaaaagtgggcccaggcagcactcagcatacggaggacccgcaccagcactggtctctgagttccttcagtatttattgatcactatctaccatctcagygagggggatgtggcaggactatagggtaatggtggggagagggtcagcaggaaaacatgtgagcaaaggactctgtgtcataaawaagtttaaggaaaggcgctgtgcctcratgtgcatgtaggccagatttatgtttgactttacacaaacatctcaatgcagtaaagagcagtattgccaccagcatgtctcagtcggtatagtgtgagactcttaatctcagggtcgtgggttcaagccccacattgggcgtcagatgaagggggcctgcccctccacacctgtgggtatttctcgaaaggtggagatgagagactgagaaaagaaataagacacagagacaaagtacagaggaagaaaagtgggcccaggcagcactcagcatacggaggacccgcaccagcactggtctctgagttccttcagtatttattgatcactatctaccatctcagtgaggggratgtggcaggactatagggtaatggtggggagagggtcagcaggaaaacatgtgagcaaaggactctgtgtcataaaaaagtttaaggaaagttgcygtgcctcgatgtgcatgtaggccagatttatgtttgactttacacgaacatctcaatgcagtaaagagcagtattgtcgccagcatgtctcacctccagccataaggtggttttctcctatctcagtaartagaatgtccaatcgggttttacaccacgacattccaatcccagggatgagcaggagacagatgccttcctcttatctcaactgcaaagagtccttcctctttcactagtcctcctcagcacagaccctttacaggtgtcagactggggttggtcaggtctttccctttccatgaggccatatctcaggctgtctcagtgcggggagaccttggacaatacccagactttcttgggcagaggtccctgaagctttccacagtgcattgtgtccctgggtactcaagactggagaatggcaatgacttttaccaaacatactgcctgcaaacacatttttaacaaaacacatcctgcacagccctaaatccattaaaccytgagtcaatacagtacatgtttctgcaagcacagggttggggctagggttacagattaacagcatctcaaagcagaagaatttttcttagtacagatcaaaatggagtctcttatgtcttcctttttctacagagacacagtaacagtctgatttctctttcccccacacacttctgtggtattcttcaaaatccataacttcattttaaacatgagaaaacatgagacaaactcaaattgaggggcatgctacaaataactgaccagcactcttcaaaagtatcaaggccaggcatggtggctcatgcctgtaatctcagcactctggaaggccaaggcaagaggactgcttgagcccaggagttcaagaccagcctggacaacacagtgagcccttgtctcaataaacaattgtttaaaaaattagctgggcatggtggggtgtaccagtggtccctgctaccccagaggctgaagtgggaggatcacctgagcccaggtggttgaggctgcagtgagctgtgactgtgccactgcactccagcctgggtgacagagcaagaccctgtctcmaaaaaaaaaaaaaaaaaaaagtgtcaaggttgaaagggaaggaaagactgaggaacagtcagatcggaggggccccggggaaatgacactaaatgtattcgtgtattaataacatggggtcctagattgaattcttgacagaaaaaggatattagtaggacagttagtaaaattagagaaaagtctggatttagttaacagtatcaatttcctggtttttttgtttttgtttttgttttttgaaacggagtctcactctgtcatccaggctatagtgcagtggcgcaatcttggctcactgcaacctctgcctcccaggttcaagcagttctatgcctcagcctcctgagtagctgggattacaggcacctaccaccacgcccagctaatttttgtatttttagtagagacagggtttcaccatcttggccaggctggtcttgaactcctgacctcatgatccacccgcctcggcctcccaaagtgctgggattacaggtgtgagccaccgcgccccccccaatttcctggttttcttatactacaggttggttatgtaagaagctgtcattaggggaagctatcagggaaagaatgtatgggaagtctctgcactgttcatgccacttctctttagatctaaataatcctaaagtatttcaaaatcaagttaaaaacataaataaggcagcccccacactccctgcattattcccagccccccttctttgtgtacttcctagcacttagcacataggctaatcttgtttgttaactttcctgtttgttatctgacttcyctgcaagcctgtaaaccccacgggggcaggagctgccccatcttgcttacctcagtgtctcctgcacctaaataatgacttctgcaccattagtactgctttaaaatgtactgaataatgaattaattcatattcctggctgtgaccaggaaaaatgaatgaggaaaagtcagtattcttataaagccttcagatcatgagaaggtaacagagtcaggaacctcctccttcatgcccaaaagtgaaattatgggaccctcaaaaataggatcactgtcccagattttgcagacgggggaactagatgtactgcccagaaaccttgctccaaacatcaatggctcctttcagggccaccatagagagaggattcctggcaggatgtatctcagatgatcgggatcaggacactggccggacagagagcatctccctcatgggccccccagcctatctgaatctgacagggagccctggaattaacttcccaaccttacaactggcagcagaattttactgggaaaacccaagaaatcacattgtgcaaacctgggcctttcccatgaattccctccatggaccctcaaatcagcagccactgggaggcagcagcaggcattgcatgctgtatattgaggacctgtctagaggcctcgagcgcttttggccagttccagcatggttttaatgccccatttcycagcatcagacggaggtggtccacggtagcagaaggagcccagcgaggagtcagggttccgtttccacgtgtgggaacatgggaggagattgtatttggtactttctgtccgagccagaactgggggaccgtcccagtggcattgctgaggtgctgccgctcagccaggcatctttgggagattccagaccttggttctatgggaaggtgggggctgggcattcactgacaaggaaatgctcccgaatagggtgggagaagcattcgctggaccataaccaagtactgactaccgtcaacaaacctggctcttcacagttttcatttgacccactgtttcaaagtgttattttgcaggcgtggacactgagcccagaaggttaagtgccttgacaaagatcaggcaggtgaaaaggaggcacccagaagttgaactgatagatttctctcattccatacttttatttagaaaaaaagaaaactagccrggtgcagtggctcacgcttgtaatcccagcactttgggaggccgaggcgggcagatcacaagatcaggagatcgagaccatcctggctaacacggtgaaaccctgtctctactaaaaatacaaaaaattagctaggcgtggttgctggcgcctgtagtcccagctcctggggaggctgaggcaggagaatggcgtgaacccgggaggcggagcttgcagtgagctgaaatcgtgccactgcactgcagcctgggagacagagcaagactccgtctcaaaaaaaaaaaaagaaaaaagaaaaaaagaaaactgaacgtctccctttccccaccatggctgctgagtttcagacgtggtcttctgatggtcctggctgggtattgtcactttgatactttaagttggaaaagcagctgttaacctccagagccatggccgccactcctatcccacggcccctgccctttcacagccctgggtgggaaggacagaatccccacttcgcagataaggagactgatatcacataggttgcccacagggtcgggactgggaccaggagcccagttactggccagagaatctacccttttcaatgctctcttagcagctaaagcaggggctgtctgcccatgaaccttcacaggggaaaatctgggtcccaacaaatgctcttcctcagccccagcttttgagaaatatcttttctatccaaaggcacaaccactggccagctccagacccacatggctccagcaaagaaagggcactccctttgcccagtcacagtaatgcctatttcagtgccacaccccaggaagttttatcagtttctgataaaaatcattattttcctaaaaaattcccaacttccaggcttgcctggaacagccaggggaggcagtttcctgtgctggaattcctgggtggtttatcgatttcacaagcccacagcgcggaagtttggaactcaggtcggttcagttgagcaaaactcttgagtcagcctgggtagacccacaggtcaggcggggagggaggccacagcacgggcgtccccacagagctgatgggtttgtgggctgttccctcagtcctcagatcccacatgaagtcagcatgtggtctgccaacagggacaccactgagccccaggacccacccagcagccctgctgtgccctggggcacaagcacatagagccacgctttgaaagcggacaggagaagccgggactgagctgctccatcactgtcgcatgccctgtgacagccaacagcatggactgattttgtcttgcaaatgggggattcttacacagccatgtaacacagggggatctgcagttcctgaacccactgaaattgtcacccaagtcgtgttgtgtgagtgtgttagggaagagagcacacgtgtgtagatattcatggtaggaggtccagaactctgccatcagtgatctctgcctatgggaagagatcgtggcctgtgtcacggcatctgagcagcccggctctcaggcgagcttttgcygcatgcccagcaccctcaggygctgtgggacaagacaagttcatttttcctccgccctggsctgggatgagcggccacctcctcctgcccacacacgtctggccccatcccccgccccgcacagctgttcgcctgcccttggctggaccaggttcccaccacgaggacaggaagtgctccccacatccgcctcggcccgcacagcctggtgcttttccaaacctgacygtggtcactgagcccagtaaccagagagaatttttaaaaagactcacaaacatatcattgaaatctcagtgttgggttttggggaaggcactgggcggctcccacccctgctttcyggaaacacagatttctagagtttgaaasggaygggaggctaaagtgagactgccctaaatatagcgtcctgggtatttccggatatttccrgacacctggggaaatgtgggctttattccgcaactacagcctttgtttgattggcaggccagcccctgccacggggccctgctgcccatctcacttccagcctggcctctaccctcacctccactgtgtcttctaattcccctccacccacgccgcctccctgctgcccccgtcccctgtgcttcccactggccagaggcgcagcccaggctcctggcccgggattcgcaccctcagcaggcaggccgcagcagagctcatgtgccgtccccaacatcrctgacctgtgggcgcctccaccctgtgcatgcgaggtcccctctccctagagcaccctccctgccaccttctccacctaccaagacccatcccacccttcaaagccagttcagatgccacctgctcagatcccatcacccagtgagaccctccgacttccccagcacctgactggcctctccgggagttgtcactcctgccctggtttttcttgttcctttccacgtttcccttcttcctcttccagcttgttccagaaaggaaacgtgggtctcctgccctctgctgtttcctggtgcttgctttccctgccctgccctcagacccctctgctctggccctctgccttggctggccggcccctgcagggccygtctccctgacaccatggcagattcgcactcatgcctcagcccagctcagctgtcagccctgagccctcccctgccgcacctcccatccaggcagygggcaggctctggatgscttatgtcccctgagatgccgtcggttatgtcggttatgtccctgtctaccaggtttccctgcagggctggggcccttttctgccttgggtccaatgtccatcttccctttagcctggaagctcccagaggaggctccctcctgtctcatctctgggtcccaggaccagccgggccaagaaggggcgcaacgggagttcaggatttggagcctggggmctgctgagcaccagccaggtgcagggctcagggtgagcctggctgcagggcctcttggccctgtctacaccccgggaccaagcctggaacaaacgtttgcacaaaatgaagccggccccacccaggcctscctgggtccgctccaccttgagtggtgggtgtctgggggcggtggctcacaccagctctgccccctccagagcccgagccattctgagtgccagcccagcgctgctttgtcttctagtggagcgagaccgtgccctgggccaccaggagccccattggaaggagttccgctttgacctgacccagatcccggctggggaggcggtcacagctgcggagttccggatttacaaggtgcccagcatccacctgctcaacaggaccctccacgtcagcatgttccaggtggtccaggagcagtccaacaggtgccttccccttggcccgggtgccccacctaaccccccacctcacagtctcatggtcaaggcagcccagcagggagtcgtggtgggctgaaagagagcctcaaagatgggaaggatgcttggcccgaggcccctgcactgtgggaagagccccagtgacaatcctgacttcaagtccctgccctgccatcctggctgtggggacttggacaggtcactgagcctcagtttccccatgtgtacacctctgtgggctgaggcaatgagatgaggctcagaaggggcgcagccagagtcaggtgggagacgctccggtgacagcccccagcgggccctggagacacggaggcagctgtgccggccgccggttaattgttctttcatgtccacagggagtctgacttgttctttttggatcttcagacgctccgagctggagacgagggctggctggtgctggatgtcacagcagccagtgactgctggttgctgaagcgtcacaaggacctgggactccgcctctatgtggagactgaggatggtgaggctgggggctctgcagcccctggggcttctctgtgccagcacaggcagcggtagtggcttcctgtggccctgggtgcccggcctcaccagctgtgcccgctgcaagggtcactgaggtccagggcacgaggtctggcctagtgggggtgctccctcctctccctctgcttcccaggaagcaggcggctcttcccacggagcagcctccaccttgggagtttctgtcctgggaagggaaggaggggaagtggctgtaccctcaggcactgaggccaggaggctgggtttgaagcccagcttggcagtgccctgcctcagtgaccttggctgggacttacctttccagaccccgtcttctcttccgcaggatggggattcacgcccttgttcattccacaggtgacactggggagagcctcttttatgccaggcagtaggaatacagaggccaaagtgggcacgagatgggtgtgtttgaggcccggcaagggggcgccatggagcagcggtgagggcgggggwcccaggggccattctgagtcagagtaaaccagggccaggtgctggggttcttagcgtcatttattttatttactagcagtggaggacgacaggatctgattcaggttttaaaagagaaccctctgagatgcccccctctcggggtggagcagagctccccaccccttccgtgggctgcacccagtgacttgcttcccgaaagtgcggtgtggacagggcgtgggggacctgacgcgcagcgcctcagccaggtgaggaaggctcactgcagtgaccggcacggtgctagcatgtgccctgggtgaaagggaaggagaaggccactgagcctcagagggccccctccgtgaacccgaaaccccagtccagccacgagaaaaccgtcaaacaaacccaaagagaagggctttccgcagaatacctgacaagcgcttctcaaaaccgccaagctcatcaaaaaaaagggaaggttgggaaattggaggagcccagaggcacctaagaagaccagctcagtgcatgtggggtcctgggttgagtcctggaccagcaaaaggtcattagggagaagttatgaaatccagatcgatcatggtgtttacttaataataaggtatcagtattggttcattagttatgagaaaggtaccctgctagtgtaaaatattagcatttcccagaggaaactgggtccaggtgtatgggaactccttgtgtagtttttttttctttgagacagggtttggctctgttgctcaggctggagtgcagtggcgcaatcacagctgacggtaacctccaactcctgggcgcgagcgatcctcccaccttagcctctgtactatctttacaaagttttatgtaactatcaactgttgtaaaattaaaacttaatatatgcataaaataaagaaccccctgacttcagtggagagagcagactgagatggacaagagtgaagtcagagagacgtgtgggggccccacagtggtccaggtgggcgctgtgagtgacttgttggtagcagtggagatggagaaagatgagtcgatttcagtgtcaggacatgcttatagctggcgaggaggtgagggaacaggaggaagcctgaatgatgtgtggttggagccagtggatttttttcaatagatttttctttttggggaaaagatagatgaagggcaggtttgaggtgggtggccaagggttctcttttggctggaatattactgacccccctgggatgttactgagatcactggtcctcatggaaatgccattacagggaccggtgagcgtgaagacccaggcgagggaggtgctggcatgtaagtggatttaaagcatgggatgggaccaggtcatctagggaaggagggtagtgatggagaagaaagagggcctggcccagagccctgggacctccaacatccagagacctcacaaggaggggccacagagagcccacagagaccagccagggagggagcaggacacctggaggatgaggtgatccagacgccagagtaaagtgtttccagaagcaagggtttgtcatttgtgtcctgctgtgggcactgaaggcaagaacagagaagtgaccaagggttttgccatcacagaggttgttgatgacctaaatatccgtggagtgtgggtctgactgaggaggtggagggagacaggcagtggaggcaggagacagctctttccagaacctttgctggggaaggggagcagagacatgggctggggctggagagaacccgggacaaggcaggtcctttccaggtgaggagacgcctgcacgctgctgtggtgatgcagtgattctgtgcagagggaagaaaactgcaaaattccgcacaagttggagcagggagctggagtgggggaggtggagagggcggggggatgcagaggacaagacggggggcctcttcagagcagggacccttcctgatggaggtgagggatagtgtccccactgtcgcagtgaggggtgaacctgagctctgggaggctgtagtggggcaggcactcactctccgggttgtcacaggattaaaggagggtgcttggcacagagtgatgcccagtgaaggtgttcatgagcgtcggtgtcacccagcggcgcctgctcattggacacttggtgtctttaatgagctggggaagctggggggaagcttgggcggggtggttggagtttgtgtctgaggctccactggggcaggaggggacctagcctgtgccctactcgcggagcctgacctcagctctgtcctgcgcccgggcctgtgcgctggacacggaggactgactcggggcccccagcccagggcggagccggccccctccctgttgcgggtcgcgggcctggcctagagcctgcgcctggccggggagacctgctgggagggagtgcgtcagggcgcgggcgcccgccctgctctgtgacgcgcggcccgaggcgcwcgcagggctcacaccacytgtcctggcctccgacccgggccgactatggcggcgctgcggctcctggcgtcagtgctcgggcgcggggtccccgccggcggctcagggctcgcgctgtcccagggctgcgcccgctgctttgccaccagtccccggccccgtgccaagttctacgcggacccggtggagatggtgaaggacatctctgacggggcgaccgtcatgatcgggggcttcgggctctgcgggatccccgagaacctgatcgccgcgctgctcaggacccgcgtgaaagacctgcaggtggtcagcagcaacgtgggcgtggaggacttcggcctgggcctcctgctggccgccaggcaggtccgtcgcatcgtctgttcctacgtgggcgagaacaccctgtgcgagagccagtacctggcaggagagctggagctggagctcacgccccagggcaccctggccgagcgcatccgcgcggggggcgccggggtgcccgccttctacacccccacgggctacgggaccctggtccaggaagggggcgcccccatccgctacaccccggacggccacctggcgctcatgagccagccccgagaggtgagggagttcaacggcgaccacttccttttggagcgcgccatccgggcagacttcgccctggtgaaagggtggaaggccgaccgggcaggaaacgtggtcttcaggagaagcgcccgcaatttcaacgtgcccatgtgcaaagctgcagacgtcacggcggtggaggtgggggcttccccccagaagacatccacgttcctaacatttatgtagrtcgcgtgataaaggggcagaaatacgagaaacgaattgagcgcttaacgatcckgaaagaggaagatggagacgctggaaaggaagaggacgccaggacgcgcatcatcagacgcgcagctctggaatttgaggacggcatgtacgccaatctgggcataggcatccccctgctggccagcaacttcatcagtcccagcatgactgtccatcttcacagtgagaacgggatcctgggcctgggcccgtttcccacggaagatgaggtggatgccgacctcatcaatgcaggcaagcagacggtcacggtgcttcccgggggctgcttcttcgccagcgacgactccttcgccatgatccgagggggacacatccaactaaccatgcttggagccatgcaggtttccaaatacggcgacctggcgaactggatgatccctggcaagaaggtgaaaggcatgggcggtgccatggacttggtgtccagtcagaagaccagagtggtggtcaccatgcagcactgcacaaaggacaacacccccaagatcatggagaaatgcaccatgccgctgaccgggaagcggtgcgtggaccgcatcatcaccgagaaggccgtgtttgacgtgcacaggaagaaaragctgacgctgagggagctctgggagggcctgacggtggacracatcaaaaagagcacggggtgtgcctttgctgtgtccccgaacctcaggcccatgcagcaggtggyaccctgacgggacctggatctgggcggggtggtgcgctcctcagggcggatgccaccgggttccccaggggaatacatgtccccagctctgggaggggtttgctactggcctcctactttcctccctaggtggacagtgctcctctagagagctgcgactttaattaaaaacaacaggaaaacagatcagttcctcactgtgtttctcgagcactgcaaggcgcaggtctgcagtggtgaggaatggatgtccgctttgctctgtgatstttacacagagcgtgcacagctcagcgcattcacagcaagatttgattcaagcgcctccctcgtacttgaaccatgaaatggagataaaaactgacgagggagaaaatcactcaacccagagtacacctgaagggacattttactactgcagtgagaaataggcgagcaaagatgtgagtttgtgattggaagacatgctatcttcatgagcttgttttttctttttccttctctttcttttttcttttttttgaggcagggtctggctctgtcactcaggctggaatgcaatggaatgcagtgatctcactgcaacctctgcctcctgggctcaagcaatcctaactcagcctcctgagtagctgggactacaggcgcacatcacaatgcctgcttatttttttttattttttaaatttatttatagaaatggagtttcaccatgttgcccaggctggtcttgaacacttgagctcaagcgatccacttgcctcagcctcccaaagtgctgggattacagacatgagccactgagttgggccaattaaccttagcttactgtaatttttttttcttttttagacagaatctcactctgttatctaggctagagtacagtggtccagtctcagctcactgcaacccctgcttcctgggttcaagcaattctcatgtctcagcctctcaagtagctgggattacaggcatgtgccaccatgcctagctaatttttgtatatatatttttaacagtagagatagggtttctccatattggccaggctggtctcaaactctgggcctcaggtgatccacctgccttggcctcccaaagtacaggcttgagccattgcacccggccttcttgaacgtttttatccgttatctggtatttcttctggggcctttgttgttaaattttgtttccctgaagcctcccctcctcctcccacatctctcctcctgggacctatgagatgttaagcttctagatgtccgtagaaggaaagcaggaccatctccaagggaagggaccgggtgatgggagagactgagaggggagaggctgccggtgctgaaatccaccaggaagcttcctctatctgtgtgtggccaaaggctacagcctaggacaggaggagttctagaaccctaaccaagggactagatgagttttctcagcttcatttgaattgttcctgcatcattcacaccagacacttaggccctcctctctgggatggaggcccaaactggccacttgtgtgatggtccgttgtaacccaagaggctgygaggcatttcctcctgaatctatagtctcaaaaactaaaattaagattgtgtgtgtgtgtgtgtgcgcatgcacgcgtgcacacgtgctgttgacagccaagcctggcctggtgcatgcactgcataagtgtagctctgggggttcccmggccaytgggggcatgtggtcagagtagtaagttctcactggtcaaggacagactttccaggggcccattggagcctcaccctgcaggaaaggccagatcctgggaaggagagcagggcagggagagttggcgctcatggagggcacagactgggggtgtggaaaaggggccagggactatggctggggttgggggcttgaaatgaaatgtcatctagtgggcagtggggtgccttttggggctcctggagaggggcacctgatttgccctgggcgtcagtttcccaggagcagtgtggaaaaggctgaggtatctagaagcggacaagtgaccctctgggcctccaactccacctttctggaaggggcctgcccacagctgggcagcctgagagccccccaccttgactgcttggccttccctgcagccagctggagccagggagtcctgcctaagaatgggtgggtaagaagcagagctgatggagaagggaggctctgggctctggaaggagagggctggggatgggggagcttctccaggcctgccagatgcagggctctgaaccsagacccactgttagtccccttcaccaccccccatcttgcccagccacatccagctgggccctgcagtttgctggaaaagtatatgacaatcctggctccgacccaccttgctctgggaccttggacagttgctgctctctctgggccttagtttctgcttctgtaaaatgggaacctgggattagctgcttccaaggttccctagtcaggctcgcctggcctgtgagacctacagaggggttcccagcacccaagccaggcctggctcagaggggctctgtgagggtctgtggtgtaactgatctaatgcgacattctatcctgtgtctgggagaccccccataagacccttgaacacagctgcacagaagcaaatagtgaggaaagcctgcaggactgatggcctctcaggccccatrgcaggcagggctccccagggagtcacaggacagagctgcaagtggagccaggagggctgccctgggccccaggctgtccccatgkgtcagccagtctgcagagtgacactccagtgcccgggctggtgaccaccaccaccccactcaggctgctctgttctctctccgttgtgacctcacttgtcttttcctctgtgccccagctctgttccttgtatttctgctgcttccccataaccttgactcaccgtgactcaagccctgcccagtggattctctctgggcctccttcccatgttagcatctgcagctcacagcctccctgtctcagcagctcttgtccatgctcgtgagagggagggagcctctcctgccagtgcatttgtttgtggcggatgatgtcacgggtcaaaggttggtctctggattcactggttgttcagtcaagtggccaagggacaccagggctgaggcacagctgcttaagggctgacctttgagtgggactgagggtggggcaggcagtgtccttgacctgtagggtgtactggagaactacgtaggaataaatacatctgtgtgtgtgatgtctgtctgagcgtatgtgcatctgtgtgtttatgcaaacatatgcctgtgtgtacatacgtgtgtacatctgtgcttataacatggaggtgaaatgtactttcgtgtaaactgaacaactggcactgtttaaagagacatgaaaatgagctggtaatcatgcttctgcmattcagtatcaggaaatttcacccatgcacggagtgaagaggctccattgcactcccatctttatcatgaaagccgggaaataacctacatgtctatgatgagccaatatcaagtcaattacggtatactgctccaagggattttataaatttgaaatgtttattgtggagacttatttaaacaaccagaaaaagttttgtgttttgtttttttttycttgaaacacactctcattctgtckcccagctggagtgtggtgacacaatcacacctcactgcagcctcaacctcccaggctcaagcagtcctcccacctcagcttcccgggaagttcaccaccatgcccagctcatttttgtttttatatttttgttgagacagggtctcactatgttgcccaggctggtctcaaatgcctaggttcaagcaatcctcccacctcggcctcccaaagtgctgggattacaagcgtgagccaccttgcctggcctcaaaagtttctttacttaattgcttttacaatagaaaggttattgaaatccaaacaagtacaggatgatacacagttttattggtgaggcttggcatctccagggttagttatcatgttttcagcggcatcctcagtctggaagcggctgtgggggacaatcccgtttacaggcttcactcctcctggggctgaggcccaagtcagatctctgtttcagccttttctttctttcttttctgtccataagcccagctcgtgcataagaactcgggctctggaatgagactgccgcaggctgcaacctgggctctgggacttggttcaatgtttctgctctgcctggcatctcccttgtgggcatcagggagacagttaatgccctgctctwgggctgtgcccagcagaacaagcactcgctcaacctggcagatgctaccacgagctgtctcggtgataagtttgacattcacaccccagaaagtgcgggacggaagacagaacacaggtctcggggtccttggaccaaggtgggagcgctggttctcggagtcactggcagtaggactctgggtctcctgtgaagtaggagctgcagggtcactgtaaggacccaatgaggtgatccatgggaaaaatcttccaacttgtaaaacacttcacaaatgttattatttgtgacgcagctgtcactaataacaccgcctgcagctcactgagcaccccctcccacctcctccaaatctgtccccaggagagacgtggactggctggggctggaccaaggactccaggcttcagatgtggaaactgaggctcagcaggaccccttgggtcctcagcctccacgctcctggacctgcccaggccccggcagagagaccgctgctgtgtctgctgcagggccrctgcccgtgagtgacccctctctcctttctgtctcagggcacagcgtggatcctggcctggccggcctgctgggtcaacgggccccacgctcccaacagcctttcgtggtcactttcttcagggccagtccgagtcccatccgcacccctcgggcagtgaggccactgaggaggaggcarccgaagaaaagcaacgagctgccgcaggccaaccgactcccagggatctttggtgagggtcgggcaggctggggccgaggccctgtgggcttctggctgagagaggcagggcgagaaccaagtggtggcccagagccctcaggctcaggtcggttcaagctgacggccactctccagccacctttcctgacaccatcttggccctgatgcaccctggtgaccggcactccggaggcctgtcctggctgtccctgctgcccagaagtctccctctctccccctggctcctccgggtctttctcaggagcctccttcagaatcagctgccccttccctgggagccgcagcccctcatgacctgcggttgtgcctgggcaccctgtgggatcctcggttgcttatgcgagttttctccccaactgggccaagcccttcaggatcagggacaggcctgacccaaccccgtgccctccttcccagggagtcggcccttgactggcctggtcgtgagccacttgaacctcsggaatgggtgtggcaggagagggtgggctggagtcacaggggtctccagagaggaggaggcacaggatggccgagggtcctgctgggctgtttactggagcataaagaygctcataggctgaaggacaggggaggactgggcacagtgtcactctagccattgggagccatggcaggcttytragctgggtcatggtacaagcagmgttccagggatgggctttatgagaccaratggtttcctgtcattcatttatttgacaaatgtgctcatcagggcatcccccaccctggtaccccatagtagctgcacacagyaggaaccccagaaaagaccttgccccttctgtccctgcagatgacgtccrcggctcccacggccggcaggtctgccgtcggcacgagctctacgtcagcttccaggacctyggctggctggtaattgctgactctycttgtttctgaaatgacaatcaccacctgtagatcagaagtgaatctgcagggaggacatagaatcatggtgacttcaattttcttatgtatttttttcttctgtgttttccaagttttctaaagtgagaatatggtgagaaagggttttkttgttkttgttstnttttttgttttttttaaaaccatgaaaatgaagactgaatcaaccaactaagctgtcagcattgcygcagggtaactgagacctccctgcattggctacgactgcagctctgggaggygtgggcaggggagggccrgcwggggagggccggctggggaggggacrcaaagtgaagatgggggwtgttgggcctgagctcctgcccagccttttcygccgggggttcctgggtggattcaagcctcttgggggagacggccctgcagggctggaggatgggtttgggccctgaggctcagggaggrgcacatggatgggactcaccttctcccttgccccccaggactgggtcatcgccccccaaggctactcrgcctattactgtgagggggagtgctccttcccrctggactcctgcatgaaygccaccaaccacgccatcctgcagtccctggtcagtaccgtgcccatcctgcccagccccctggggtgggaggccctgcagagaggggtctggtccagccagccgggagggcagtgaggccacctgctccatgtctsgggggctttgtctgcacagagtcagtaacgtcgctaacttcccacagctctgcaggaactggtcctcatacagccacactactacacatagacccacacccaaacacggacacacrtgaacagtcgcgtatgcatgcctgttctatgcactgaacaaactcctgtgggacacttacacacctgcgtgcggcgctcagaggcacagcacatgaaacagatgtgtacactgtgtgggggctgtgtgatcttaacacacgggcccccgagtacgctggcaagtctgaccgccygtgatatgtgygcacagtgtgtggggtgtgcgtgtgcactcacccacctgtgccgcaccacaggcaggaagcttctagatggtgtggctctcaaccttttggctttttcccgcagtttctctcttggctgtctgtgttttytctggatcccctggcttttgatgccttggtgtctggggcaaccttaaaggacaaaagcaggcttctgatgggatcactggtgctgctcaccactgagtgctctgtgtgtttgcggattctggcaccgaggcttccttctagaagtttttacctagaatcccagttcctggtattgcacagccttatgttttcctcttaggaggttcaacggtgatgccttgatcaggcgcagtggctcaccctgtaatcgcagcacacgagcccagaagttcaagacaagcctgagcaacacagcaaaaccctgtctctaaaataaaaattaaaacacacacacacacacacacacacacacamgtgcgcacacaatgccttggtgtgagaggaaagaaattaccaaaagctgctctgagcctatgataatacttcctttctgggcagtcaaatggtgtttgctggacacctggagccatctccttggaaaggcccaggggtgatgaggacgcgtggggtggcctggcccagccaccctttatgccgtgtggttctcacagctgcatgtgtgggaggtacatgggaaggtgactgcacctgcagctccyggactccatctcctctgcccttgcccctgcccctcaggggctcaactagagtgagtgctcacagcctacagggcagcaaacaggcactgtgctctaggggaggctgtcggtgggcacagaagcaaaccaaccgtggagttgacacctcctgtgaggaagagcagagcagccgtgccgtcagtggagtgagactgggcccagcctctccacacaaggaggggcacgtcagcagctggaggaggaatgttccagaaggagcaagtgcaaggccctaagacaggagcaggctggccctaagttcagggccagcagggaggagaggggctgggtgcagtgaaggggaggagagtggagggaggtgatgccrgggtgagccaggccagctcccgtagggcctggggttccctgggaaggagggtggattttattccaagcaaccccagaggctgtcagaggtcttcagcaaagcagtgtcctggtctgcgtcaccctccagaaggacctttctggcttggggaggctgatggtcgcgggagtggaaggcagaggagcaggggatgagtgagggctgctgtggtcacctggcaggtgatggcagctcgactgggcaggtggtccgaggcagcacggaggtggaggttgagccaggggctgctctcagggaagggaggaggcgaaaggagtcatccaggaggcctcccaggcgggagctatgatgtcagggcgggaggaattctatgttccactgaggcctcattagacccccaagtgcagaagtgggaaggggagcaggatccgcaagtctggagttcagaagagaggtccaagctgagccaggggagtggagaggtgcgggcacatgcagggccttgaagtgctgagggcggatgcagtcctctgggagaaggagcagcacaggagagggggcgaggcctggcctcccagagcctggggagggaggccagggtgtggggaggcagagcctctgggggggtctgaagggctataagaagacagtggtccttccaggttcccccttggggacctcactaagggcacaaacctggccatgaggttctccttcccattatccccaggaggaagtctgagcccttggcctgggactcgaggcccctcattagtgccctgcccacctgccccacaccctggggctgccatgtatccctccctgggcactgtgggcyaccacagctcccgctcccagagctctcagggctgctcttattcctgttaataattcttattattgtgctgctcccatgtggcttggagatggccagggcagggagcaggtggagctggggcggggctaggtgggtcctcagaggaggccactggcctcatgcccctgcctgtgctcccttcctggccaggtgcacctgatgaagccaaacgcagtccccaaggcgtgctgtgcacccaccaagctgagcgccacctctgtgctctactatgacagcagcaacaacgtcatcctgcgcaagcaccgcaacatggtggtcaaggcctgcggctgccactgagtcmrcccgcccrgcccwactgcagccacccttctcatctggatcgggccctgcagaggcagaaaacccttaaatgctgtcacagctcaagcaggagtgtcaggggccctcactctckgtgcctacttcctgtcaggcttctggtcctttctcggtacctctgtgcccctcccctggggtttgtggctgtcactctgcccgacactttggtggcctaaggcacacagcagcctcagagcctgtgctgactgcactgtctggagtgagtcagcacagaagtcctatcttaggacctgtcagactgtggctggccccggatggtctgaggttggctgacccgagcttttctccattcaccagagggtttaggtgtgaggagaagggctctgcctcttcccaggtacaacactggccatttctgggcaaaattggacacgcttatgttctcagcacagtgtgttctgggattcttctcatttggtccagggtgcagttagcatattagaaaaagaataagctggacatccccacgaagccactggggattttttttttttttttccagatagagtctcactctgtcacccaggctggagtgcagtggtgcaatcctggctcactgcaacctctgcctcccaggttcaagcaattctcgtgcctcagcctcctgagtagctgggattacaggggcccaccaccacgcccagctcattcttgtatttttagtagagacggggtttcaccatatcggccaggctggtcttgaactcctgacctcaggtgatccacccgcccggcctcccaaagtgttgggatgacaggcatgagccaccgtgcctggccactggggatattttatgtcatgtgtattcccttgccctgggcctgccccttctcctgcctgggaaagaggtatgactcccacaggagcaaagaatcctgggggcttccagttccctccaccatctctaccatgctgacccatttggggctcagcactgagacagaggcaagaccagcagctccaacatgtagtgtaggctggcacagagcaaatgcccccgcagcctactccccttgcccatggctcatgtcagtaatcaacctacgtacctttcccactgaaccaggacagggcctccaggcctcagcacagaactgcagacagccaccaccaggcattgtcaataagacctcagttccccctcctgccccactgcagagcaatccattccatccaaagcagggtgactggcagtctccggccaggcatggggcaagggtggggactgccagtgtttgcttgtgtctaggagttatgaacaagctggccaccaaaatcggcgtcaccctgggtgcccaccagcgctgtcctgtgtcttgggtctgtgagtcaaagaaaaggtccctggcccagggagtgacaggcagtaattaggctgagttgggtggggaggtttgtctcggcctccactgttcccggaaaccgctgttctccttggaacagccactgggagttggagtgtttatttgatttctgacttgctaagcctgtaatttacctgctggaacagacagagtccagctgcccaaaccgtgtcattaaaagcagatcctgggcccgccccatccacaggcacagcctggcagagtggttccacctccccatgggcccaaggatgcgcctctctggagttcacgtgctgcacccccagggaggggcctggggagagctggtccagcagcaggggtggaggctggggccacactgcgggacagcagcccctccacctggaccagggagggcctccatgtgcaagcgcagaggaagagaccctctcatgtacataaagggtgggcccaggctgtctggaagatggtgagttccccactagtctaaggcttcaagctcagctagcagagattggaagaggcaatggcctgagtgttaggagacaggtattccggttccaactcagccactgacttggtgtcaggacaagtcccctttcttattcacgcttcagtttctcatctgcaacatgaggacataggactctttaattccaaaggctcttccaacccagagaacccatctgcccccatgaccttctcccagagcttgagacatggcctgagccccctgctgccataggacttggggcctatctgccattgcaggacctgatttaacagctctcttcttccaatactgggcagtagagtttcggaaactgacaaatgtgtggtctcttcagtgcccagtgtgtaacctggcatggtttgggtgtgctaggagtttgtgaaatgaatgttttcaagacgcaaacgctgctatgcccatcaggtgtgcacagcaggcctgaggatcatgatgagactccctttttatgcagcaaagcacaaagtgtgacagtcgtggccttcctggtggccagacttctagcaactttagccacccaccaaatgacatcacatacagaaggcctcagaaagggaggaggtcgtaaggacacacagctgatgaagggtcagtgctcagctatcaaggtcatcttctggcctggttgcctcccacagcccaggatgcattcaaggctgcacatcaggagcataaataagggtggtcagctcaggcccactggctgcaacaagtagccactgacagggagtctggggccatttggtgcagaacaacccccaacccagtggccatcttcacaactgcagcacagtgctggccctaatgccaggtgagcgtgcaaagtcctgtttctttgtctttacatagggaccgggcgatgcgctttagagaaattccctattatttcacaggaaaggaggctgtgaaaaggagagggcaggttttggagccaagtcgacctggcatcaggtcctggctgcctttttttttttttttttaaagacatacatggtcttgctttgtcgcccaggctggagtgcagtggcagtgtcatggctcactgcagcctcaacctgctgggctcaagcaatcctcccacctcagcccgagttgctgggatgacaggcacacgccaccatacccagctaatttttttattttttatagaaaccaggtctcactatgttgcccaggccggtcttaaactttgcccaggccagtcttgaactcctgagctcaagcaatcctcctgcctcagcctcccaaagtgctaggattacaggcgtgagccacttacccggcctctgcctcttgttaatttgaccacatcatgtacctgctgtgcccgttccttcctccgtagaagagggtgctggtcctgcccttttgaggcctccatgagggccaaatgtgccatgggacacttagtgccatgcctgcgcagacctgtggaataaacagcaattctgagcaggctcattttaaagggacttgcaaatttgggcgttccttgtgtgccttcctcataaaacccactcctcccagaatatgcttagaggtgctgctgtatttacctgagagctatgcttttcatcaaaaacctaaacgtgatcatctcttggatgaggtgtggccctgcaccctcgcctgctcgtggaaggagtctgggccagcagtgacccacgcgctagggtctctgctgaggaagtggcaggtgtgtggccctgccctggccccgtagtgagtgtggggcccacctgtgccctcatgggcagctgaagggggagctttctaccccaggttcctttccttactgaaaagtcttgagcaaacagttgccgctctccaccccctgctttttaaaaaaaattttttctcacgtaagaaaatgttatctgtgtgctggggaaaattttgaaaataacaaaaaccagaatacaaacacccataatcaatcacagagataaccactgttcataattccttccagtcttcttacttggcacatatacatttgtctttctttatatatgacatatggatattttacaaagttaggatcctactctatgcactgcttggtgatcggatctattcaatgtacaaaatattttgaaagtttctgtgattaaatgttctttgaaaacataacttttagcagccttccatcccttcagttctgctttagcttctcccttgtatgtctggtcttgcgttcccttcctcagaggccgggatggggctcctgtgaccagggtggcaggcagcctagtgctgagatcgcatggccacgaggctggccatgggtctggaatccctgggccaagaacctcctctccttctctgtgcagcaattggcacaagcaggggcaggtgcctcacctctgaggcttaggtgacctcagagtacaagggtcacagatggacccactgggataacttccggggaaaccctgatggttcctctcccactggcctctggctggtcccttggtccctccttcccagggtaatcaggcaagcacagcaataaggtcctcccttgtttcacagggttgtgggaccagttctccctcccggggcctcgggccagcctgcctgtcacccccagaacccacagtgttgagcaattcacacacatcctcttctctcctgggcttcatggcagccctgagtagctgccttatcctggcctcaatgctgcctgtcctgacggccatgactgaccaccagtaatgacaccgacattgaggagtgagagtgcctgctgggaaagctgcaggcccaagctgatcaagcggggagaagccccacccagggtgccagaggtggagctggcttggggtcactggggccagggcaataggcttctcctttccccaccaccctcaccctggtggatactcaacatcaagacttgattcagccagcattctgggaggccaaggcaggtggatcacctgaggtcaggagtttaagaccagcctggccaacatggcgaaacccccatctctactgaaaatacaaaaattagctgggcatggtggcgggtgcctataatcccagctacttgggaggctgaggcagaattgcttgaacctgggaggcagaggttgtagtgagctgagatcatgctccagcctgagtgacaaaagcaaaactccatctcaaaaaaaaaaaaaaaaaaaaaaggcttgattcagacagagctcctaggacatgtcatgggagccagtgggcagccctgggggaggtttctggagactgatagggctcagtttcaacacctgaaagaggccatgaggtggcctggctggcccaaaattggtgcagggtgagaggccatcctagcacaggctgcgcaccatgacaccacactgcagtttccaggtaggcctggggttggggaggaggaagtaggagccacccctggcttgtttctccccagcaccaagcacatccgctgactaaagaagcgccctgtgtgctcctcggtaatacagttctgttggttcaggaagtgcataatgagtgccaggtcagtgagactgattacaaatgtccatcaggcacaagaccagctggtgtgagagcaggaatggtaactgaccagaaagaaaagacacaggcacttttacatggctttgacttctactgccccacaatgggctgccgagggcatctcctaagggacttggcctaagagagaagagcagcagccgagatgctatggcctgtcccagcagcaacctctgaaaacacctgggacctggctggcaggcagcagtataagaactagaatttattttagcaaaccaaagagaacaaaacatccaggagccacattggtgggcccacagcagacccagcagcaaatgccgagaaaagtggtggttggagaaggagcacctgtgctggttcgtgggcccacagctgcacttgggaacagtccaggctgtgcctacagaggtgctccaagctgaccctaaggtgggcctcatgccacaaatcctgcttgcttcaaatagggcaccctcggtgctgcctcctctgaggctggcagctccttcctggatgtgcaggggcaagagcagagtggagagcagagagagtgccgcctcacacatactccccacagttgccaatgatcaccttctgccttggcttcccatccttgcctttgcagacagaatagaagaggggacactcagg

SEQ ID NO: 93905 - DNA, 13781 bp, Homo sapiens
  misc_feature (1)...(13781): n = A,T,C or G
aagcaaattcatttgctgcttccccagacagaagctggttcagcgtgagaccatttggggcagcttttatgattttgtagaaaataaatatttagaggtgcttatggaaccaggtatagcttggtctgtttcctgtgaccaacgaattgctctctgcatatgtcttttcatatttttgccaatacatctttggaattcttgtgtcaaatgtaattttgctaggtattgctaaattcctcctctacacagcattcctatcagcaacgcctgagagaatgttcatgtctgatcttaatctttttctttctcaaaggccatacggagcaccctatgaaaagcacccattactcttgagcccataaccttttctgtttccttcatagcatttacagtagaacaatagaaatgacatcccatattttagttgctttttgtttgcattttatgtcttccgttggaccgtaaactccctgtgtgtggaaaaagtatcttgtttattgttgtattgcccagaacagtgttgtacacacagtaagaactgaataaatttatttctaaattaaacatgatgatcttattagatgagtgaaagaatacatttatttagaaaaacttaattcaaagtattatttctgaccaaaaagtaagacttcaaaagacacccttgggtgctgtgggacaaggcacgttctttccttctccgccctgggctgggatgagcggccacctcctcctgcccacacacgtctggccccatcccctgccccgcacagctgttcgcctgcccatggccggaccaggtccccaccacgaggacaggaagtgctccccacatccgcctcggcccgcacagcctggtgcttttacaaacctgaccgtggtcactgagcccagtaaccacagagaatttttaaaaagactcacaaacatatcattgaaatctcagtgctgggttttggggaaggcactgggcggctcccacccctgctttctggaaacacagatttctagagtttgaaacggatgggaggctaaagtgagactgccctaaatatagcgtcctgggtattttcggacacctggggaaatgtgggctttattccgcaactacagcctttgtttgattggcaggccagcccctgccacggggccctgctgcccatctcacttccagcctggcctctaccctcacctccactgtgtcttctaattcccctccacccacgccgcctccctgctgcccccgtcccctgtgcttcccactggccagaggcgcagcccaggctcctggcccgggattcgcaccctcagcaggcaggccgcagcagagctcatgtgccgtccccaacatcgctgacctgtgggcgcctccaccctgtgcatgcgaggtcccctctccctagagcaccctccctgccaccttctccacctaccaagacccatcccacccttcaaagccagttcagatgccacctgctcagatcccatcacccagtgagaccctccgacttccccagcacctgactggcctctctgggagttgtcactcctgccctggtttttcttgttcctttccacgtttccctccttcctcttccagcttgttccagaaaggaaacgtgggtctcctgccctctgctgtttcctggtgcttgctttccctgccctgccctcagacccctctgctctggccctctgccttggctggccggcccctgcagggcccgtctccctgacaccatggcagattcgcactcatgcctcagcccagctcagctgtcagccctgagccctcccctgccgcacctcccatccaggcagtgggcaggctctggatgccttgtgtcccctgagatgccgtcagttatgtcggttatgttcctgtctaccaggtttccctgcagggctggggcccttttctgccttgggtccaatgtccatcttccctttagcctggaagttcccagaggaggctccctcctctgtctcatctctgagtcccaggaccagccgggccgagaagggggcgcaacgggagttcagggtttggagcctggggcctgctgagcaccagccagctgcggggctcagggtgagcctggctgcagggcctcttggccctgtctacaccccgggaccaagcctggaacaaacgtttgcactaaatgaagccggccccacccaggcctccctgggtccgctccaccttgagtggtgggtggctgggggcggtggctcacaccagctctgccccctccagagcccgagccattctgagtgccagcccagcgctgctttgtcttctagtggagcgagaccgtgccctgggccaccaggagccccattggaaggagttccgctttgacctgacccagatcccggctggggaggcggtcacagctgcggagttccggatttacaaggtgcccagcatccacctgctcaacaggaccctccacgtcagcatgttccaggtggtccaggagcagtccaacaggtgccttccccttggcccgggtgccccacctaaccccccacctcacagtctcatggtcaaggcagcccagcagggagtcgtggtgggctgaaagagagcctcaaagatgggaaggatgcttggcccgaggcccctgcactgtgggaagagccccagtgacaatcctgacttcaagtccctgccctgccatcctggctgtggggacttggacaggtcactgagcctcagtttccccatgtgtacacctctgtgggctgaggcaatgagatgaggctcagaaggggcgcagccagagtcaggtgggagacgctccggtgacagcccccagcgggccctggagacacggaggcagctgtgccggccgccggttaattgttctttcatgtccacagggagtctgacttgttctttttggatcttcagacgctccgagctggagacgagggctggctggtgctggatgtcacagcagccagtgactgctggttgctgaagcgtcacaaggacctgggactccgcctctatgtggagactgaggatggtgaggctgggggctctgcagcccctggggcttctctgtgccagcacaggcagcggtagtggcttcctgtggccctgggtgcccggcctcaccagctgtgcccgctgcaagggtcactgaggtccagggcacgaggtctggcctagtgggggtgctccctcctctccctctgcttcccaggaagcaggcggctcttcccacggagcagcctccaccttgggagtttctgtcctgggaagggaaggaggggaagtggctgtaccctcaggcactgaggccaggaggctgggtttgaagcccagcttggcagtgccctgcctcagtgaccttggctgggacttacctttccagaccccgtcttctcttccgcaggatggggattcacgcccttgttcattccacaggtgacactggggagagcctcttttatgccaggcagtaggaatacagaggccaaagtgggcacgagatgggtgtgtttgaggcccggcaagggggcgccatggagcagcggtgagggcgggggacccaggggccattctgagtcagagtaaaccagggccaggtgctggggttcttagcgtcatttattttatttactagcagtggaggacgacaggatctgattcaggttttaaaagagaaccctctgagatgcccccctctcggggtggagcagagctccccaccccttccgtgggctgcacccagtgacttgcttcccgaaagtgcggtgtggacagggcgtgggggacctgacgcgcagcgcctcagccaggtgaggaaggctcactgcagtgaccggcacggtgctagcatgtgccctgggtgaaagggaaggagaaggccactgagcctcagagggccccctccgtgaacccgaaaccccagtccagccacgagaaaaccgtcaaacaaacccaaagagaagggctttccgcagaatacctgacaagcgcttctcaaaaccgccaagctcatcaaaaaaaagggaaggttgggaaattggaggagcccagaggcacctaagaagaccagctcagtgcatgtggggtcctgggttgagtcctggaccagcaaaaggtcattagggagaagttatgaaatccagatcgatcatggtgtttacttaataataaggtatcagtattggttcattagttatgagaaaggtaccctgctagtgtaaaatattagcatttcccagaggaaactgggtccaggtgtatgggaactccttgtgtagtttttttttctttgagacagggtttggctctgttgctcaggctggagtgcagtggcgcaatcacagctgacggtaacctccaactcctgggcgcgagcgatcctcccaccttagcctctgtactatctttacaaagttttatgtaactatcaactgttgtaaaattaaaacttaatatatgcataaaataaagaaccccctgacttcagtggagagagcagactgagatggacaagagtgaagtcagagagacgtgtgggggccccacagtggtccaggtgggcgctgtgagtgacttgttggtagcagtggagatggagaaagatgagtcgatttcagtgtcaggacatgcttatagctggcgaggaggtgagggaacaggaggaagcctgaatgatgtgtggttggagccagtggatttttttcaatagatttttctttttggggaaaagatagatgaagggcaggtttgaggtgggtggccaagggttctcttttggctggaatattactgacccccctgggatgttactgagatcactggtcctcatggaaatgccattacagggaccggtgagcgtgaagacccaggcgagggaggtgctggcatgtaagtggatttaaagcatgggatgggaccaggtcatctagggaaggagggtagtgatggagaagaaagagggcctggcccagagccctgggacctccaacatccagagacctcacaaggaggggccacagagagcccacagagaccagccagggagggagcaggacacctggaggatgaggtgatccagacgccagagtaaagtgtttccagaagcaagggtttgtcatttgtgtcctgctgtgggcactgaaggcaagaacagagaagtgaccaagggttttgccatcacagaggttgttgatgacctaaatatccgtggagtgtgggtctgactgaggaggtggagggagacaggcagtggaggcaggagacagctctttccagaacctttgctggggaaggggagcagagacatgggctggggctggagagaacccgggacaaggcaggtcctttccaggtgaggagacgcctgcacgctgctgtggtgatgcagtgattctgtgcagagggaagaaaactgcaaaattccgcacaagttggagcagggagctggagtgggggaggtggagagggcggggggatgcagaggacaagacggggggcctcttcagagcagggacccttcctgatggaggtgagggatagtgtccccactgtcgcagtgaggggtgaacctgagctctgggaggctgtagtggggcaggcactcactctccgggttgtcacaggattaaaggagggtgcttggcacagagtgatgcccagtgaaggtgttcatgagcgtcggtgtcacccagcggcgcctgctcattggacacttggtgtctttaatgagctggggaagctggggggaagcttgggcggggtggttggagtttgtgtctgaggctccactggggcaggaggggacctagcctgtgccctactcgcggagcctgacctcagctctgtcctgcgcccgggcctgtgcgctggacacggaggactgactcggggcccccagcccagggcggagccggccccctccctgttgcgggtcgcgggcctggcctagagcctgcgcctggccggggagacctgctgggagggagtgcgtcagggcgcgggcgcccgccctgctctgtgacgcgcggcccgaggcgcacgcagggctcacaccacctgtcctggcctccgacccgggccgactatggcggcgctgcggctcctggcgtcagtgctcgggcgcggggtccccgccggcggctcagggctcgcgctgtcccagggctgcgcccgctgctttgccaccagtccccggccccgtgccaagttctacgcggacccggtggagatggtgaaggacatctctgacggggcgaccgtcatgatcgggggcttcgggctctgcgggatccccgagaacctgatcgccgcgctgctcaggacccgcgtgaaagacctgcaggtggtcagcagcaacgtgggcgtggaggacttcggcctgggcctcctgctggccgccaggcaggtccgtcgcatcgtctgttcctacgtgggcgagaacaccctgtgcgagagccagtacctggcaggagagctggagctggagctcacgccccagggcaccctggccgagcgcatccgcgcggrgggcgccggggtgcccgccttctacacccccacgggctacgggaccctggtccaggaagggggcgcccccatccgctacaccccggacggccacctggcgctcatgagccagccccgagaggtgagggagttcaacggcgaccacttccttttggagcgcgccatccgggcagacttcgccctggtgaaagggtggaaggccgaccgggcaggaaacgtggtcttcaggagaagcgcccgcaatttcaacgtgcccatgtgcaaagctgcagacgnnnnnnnnnnnnnnnnnnnnacgttcctaacatttatgtaggtcgcgtgataaaggggcaggaaatacgagaaacgaattgagcgcttaacgatccggaaagaggaagatggagacgctggaaaggaagaggacgccaggacgcgcatcatcagacgcgcagctctggaatttgaggacggcatgtacgccaatctgggcataggcatccccctgctggccagcaacttcrtcagtcccagcatgactgtccatcttcacagtgagaacgggatcctgggcctgggcccgtttcccacggaagatgaggtggatgccgacctcatcaatgcaggcaagcagacggtcacggtgcttcccgggggctgcttcttcgccagcgacgactccttcgccatgatccgagggggacacatccaactaaccatgcttggagccatgcaggtttccaaatacggcgacctggcgaactggatgatccctrgcaagaaggtgaaaggcatgggcggtgccatggacttggtgtccagtcagaagaccagagtggtggtcaccatgcagcactgcacaaaggacaacacccccaagatcatggagaaatgcaccatgccgctgaccgggaagcggtgcgtggaccgcatcatcaccgagaaggccgtgtttgacgtgcacaggaagaaaragctgacgctgagggagctctgggagggcctgacggtggacgacatcaaaaagagcacggggtgtgcctttgctgtgtccccgaacctcaggcccatgcagcaggtggcaccctgacgggacctggatctgggcggggtggtgcgctcctcagggcggrtgccaccgggttccccaggggaatacatgtccccagctctgggaggggtttgcyactggcctcctactttcctccctaggtggacagtgctcctctagagagctgcgactttaattaaaaacaacaggaaaacagatcagttcctcactgtgtttctcgagcactgcaaggcgcaggtctgcagtggtgaggaatggatgtccgctttgctctgtgatgtttacacagagcgtgcacagctcagcgcattcacagcaagatttgattcaagcgcctccctcgtacttgaaccatgaaatggagataaaaactgacgagggagaaaatcactcaacccagagtacacctgaagggacattttactactgcagtgagaaataggcgagcaaagatgtgagtttgtgattggaagacatgctatcttcacgagcttgttttttctttttccttctctttcttttttcttttttttgaggcagggtctggctctgtcgctcaggctggaatgcaatggaatgcagtgatctcactgcaacctctgcctcctgggctcaagcaatcctaactcagcctcctgagtagctgggactacaggcgcacatcacaatgcctgcttatttttttttattttttaaatttatttatagaaatggagtttcaccatgttgcccaggctggtcttgaacacttgagctcaagcgatccacttgcctcagcctcccaaagtgctgggattacagacatgagccactgagttgggccaattaaccttagcttactgtaatttttttttcttttttagacagaatctcactctgttatctaggctagagtacagtggtccagtctcagctcactgcaacccctgcttcctgggttcaagcaattctcatgtctcagcctctcaagtagctgggattacaggcatgtgccaccatgcctagctaatttttgtatatatatttttaacagtagagatagggtttctccatattggccaggctggtctcaaactctgggcctcaggtgatccacctgccttggcctcccaaagtacaggcttgagccattgcacccggccttcttgaacgtttttatccgttatctggtatttcttctggggcctttgttgttaaattttgtttccctgaagcctcccctcctcctcccacatctctcctcctgggacctatgagatgttaagcttctagatgtccgtagaaggaaagcaggaccatctccaagggaagggaccgggtgatgggagagactgagaggggagaggctgccggtgctgaaatccaccaggaagcttcctctatctgtgtgtggccaaaggctacagcctaggacaggaggagttctagaaccctaaccaagggactagatgagttttctcagcttcatttgaattgttcctgcatcattcacaccagacacttaggccctcctctctgggatggaggcccaaactggccacttgtgtgatggtccgttgtaacccaagaggctgcgaggcatttcctcctgaatctatagtctcaaaaactaaaattaagattgtgtgtgtgtgtgtgtgcgcatgcacgcgtgcacacgtgctgttgacagccaagcctggcctggtgcatgcactgcataagtgtagctctgggggttcccaggccattgggggcatgtggtcagagtagtaagttctcactggtcaaggacagactttccaggggcccattggagcctcaccctgcaggaaaggccagatcctgggaaggagagcagggcagggagagttggcgctcatggagggcacagactgggggtgtggaaaaggggccagggactatggctggggttgggggcttgaaatgaaatgtcatctagtgggcagtggggtgccttttggggctcctggagaggggcacctgatttgccctgggcgtcagtttcccaggagcagtgtggaaaaggctgaggtatctagaagcggacaagtgaccctctgggcctccaactccacctttctggaaggggcctgcccacagctgggcagcctgagagccccccaccttgactgcttggccttccctgcagccagctggagccagggagtcctgcctaagaatgggtgggtaagaagcagagctgatggagaagggaggctctgggctctggaaggagagggctggggatgggggagcttctccaggcctgccagatgcagggctctgaacccagacccactgttagtccccttcaccaccccccatcttgcccagccacatccagctgggccctgcagtttgctggaaaagtatatgacaatcctggctccgacccaccttgctctgggaccttggacagttgctgctctctctgggccttagtttctgcttctgtaaaatgggaacctgggattagctgcttccaaggttccctagtcaggctcgcctggcctgtgagacctacagaggggttcccagcacccaagccaggcctggctcagaggggctctgtgagggtctgtggtgtaactgatctaatgcgacattctatcctgtgtctgggagaccccccataagacccttgaacacagctgcacagaagcaaatagtgaggaaagcctgcaggactgatggcctctcaggccccatggcaggcagggctccccagggagtcacaggacagagctgcaagtggagccaggagggctgccctgggccccaggctgtccccatgggtcagccagtctgcagagtgacactccagtgcccgggctggtgaccaccaccaccccactcaggctgctctgttctctctccgttgtgacctcacttgtcttttcctctgtgccccagctctgttccttgtatttctgctgcttccccataaccttgactcaccgtgactcaagccctgcccagtggattctctctgggcctccttcccatgttagcatctgcagctcacagcctccctgtctcagcagctcttgtccatgctcgtgagagggagggagcctctcctgccagtgcatttgtttgtggcggatgatgtcacgggtcaaaggttggtctctggattcactggttgttcagtcaagtggccaagggacaccagggctgaggcacagctgcttaagggctgacctttgagtgggactgagggtggggcaggcagtgtccttgacctgtagggtgtactggagaactacgtaggaataaatacatctgtgtgtgtgatgtctgtctgagcgtatgtgcatctgtgtgtttatgcaaacatatgcctgtgtgtacatacgtgtgtacatctgtgcttataacatggaggtgaaatgtactttcgtgtaaactgaacaactggcactgtttaaagagacatgaaaatgagctggtaatcatgcttctgccattcagtatcaggaaatttcacccatgcacggagtgaagaggctccattgcactcccatctttatcatgaaagccgggaaataacctacatgtctatgatgagccaatatcaagtcaattacggtatactgctccaagggattttataaatttgaaatgtttattgtggagacttatttaaacaaccagaaaaagttttgtgttttgttttttttttcttgaaacacactctcattctgtcgcccagctggagtgtggtgacacaatcacacctcactgcagcctcaacctcccaggctcaagcagtcctcccacctcagcttcccgggaagttcaccaccatgcccagctcatttttgtttttatatttttgttgagacagggtctcactatgttgcccaggctggtctcaaatgcctaggttcaagcaatcctcccacctcggcctcccaaagtgctgggattacaagcgtgagccaccttgcctggcctcaaaagtttctttacttaattgcttttacaatagaaaggttattgaaatccaaacaagtacaggatgatacacagttttattggtgaggcttggcatctccagggttagttatcatgttttcagcggcatcctcagtctggaagcggctgtgggggacaatcccgtttacaggcttcactcctcctggggctgaggcccaagtcagatctctgtttcagccttttctttctttcttttctgtccataagcccagctcgtgcataagaactcgggctctggaatgagactgccgcaggctgcaacctgggctctgggacttggttcaatgtttctgctctgcctggcatctcccttgtgggcatcagggagacagttaatgccctgctcttgggctgtgcccagcagaacaagcactcgctcaacctggcagatgctaccacgagctgtctcggtgataagtttgacattcacaccccagaaagtgcgggacggaagacagaacacaggtctcggggtccttggaccaaggtgggagcgctggttctcggagtcactggcagtaggactctgggtctcctgtgaagtaggagctgcagggtcactgtaaggacccaatgaggtgatccatgggaaaaatcttccaacttgtaaaacacttcacaaatgttattatttgtgacgcagctgtcactaataacaccgcctgcagctcactgagcaccccctcccacctcctccaaatctgtccccaggagagacgtggactggctggggctggaccaaggactccaggcttcagatgtggaaactgaggctcagcaggaccccttgggtcctcagcctccacgctcctggacctgcccaggccccggcagagagaccgctgctgtgtctgctgcagggccactgcccgtgagtgacccctctctcctttctgtctcagggcacagcgtggatcctggcctggccggcctgctgggtcaacgggccccacgctcccaacagcctttcgtggtcactttcttcagggccagtccgagtcccatccgcacccctcgggcagtgaggccactgaggaggaggcagccgaagaaaagcaacgagctgccgcaggccaaccgactcccagggatctttggtgagggtcgggcaggctggggccgaggccctgtgggcttctggctgagagaggcagggcgagaaccaagtggtggcccagagccctcaggctcaggtcggttcaagctgacggccactctccagccacctttcctgacaccatcttggccctgatgcaccctggtgaccggcactccggaggcctgtcctggctgtccctgctgcccagaagtctccctctctccccctggctcctccgggtctttctcaggagcctccttcagaatcagctgccccttccctgggagccgcagcccctcatgacctgcggttgtgcctgggcaccctgtgggatcctcggttgcttatgcgagttttctccccaactgggccaagcccttcaggatcagggacaggcctgacccaaccccgtgccctccttcccagggagtcggcccttgactggcctggtcgtgagccacttgaacctcgggaatgggtgtggcaggagagggtgggctggagtcacaggggtctccagagaggaggaggcacaggatggccgagggtcctgctgggctgtttactggagcataaagacgctcataggctgaaggacaggggaggactgggcacagtgtcactctagccattgggagccatggcaggcttctgagctgggtcatggtacaagcagagttccagggatgggctttatgagaccaaatggtttcctgtcattcatttatttgacaaatgtgctcatcagggcatcccccaccctggtaccccatagtagctgcacacagtaggaaccccagaaaagaccttgccccttctgtccctgcagatgacgtccacggctcccacggccggcaggtctgccgtcggcacgagctctacgtcagcttccaggacctcggctggctggtaattgctgactctccttgtttctgaaatgacaatcaccacctgtagatcagaagtgaatctgcagggaggacatagaatcatggtgacttcaattttcttatgtatttttttcttctgtgttttccaagttttctaaagtgagaatatggtgagaaagggttttttttttgttcagtttt

SEQ ID NO: 93906 - DNA, 26815 bp, Homo sapiens
  misc_feature (1)...(26815): n = A,T,C or G
tagaggtcttttgcctccttggttaggtatattcctaaatattttattttattttttgcagctattgtaaaaggtgttgagttttttttgtttgtttttgtggttttttgtctttgttttgtttttgtttgttttgagacagagtcccactccattgcccaggctggagtgcaatggcgtgatcttgacttgctgcaatttccgcctcccaggttcaagtgattctcctgcctcagcctcccaagtatttgggattacaggcacctgccaccatgcccagcaaatttttatatttttagtagagacggggcttcaccaagttggccaggctggtttcaaactcctgacctcaggtgatccacccaccttgccttcccaaagtgttgggattacaggtgtgagccaccacacccagcctcccttcctgcttaaaattgcaaatgcattttttacttagcagtcctgttttaagaatttatcctacagacatacctgcatatatacaaagtgattgtgtgcaatgttattaattgtagcatgtttggaaaaagcgaaagataagaaacaattctagtatccatctgtaagagactgaatagataaaactatgggacatccttacattgaactactataatgtggctataaaagtgattaaggaagctctgtatggcctgaaaagatctcaaggatgtgatgttgaatgaaaaagcaagaaacaaaataggcatatgcaggtttcttatttgtgatttctttgggtttgggaatatttgcattatgtgtaccagtttagcatgcctaatccaaaaatcaaaaatccagaatgctctaatgagcattcgtttgagcatcnnnnnnnnnnnnnnnnnnnnatccctccctccctccctcccttccttccttccttccttccttccctccctccctccctccttccttccattctctctgtctctctgtctctctctctttttgacagggtcttgctctgtcacccagactggagttcagtagctcaatcatggcttactgcagcctggagttcagtagctcaatcatggctcactgcagcctcaaccttttgggctcaagtgatcctcctgcctcagcctcctgagtagctgggactacaagcaacacaccaccatgcccagctaatttttttttaatttttttttttgttgttgtattgacaaggtctcactatgttgctcaggctggtctcgaactcctgggctcaagcaatccacttcagcctcctaaagtgctgggattacaggcatgagccatcatgcttaaccctgcatggtatttctgaggaatgatatgatgaaatctgtattttaggatgaccagtcatgcagaacagattggagtgaggagttgggagacaagaaggaagagataaattggaaatttgttgaaggaatatttgacagaacttgtgctgtaattaaatactaaatgaaagaaaaggaaaaggcagaatacaactccagagtttgctgcctaagtggctgggaagatgacaccatcaacaaacaagaaaaggggcaggggactggaaaaggtagtgataactcgccactagcactttgtgggcaagggccatgagttaccagttatataatcctgcagtattcagctggacatacaagaggtcttcacaaagtttatgaaaaatgtgtattatgaaaaaactatgcatagatttcaaaaaatttttgcaccaaaataaatttgtactaacttgttataacatgtctgagcaggatctactttgaggcactatgaaggataagacattagtttgaaaagagcccctataagagtaacatgaattctgctaaaattgaagcaagaacaaatatcaagtttatggttaagcttgggtggaagaatggtgagatcattgatgctttacgaaaagcttatggggacaatgcctcaaagaaatcagcagtttacaaatagataaattgttttttgttgttgttttttgagagggagtctcactctgtcacccaggctggagtgcagtggcatgatctaggctcgctgcagcctctgcctcccacgttccagtgattctcctgcctcagcctccctgggtagctgggattacaggcgcctgccaccacgcccggctaatttttgtatttttagtagagatggggttttgccatgttggccaggctggtcttgaactcctgacctcaggtgatacacctgcctcggcctcccaaagtgctgggattacaagcatgagccaccgcacgtggccagataatttgttttaagaagggatgagattaggccgggctgtgcctctactacagactcctagtatttattttctttaagaatacttggccaggcgtggtggctcatgcctgtaatctcagcactttgagatgctgaggcaggcgaatcacctgaggtcaggagttcaagaccagcctggccaacatggtgaaaccccgtctccaccaaaaatacaaaaattagctgggcattgtggtgggctcttataatcccagctacctgggaaggctgaggcaggagaactgcttgaacccaagaggcggaggttgcagtgagccgagaccacgccattgcactccagcctgggcgacagagcaagactccatctccaaaaagaaacaaaataaagaagggatgaaatgatgttgaagatgaaacccacagtggcagaccatccacatcaatttatgagaaaaacattttgtgtcctaactgaagtggattgacaacagcagarataataatcaataccataggcatctcacttggttcggcttacataattctgactgaaaaactaaagttgagcaaacattccacttggcaggtgccaaaccatgatgcccagatcagctgcagagctttcaatgggaattttaaacaagcaggatgaagatcctgaagcatttctttgaagaattgtaataggagatgaaacatggctttaccagtacaatcctaaagacaatgcacaatcaaagcaatggctaccaagaggtggaagtgtctggtcaaagcaaaagtggaccagtcaagagcaaaggtcatgtcattcgtttttttttttttaatgttcaaggcattttgtttattgactttctggagggccaaagaacaataacatctgcttattatgagagtgttttgagaaaactagcaaaagttttagcagaaaaatgcctgggaaagcttcaccagagtcattctccgctataacaatgttcctgctcatttctctcagcaaacaagggcaattttgcaagagttttgatgggaaatcattaggcatccaccttacagtactgatctggctccttctgacttccttttgccttttttttttttttttttggagacagagttttgcttttgttgcccaggctggagtgcaatggtgcgatctcggctccctgcaacctctgcctctccagttcaagcgatgctcctgcctcagcctcctaagtagctgggattacaggtgcctgccaccacacctggctaattttttgtatttttagtagagacagggtatcaccatgttggtcaggctggtcttgaactcctgaactcaggtgatctgcctgcctcagcctcccaaaatgctgggattacaggcattagccactgcacctggcccttgttttctaatcttaaaaaactctttcaagggcaccccattttttcttaggttaataatgtataaaagaggctgccttatccttacaagcagcctgccctcaactctctctcagagtgttaaaaaaaaatgtataaaagggccaggcatggtggctcatgcctgtaatctcagcacattgggaggcccaggcaggaggatcacttgagcccaggagctggagaccagcctgggaaacataaagagatactgatctccacaaaaaatttttttaaagaattagcttggccgggcgcagtggttcacgcctgtaatcccagcactttgggaggctgaggcgggcagatcacgaagtcaacagatctagaccatcctggccaatatggtgaaacctcgtctctactaaaaaaaaatacaaaaatcagctgggagtggtggcgcacacctgtagtcccagctattcaggaggctgaggcaggagaatcgcttgaacctgggaggtggaggttgcagtgagccaagattgcaccactgcatttcagcctggtgacagagtgaagctctgtctcaaaaaaaaaaaaaaaaaaagaattagctgggcacagtggcatgtctgtagtcccagctacttgggaggctaagcaggaggattgcttgagccctggagtttgaggctgcagtgatctatgatagcactactgcactccagcctgggtgatggagtgagaccctatctcaaataaaataataattataataaagactgccaggcacatggtggcatgcacatgtggtcccagctatttgggaggctgaggtgggaggatcaccagagcccagggaggttgaggctgcagtgaactgtgattgcaccactgcactccagcggggcaatgggagtgagaatctgtctcaaaagtaataattatatatatatatatatatatatatatatgttctagtattttcctcccatacctccaatgtataatatctcatgcaccctgtggtccaccccccaaagacatacacacaacactttagagtctctgatgtagtcaaagggagtcattggaggttctggaacagatgacaggcatggtagcagttgattcacaaactgaaagctgagacatcaaagaactgcgactgccttggaatgtttcccatgtgctagccaccgcctcagtgctttatacataaatcagttaatccctatagcaagcctccattgtgaataccataattatcttaacagacgaggagactgaggcacaatgaagttaagaaactttcctagagtcacacgaaattggtgggggcctactttttttttttttttttttttttttttttttttttgagactgaatctagctctgtcgccaggctggagtccagtggcgcgatctcacctcactgcaacctccgcctcccggattcaagcgattctcctgcctcggcctccccccactagctgggattacaggcactcgctgccacacccagctaatttttgtatttttagtagagacagggtttcaccatattggccaggatggtctcgatctcctgagcttgtgatccgcccacctcggcctcccatagtgctgggattacaggcctgagccactgcgcccggctgggggcctacatttgaccccacgtggtggtttgggctcatagtccatgtgcttaaccactagtgggtaggcagggagccagtgttctttctctcctgtgactttggtgaagtctctcaccactcagtgttgtcgtgagcatgctaggcagagtgcaagaaaggagcaagaactcactaatggctaggccttccctgtgtctctgtaattgatgggtttgggttttttttcctttctctctctctacctcctctctctcttcttcatcctctctctctcactctccccctgagataaggtcttgctctgttgccagggctggaatgcaatggaatggtgtgatcatggctcactacagcctcaatctcctgggctcaagggatcctcccacctcaacctcctgagtagctggaaccacaggcatgcaccacctcgcccggctaattttttattttttgtagagaggggagtttcgccatgttgcccaggctgttttcgaactcctgggctgaagtgatcttcctccctcagccttccaaggtgctgggattgcagacgtcagccaccgtaccaggccaacgggctcggtttctatggttttgtggggagacggctgagggaaggtcggcttccggcgtcgcgctgcaaacgtctcgctgaggtcatcctttacggcaggcgtccgcgtcgctagctagtcgttctgaagcggcggccagagaagagtcaagggcacgagcatcgggtaggtaggkgctgcttatgtccgcgcggcagcttagcttaaggaccttccttccgaggtctctttaacagatttcctcttggcttgctgtgtgtccccttctcccagacctgaactcagggcgtgttccctgccctcccaggccgcttcacctccacagctaatggcaccgaagcctggagattgccgctctctccactttccacatttgtttaggtttttgccggactaatgttttggctttctgtttcttaacctaaagtctacgatccttatcccagctttccaggctctgcgtgatttcggccccgccggcctcctgagctcatttcattcttttcaccgtcatgcacgctgcgctccattgtcccccaaacatagccagcacttcyggctgtaactccgggctgttgcccaactggaacactctgcccactgatcttcacttggcgaactcgcaagccatgttaaaggcattttcaagtctccgggcagagttcgtgcttcctccttcgagctcttacccactcgtgttccttgcagtgtattcgcaattccgagtgtgtgtctctggtgcttacgttggagctgctttcccccgcatctgagtgcctggaacgtaactactcagtaaatgatgactgagggatgggaaggaacttaagaagttaaattcacctttttgttgagatggagtttcgctcttgttgcccaggctggagtgcagagtggcgcgatctcggctcactgcagcctctgcctcccggattcaagcgattctcctccctgagactcccgagtagctgggattacaggcatgcgcccccacgcccggctaattttgtattttttyagtagagagagggtttcgccatgttggtcaggctggtcttgaactcgcggcctcaggtgatccgcccgcctcggcctcccaaggtgctggaattacaggcgtgagccactgcgcccaactaaattcacctttaaatctaccatgagtacacatttatattgatatttgtgggtgtgcgcgcgcttcctttcagtcattttaggcagtcagggtttgtttnnnnnnnnnnnnnnnnnnnnnnnnnnnnnnnnnnnnnnnnnnnnnnnnnnnnnnnnnnnnnnnnnnnnnnnnnnnnnnnnnnnnnnnnnnnnnnnnnnnnnnnnnnnnnnnnnnnnnnnnnnnnnnnnnnnnnnnnnnnnnnnnnnnnnnnnnnnnnnnnnnnnnnnnnnnnnnnnnnnnnnnnnnnnnnnnnnnnnnnnnnnnnnnnnnnnnnnnnnnnnnnnnnnnnnnnnnnnnnnnnnnnnnnnnnnnnnnnnnnnnnnnnnnnnnnnaaatagaagttaattaaaaattaactaaagttaaaaactcagtggagactcaaatagtatacagattcaatgcagctgaaggagaaattggtgaattgaaagattcataacatagccctgggaaacaaaagatttgagacagtatgaaataaaggatgagatctgaagaataaggtaagaaattctaatttttattggcttgactggaataaagaaatggggagggctgggtgcagtggctcatgcctgtaatcccagcactttgggaggctgaggcaggtggatcacgaggtcaagagattgagaccatcctagccaacatgttgaaaccccatctctactaaaaatacaaaaattagctgggcgtggtggtgcgcacctgtagtcccagctacttgggaggctgaggcaggagaatcgcttgaacccyggaggaggaggttgcagtgagccaagattgcaccatgcgctgcagcctgggtaacagacggagactccatctcacgtggtaggtgagccaccgctcctgaccgagaaaggatttctatgcattgttctttagttatagttctcttttccttgagttttgaaaaagcgcaaaaactgcttatctgccataaactggaagaacctatttaatgaaaaagtttggtgagaagaaatcaggagaataatatcaaacagtgttctagagrgctacttagcatgattatctaattttttcttagaaatttctcagttgattgccctcttgtggtattttatttacttatttttttaaatcttccattacagccatgcctttcttggacatccagaaaaggttyggccttaacatagatcgatggttgacaatccagagtggtgaacagccctacaagatggctggtcgatgccatgcttttgaaaaagaatggatagaatgtgcacatggaatcggttatactcgggcagagaaagagtgcaagatagaatatgatgatttcgtagagtgtttgcttcggcagaaaacggtaaggaaatgatggaggtggaagctgaattactttcttgttcctttgggactctttttttttttttttgagacraagtctcactcttgtcccctaggctggtgtgtgatggcgccacctcgtctcactgtagcctctgcctcccagrttcaggcgattcgcgtacctcagcctcccgagtagctgggattataggcacctgccaccacgcctggctaatttttgtattttkagtagaaacgggatttcaccatgctggccaggctggtcttgaactccagacctcaggtgatccgcccccctcagcctcccaaagtagtgggatcacaggcatgagccaccgtgcctggcctcctctgggattactcttaagtgtttttagtgggtcattgagcagtggcttgccaaatgtgaattggcaaagcttttctggtgaaatacctttcctactttggtaccatgatgaggaaattaaatgccttcagatatgaggatggtccattgttcctcagcattctttctcttctcccaaattttccttagtattttaccctgctttagccaccaggttagaaattgcatgtgtgtgtatacccattttttcagttggctgtgaagcagagaatatcaactagttttggatgttgacccttgaaaatctttgggtgaaaatatgttcaaatccattgaatcctcattggaaaagaggtttaaccttgcaaatccattacattcaacatctttggattcattccactctgaagaagatggaggtgttaatgagattgctgtacatgagcgtgaacaacgatgcagtggaaaagggatgttaacagcttagtgttcacctcctcaaaagttgaatgagttggccaggcacggtggctcacgcctgtaatcccaggactttgggaggctgaggcgggtgtatcacgaggtcaggagtttgagaccagcctggccaagatggtgaaaccctgtctctactaaaaatacaaaaattagcagggcatggtggtgggtgcctatagtcccagctgctcgggaggctgaggcagaagaattgcttgaacccgggaggcggaggttgcatggagccgagatcgtgccaccgcactccagcctgggcgacagagcgagactctgcctctaaaaaaaaaaccaaaaaaacaaatttaaaaaaatcccatgcagtggctcatgcctgtgatcccagcactttgggaggccaaggtgggcggatcacctgaggtcaggagttcaagaccagcctggccaacatggtgaaaccccgtctctactaaaaatacaaaaattacctaggcatggtgacaggggcatgtaatctcagctactcaggagggtgaggcaagagaatcgcctgaaactgagaggcagaggttccagtgagctgagaacacaccactgcactccagcctgggcgacagagcgagactccrtctcaagaaaaaaaaaaaaaagatggcccggcacagtagctcactcctgtaatcccagcactttgggaggccgaggcaggcggatcacaaggtcaggagttcgagaccagcctgaccaacatggtgaaaccccgtctgtactaaaaatacaaaaaaattagctgggtgtagtggctggcgcctatagtcccagctactcgggaggctgaggcaggaggctgaggcaggagaatggcatgaacccgggaggcagagcttgcagtgagtcgagattgtgccactgcactccagcctgggcgacagagcgagactctgtctcaagaaaaaaaaaaaagaaaataaaaaaaagattttgataaattgataccaacaggaggcattgtagtaaggtggaaagaacattggattgggagttaggagagtcaggttctgatgctggttctgccaccactcatttgttgttggttgrttaattttaatttatgttttgagacagcgtctcactcccgtcgcccaggctggagtgcggtagcgtgttcacagctcactgcagattcaacttgggttcaggtgattcttccacttcagcctcccaagtagctgggactacaggagtgcaccaccacgcccagctaattttttgtattttagyagagacaaggtttcaccatgttgcccaggctgatctcgaactcctgagctcaggtgatctscctgccttggcctcccaaaatgctgggattacargtgtgagayactgcacctggccctaattttgattttatttatataaaatagaaatggggtcttcttgtgttgcccaggctggtctcaaactcctgggctcaagcgatcccacattggcctcccaaagtgctggaattacaggtgtgagccaccacacccatcctgttagtcgtgtttttgagacagggtcttgttctgtcacccgggctggagtgcagtggcgtgatcatagcttactgcaccctcaaactcctaggcacaagtcatcctcctgcctcagcctcccaagtagctaggactacaagtgcatgccaccatgtgcggctttttaaattgtttatagagacaaggttttgctatgtttcctttgctgatcttgaactcctagcctcaaacgatcctcttgcctgggccccccaaactgctgggattacagaaatgagccgccacgtccagcaaaccaccactagttttgtgactttgagcaagtcactttctcttagtcttcatttccttatctgaaacaattaaagaattgctctaaggtcacttcctaatcctgtgaatttatgaatagataagttaccattttcagggtcaccttaagtgaacagatacctccctgtaagtgaagaagctagtgagtcagaattagaatcaagtcctattgtaagttcttagcatattataatgcatgtatttctcacaacaatcctatgagatgagttactattagtttccccattacacagttaaaaatttaactttgggaggctgaggcggtggattacctgaggtgaggagttcaagaccagcctgaccaacatggtgaaaccccctctctactaaaaatacaaaaaattagctgggtgtggtaagggggtgcctgtaatcccagctactcaggaggctgaggcaggagaatcgcttgaacccgagaggcggaggttgtagtgagttgagattgcgccactgcactccatccagcctgagcaacaagagtgaaactctgtgtcaaaaaaacaaacaaatgaacaaacaaaatttaaggcaaagaaaagttaaggacattgcctgaacttacatagctagtaaatggtggagctgggattttatcctggcaaggctggcttcaatacctatgcttttatccagagttactgcttttagctcagagaaagatttgacatatggtattgtcatagttcaaaaccatgactagtcttgtgttgggagactctaagataaatggtaagaatgtagtcttttaaaatggttaatgtttatttcagggttttttctactgaagttatatcaacactacttctttaaggttaatgagacgtttaactgaatatactaatttttcgtatctttgtgaaaagttagtcattggttaaaaaaattatgtcagaaactagtctaggcactaggaatacagtaagcaaaacagcaaaaaaaaaaaatctcagagtcagtgagcttatgctatagtgggaggaagagcagaaaaataacaagtaaaaatacaggtgataataagtgctgtgaggagaataaacagaaggatagaaagtgctaggggcaggagctaggtggatgctactttaaatagtcagagaagatctcagcaaaagaagacagaccagagacttaaagaaagtgagctatrtggttatgagggaagaatgttccatgcagaggaaacagcaagtgcaaaggtccctgagctgactggagggagctaggggaatattaagagatgaagtcactggagtaggccttgtaaaccatgataaggattcatctttttgtctcagtaagatagccattgcagggttttgagcagaggaataatgtgatcagatttagtaaattttctgtgtcacagaatccagggaccagttcattgttgtggctttgacacacttgtgtaacatagttttgatttgttgagaagcaaccaatgccctgagtagaagagacagaattcaagactcagcggtgactagtggctgagtaagaatcaggcctttacttccatatggggaaaagagaactcatattggctatttctgcttcattcatacccattgcatagtcaccagcagcagtgccacttccacatagaatatgtaagtgcttgccgggtgcggtggctcacgcctgtaatcccagcactttgggaggccgaggctggcggatcacgaggtcaggagatcgagaccatcctggctaacatggtgaaaccccatctctactaaaaatacaaaaaattagccgggtgtggtggcgggcgcctgtagtcccagcgactcgggaggctgaggnnnnnnnnnnnnnnnnnnnntgtgatctcccagattttatttttttaaatttagggtgaccgtcacccatggcatggccctcatgaggtcatgtgccctcaggtggatccagattttctttttcttttttttttttttgatccagaaggagggtctaaggggacagggaagatgagactataaagattcttcaagagccacattcctctctttttttttgagatagagttttgctcttgttgtccaggctggagtgcaatggtgtgatttgaggtcactgcaacctccaccccccgggttcaagcgattcttctgcctcagcctcccgagtagctgggaccacaggcgcgcgccaccacgcctggctaatttttgtatttttagtagagacagagtttcaccatattggccaggctggtcttgaactcctgaccttgtgattcgcccgcctcggcctcccaaagtgctgggattacaggcgtgagccaccacggcccaacttttatttatttatttattgagacaaagtctcactctgtcacccaggttggagtgcagcagttcaatcttggctcactgcaacctccgcctcccaagttcaagcaattctcctgcctcagcctcccgagtagctgggattacagatgtgcaccaccatccctggctaatttttgtatttttagtagaaacaaggttttaccttgttggccagtctggtcttaaactcttgacctcagtgatccacccgcctcagcctcccaaagtgctgggattaaacttttgatattttaaaagattttagtatccacaaatatgcctcttaaaggtttttgcaaatatccatattgctatatatattaagaacattttagttgttagttttcagagaggttatgtatactaaaaatttgtttgaaagcttgggaagtgatttcatgttaattctttaaaggcggacttcatttcagaggccccgtaagatgaaaggccttttgtagtttaaaaatgaaaccaaaattgatctgtttttccagttctcactttttggcacatatctcctccctcagtttaattaccattttcctttgacagatgagacgtgcaggtaccatcaggaagcagcgggataagctgataaaggaaggaaagtacacccctccmcctcaccacattggcaagggggagcctcggccctgaacagagcagctgctgatrtctggaggctgattttcctgttctctgttctccactggaaaggttgtttacgacaaacctccttgtcaaagtgtgtaaaaataaaggattgctccatcctatttgttctattttctcttggatcatgactttcttttcttttctttttttgtttttgagacagagtcttgctctgttggccaggctagagtgcattggcacgatcttggctcactgcaaccaccatctcccagattcaagtggttctcctgcctcagcctcccaagtagctgggactacaggcatgcaccaccacacccagctaatttttgtatttttggtagaggtggggtttcaccatgttggctaggctggtcttgaactcctgacctcatgtggtctacccacatcggcttcccaaagtgctgggattacaggcacgagccactgtgcccagccatatcatgcctttctatactgagattataacctattttttaaatttgattttaaaaacagttgaaacttttagacagttcctaaaaaattagcagctatggaataataactaacatttaattaacaatgtgtacaagatactttaaatatgttaactcatttaagaaatgatagtgttttcattctggtttttcttatatatttttctctctcttttttttttttttttcaagatagagtctcattcagtcgcccaggctggagtgcagtggcgtgatcttggctcactgtaaagtccgcctcctgggttcaagcgattcttctgcctcagcctaccaagtagctgggactataggtatgcaccaccacgcccagctaatttttgtatttttagtagagacggggtttcactatattggccaggctggtctcgaactgaccttgtgatctgcccgcctctgcctctcaaagtgctgggattacaggcttaagccaccacgcccagcctttttttttttttttttttgagactgtgtcttactctttcacccagcctgagtgcagtgatgccatcactgctcactggagcctcagcctcctgggctcaggctgtccttcctcctsagcctcgcgagtagctgggactacaggtgtgcaccaccacttctgcctgtaacttatttttcataaaacatagacttgagctgggagagggaggcagtggagataggaattgtgtgttgactgtaaggtctgtgaagtctaaggctaagaaaatgccaagttcagataatttaattttgaagaagtaataacattgttttaatttgccactttttgagatggagccttgctctgtcacccaggctggagtgcagtgtcacgatctcggctcactgcaacctccacctcccaggttcaagcgattcttctgcctcagcctcctgagtagctgggattacaggcgcgtgctgccacacctggctaatttttgtatttttagtagaaacagggtttcaccatgttggtcaggctggtctcgaactcctgatgtcatgataacacctcggcctcccaacatgctgggattacaggcgttataacagtggcatattagcactagttaacttttttttttctttttaaaatttattttattttgaaatggaatttcgctctgttgtgcaggctggagtgcaatggcatgatctcagctcactgcaacctccatctcccaggttcaagtgattctctcacctctgcctcccgagtagctgggactacagtcaggtgccaccacgcccagctaattttcatatttttagtacagacagggtttcaccatgttgaccaggctggtctcgaactcctgacctcaagtgatccgtgccccccccccgccccggcctcccaaagtgctgggattacaggtgtgagccaccatgcccagcctattttattctttaatattaattttttgagacagggtgtcactgagacctaagtgcagtggcatgatgatggctcactgcagcctcgacttcccgggctgcaatgatcctgccagctcagcctcccaagtttctgggaccacaggtatataccgccatgcgtggctaatttttgtattttttgtagagacggggtattgccatgttgtccaggctggtctcaaactgctgtgctcaagcaatccacccacctcggcctcccaaagtgctgggattacaggtctgagccatagttaacatgtttagaagcttctggtttttgtttttgagatggagtctcacccaggctggagtgcagttaacaccatcttggctcactgcaacctccacctccaaggtaaaagagattctcttgcctcacttcctgagtagctgggattacaggcatgcaccaccgtgctcaactaggttttgtatttttagtagagacagggtttcaccatactggatgttggccaggctggtctcgaacttgtgacctgaaatgatcttcccacctcagcctcccgaagtgctgggatatcaggcatgagccaccgtgcctggctagaaacatgtttttaaaagaaacaggccaggtgtagtggctaacgcttacaatcccagcactttgggaggccgaggagggtggatcacttgaggttaggagttgtaggccagcctgggcaacatgatgaaaccatgtctctactaaaaatgcaaaaattagccatgtgtggtggcgggtgcctgtaatcccagctactcaggaggctgagacagtagaatcacttgaacctgggaggcagaggttgcagcaacccgagatggtgccgctgcgctccagcctggacaacaagagtgaaactccatctcaagaagaaaaaaaaaagacccagatatagaaagtatgaaactgcctgggcatggtggttcatgcctgtaatctcagcactttgggaggctgaagcaggtggatcacttaagctcaggagtttaagacccgcctggggaatgtggcgaaaccccgtctctacaaaaattacctagtgtggtggtgtgcacctgtagtcccagctactcgggaggctgaggtgggaggattgcttgagcccaggaggcagaggttgcagtgagctgagattgtgccactgcactccagcctgggcaacagagccagaccttgtctaagaaaaaaaaattatatggggttataaggaacccagaatatgaaaaaataatcttgaaaatgacgagcatatttagaggactcaacactttccaattatttcagaacttactacaaagcagtaatagtcaagactgtggtgttagcataaggatagacatatagatagaattgcaagttcagaaataaacacatctatggtcaattgattttttttattaaaaaatcacaataggcaagcatatggtcaattgtttttttgttttaatttttttttttttcagatggagtctcactctgttgcccaggctggagtggtacaatcttggttcactacaacctccaccttgtgggttcaagtgattctcctgcctcagcctccctgtagctgggattacaggtgcatgccaccacgcctggctaatttttgtatttttagtagagatggggtttcaccatgttagccagattggtctcaatctcctgacctcagcctcccaaagtgctgggattacaggcgtgagccactgcaccttacyggtcagttgttttttgacaagagtgccaagactattgaatggtcaacaagtggtgctgggataaccaaatagctacatgcaaaagaatgaacttggacctcctagttatactgtatataagttgaaaggccttttcctagacccagcctaacattggataaaatcaattctccataaactcaaagagaattgcctgccagaacaaaaaccaacactttccagtaaataacaacagaagccagagtctacaacttttgtcattcacaatatttagtatacaacagacgtgtatactgttaatgggaaatgggacacacagtaaaggagaaaagcagtcaacagaaacagagaaacagacccaaagatgactcagaagttgaatcagcagagaaggacttaaaaatatctatcaaaaatatatttgggccgtgtgtggtggctcacgcctgtaatcccagcacttgcagagactgaggtgggtggatcacctgaggtcaggagttcaagaccagcctggccaacatggtgaaaccccgtctctactaataacacaaaaagtagccaggtgtggtggcatgtgcctgtaatcccagctacttcagaggctaaggcaggagaatcacttgaacccaggaggtggaggttgcagtgagctgagatcatgccattgcactccggcctgggtaacagcgtgagactatctcaaaaaaaaaaaaaagttcaaagacttaatagtcataatgagtgaacagaccggcaatcttagaagagaaacagaaacagaaaaagaccttaatgaaagtcttacaaagaacacctgcaatatctaaaatgaataatttactacctaggcttaacaacaaattagaggccgggcacggtggctcatgcctgtaatcccagcactttgggaggccgagacgggtggatcacgaggttaggagatcgagaccatcctggctaacacggtgaaaccccgcctctactaaaaatacaaaaaattagccgggcatggtggtgggcgcctgtagtcccagctactcgggaggctgaggcaggagaatggcgtgaacctgggaggcagagcttgcagtgagccgagaccgtgccactgcactccagcctgggggacagagcaagactccatctcaaaaaaaaaaaaaaaaaaaaaaaaaagaggggaggccaggtgcagtggctcacgcctgtaatcccagcactttgggaggccgaggtgggtggattgcctgaggtcaggagttcgagaccagcctggctaacatggtgaaaccttgtctctactaaaaatacaaaaatcaggtgggcgtggtggcgcacacctgtagtcccagctacttgggaggctgaggcaggagaatcgcttgaacctgggagtcagaggtttcagtgagccaagatcacgccactgcactccagcctgggacagagcaagactccatcacaaaaaaaaaaaaaaagaaaaaaaaaaggaaacgttcagtgaagttgaaggtagatcaaagcatacaaagagagatggcaaaaaaaaaaaaaaaaaaaaaaaaaaaaaaaaaaaaaaaagccaatacaggaaatctcaaaatcaggctgctttaaagaagccaaaagaaatatatatatacaacccgtatagtgtgtatgcacaataagatacacacatacacaccataagattctactcccaagaaattgaaattcaagaacaggcaaactaatctctgaggatagaaagtaaaacaacagttgcctaaagaggggatagggattgaatgggagaggacataaggaactttctagggtgatggaagtgttctatatcctgaatatagtggtgattaaatggatatatgcaatcatggagtctcatgaaagataccttttttttttttttttttttgagacagagtttcattctttttgcccaggctggagggcaatagtgccatctgggctcactgcaacctccacctcctgggttcaagtgattcttctgcttcaccctcccgtgtagctggtattacaggcatgtgccaccatgcccggcgaattttgtatttttagtagagacggggtttctccatgttggtcagggtggtcttgcactcccagcctcaggtgatctgcctgcctcrgcctcccaaagtgttggggatataggcatgagccactgcacctggccctccaaagaggattttagaagagaggaaaccggtcaaagggattctttaagcctgtatatgaagtcctaggtagagccctgattgacccatacgtcaaactgaatagaattaacaacaacaacaaactcagcaattagaatatataaaaatagaagtagaaaatgttaaagtgggccggatgcagtggctcacgcctgtaatcccaatactttgggaggccaaggcaggcagatcacttgaggccaggagttggaaacagcctggccaacatggcaaaaccccacctctactaaaaatacaaaaaattagccaggcagggtggtgcatgcctgtaatcccagctactcagggtcaggcgcaagaatcacttgaactcaggaggcagaggttacattgtgctgagatcgtgccactgcactccagcctgggggacagagtaaaactcggtttcaaaaaaacaaaacaaaccttttgttcatcaaaggacactatgaagaaaatgaataggcaagccaaaattgagagaaatgttcaaaatacatatatctgacgaaagtcttgtgtctaaaatatgtctgtgtgtttacaccggtgtatattactcgtatctgcaaatctgtaattaaaaggctcacaatacaattttctttaatatgatggagttttgctcttgttgcccaggctggagtgcgayggcatgatctcagcttaccgcaacctccgcctcccgggttgaagcgattctcctgcctcagctgctgagtagctgggattacaggtatgtgccaccacgcccagctagttttgtatttttttaaatagagatggagtttctccatgttggtcaggctggtctcgaactcccgacctcaggtgatctgcccgcctcggcctcccaaagtgctgagattacaggtatgaaccactgcggtcagccaatacaactttttaaaaatgacaaaatacttgaacagatattttcctaaaggaagatatacaaatagccaataagcacataaaaagataatatcattagtaatgtggaaaatgcaaattacaaccatgctgagataccaccttacatccactggaatgtccaaaatttttgaaaaactggcatcgccaaatgttgctgaagatgtagagtgtctggaactctcttacattgccagtaggaatataacatgatacagccaatttggaaaactgttggcctgttttttatgaagtttaacatacacttaccacatgactaagaaccttcattcctagatattttctcaagataaatgaaaatgtatgtttaaatagacacttgtacgtgaatgttcatagcagcttataatagcaataataattattattgtcgttattttttcagatggagtcttgctctgtcgcccaggctggagtacagtggcacaatcttggctcactgcaacctccacctcctggttcaagcgattctcctgcctcagccttccaagtacctgggattacaggcacacgccaccatgcccagctaatttttgtatttttagtagagtcgagatgtcaccctgttggccaggctggtcttgaactcctgacctcaaatgatctgcccgccttgggcttccaaagtgctggtattacaggcatgagtcactgcacccagcccaaaagtttcttatttaattgacaaaatcttatatatttatcatgtacaacacactgttttgaaatatgtatatattgtagaatggctaagtcaagctaattaatatatgcattatcccatatactttcatttttgtggtgagaacacaaaatcttagtaatttttaggaatacaatacactggccaggtgcggtggctcatgcctgtaatcccatcactttgggaggccggggaggggtggatcacttgaggtcaggagtttgagaccagcctggccaatatggtgaaaccccgtctctactaaaaatataaaaattagccgagcgtggtggcacacacctgtaatcccaactactcaggaggctgaggcaagagaattacttgaacctgggaggcggaggttgcagtgagctgaggttgcaccactgcactccagcctgggtgacagagcgagactccatctcaaaaaaaaaaaaagaatgtaatacattgttattaactagcatcaccatgttgtacaacagttctcttgaacatattcctccagtctaattgaaattttgtatctttagaccaacatctctccrtctaccctccccaggagatagaaattccttatccacaaggatggagacaatgttggtcaacccactttcatttacttaacattacttttattctaggtgtggcatctggcatgaaaccaaggacaagacactcagttgagctttgtgaaagagtgacagatgatggatagagtcatgggcctgcctcttatggagctaagaaatgaaatctggatacgggtaatcagtttgtggtagaaagtagtcactcatttccgtgagggaagcacaagtcctgtgtaggcccagagaagggaaaaagcctttttgggcataagagtgaatgttgagggttggagagaggaatggtctggaggctttgtagcattcatgttgtgccctaaaggacagataacatttggacatgagaagctgtagtgagccatgactgcaccactgcactccaggctgggcgacaggttgagaccctgtctcaaaaaaaaaaaaaaaaaaaaaaaagaagaagaagaaagaagatttggacatgaagagatgccaggcattacagacagagaatacagtatgagcaaaagcatggaggtttttttgttttttgttttttgtttttgagatggagatttttgctctttttgcccagactggagtgcaatggcatgatattggctcactgcaacctccacctcctgggttcaagcaattctcctgcctcagcttctagagtagctgggattacaggtgcacactaccacgcccagctaatttttgtatttttattagagatggggtttcatcatgttggtcaggctggtctcgaactcctgacctcaggtgattgtcctgcctcagcatcccaaagtgctgggattacaggcatgaggcaccgcgcccagccagcatggaggtatttgagagcaacagtgatcagaaccatttggttcaagcagcggttttaaaacggaagtggagaaggaattagcagatccctgacatcctcttcaatcagagttcctccattgtgaactggtttacatgtcagcattatggattttggtgcaacacctgcccccaacaggaagaaaagaagaaaaagaaagaagaggaaggaagaagagaaagacaaagaagaagaaggaggaggaggcggcaggaggagtaggagggaggaagaaggaggaggaagaaaaagaggaagaagaaaggaggaaggaagaagaaagaagaattgggaggctgagacaggcagatcacaaggtcaggagttcaagaccagcctggccaacatggtgaaaccccatcacttctaaaaatacaaaaattagctgggcgtgttggcacatgcctataatcccagctacttgggaggctgaggcaggagaattgcttgaacctgggaggcggaggttgcagtgagcagagagctcgccactgcactccagtctgggcaatgagcgagactgtcttgaaaaaaaaaaaaggaaggaaagaaggaggaggaggagaagaaagaagaagttttattattgttattttttgagatggagtcttgctctgtagcccaggctggaatacagtggcacactcttgactccctgccacctctgactgctgggttcaaaggagaaggcggaagaagaaggaagaagaagaaagaaggagaaaggctgggtgcagtggctcacacctgtaatctcagcactttgggaggccgaggcaggtgaatcacaaggtaaggagttcgagaccagcctggccaactggtgaaaccctgcctctactaaaagtacaaaaattagccgggcgtggtctgaggcaggagaatcgctttaacctgggaggaggaggttgcagtcagtcaagatggcgccactgcactccagcctgggtgacagagtgagactttgtctcaaaaaaaaaaaaggaaagaaggagaagaaagaaggaggaggaggagaagaagaagaggaaaaggagggggaggagaaggggagggggaggaaagaggaggagaagaaagaagaaggagaaggaagaaaggagggaggaggaggaggagaagggggagggggaggaaggaggaggagaagaannnnnnnnnnnnnnnnnnnnnnnnnnnnnnnnnnnnnnnnnnnnnnnnnnnnnnnnnnnnnnnnnnnnnnnnnnnnnnnnnnnnnnnnnnnnnnnnnnnnnnnnnnnnnnnnnnnnnnnnnnnnnnnnnnnnnnnnnnnnnnnnnnnnnnnnnnnnnnnnnnnnnnnnnnnnnnnnnnnnnnnnnnnnnnnnnnnnnnnnnnnnnnnnnnnnnnnnnnnnnnnnnnnnnnnnnnnnnnnnnnnnnnnnnnnnnnnnnnnnnnnnnnnnnnnnnnnnnnnnnnnnnnnnnnnnnnnnnnnnnnnnnnnnnnnnnnnnnnnnnnnnnnnnnnnnnnnnnnnnnnnnnnnnnnnnnnnnnnnnnnnnnnnnnnnnnnnnnnnnnnnnnnnnnnnnnnnnnnnnnnnnnnnnnnnnnnnnnnnnnnnnnnnnnnnnnnnnnnnnnnnnnnnnnnnnnnnnnnnnnnnnnnnnnnnnnnnnnnnnnnnnnnnnnnnnnnnnnnnnnnnnattgaaaagatgagatgagccatgaaagcaagtacaggagttactgatggtactggggagcccgtgtaggtttaggatctgagcttttggaagattgattgggtagcctttgagccacctgataagtggaaagaacaagagaggctggatctgtgttttcaggaagcatatgttggcccagcaattgctggcttgtagtgaggaggcacacaactggcctaggacagtggtcatgaaaatgcagaggaggtaaagtccctgcactcctagggagactagtcctgatgtcagtctggagtcagtcagaatggtgtcctctccctccctgcactacccagcccagtcagtgggaggacttcctcaattccagtagccattcaagtccctggaattggtggctgtcacttgcaaactatagccacttgagcagaaatgggccaggattacttatctttaatctgcatatcattgggaggcacttacctgctagctctggctaaaaactagagcaaccctggcctgccgtagctcctgctgcccagacaactcctccaatatgaaagggatgaggggaactcaaagttacaatgtcctacttggagcagtaagttcagtagacatatcacttgcctcattaacatcaagcatcccaaaacccagtctgggtcagttttgcccagagtggggtttgtagaacacgggttctcctgggatcctatacctagcccagaatcagttgcaaaagccaggccatagcgaattgtcctgccagccagatagcagagaatctgacggcagcaggcagaaggagccgctccattgcagtaagccaagatcgcgccacttgcctcattacatcaagcatcccaaaacccagtctgggtcagttttgcccagagtgaggtttgtagaacacgggttctcctgggatctatacctagcccagaatcagttccaaaagccacgctttgactttctctctctctctctctctatatatatatgtgtgtgtgtgtgtgtgtgtgtgtgtgtgtgtatacacacacatacatacaatgttgtatatattgtatatgtgtgtgtgtgtatatatatatatatatatattttttttttttttttttttttgagacagagtttcactcttgttgcacaagctggagtgcaatggcacgatttcggctcactgcaacctccgcctcctgggttcaagtgattctcctgcctcagcctcctgagtagctgggagtacaggcgtgcaccaccgcgcccggctaatttttgcatttttagtagagatggggtttcaccatgttagccaggatggtctcgatctcctgacctcatgatctgcccacctcggcctcccaaagtactgggattacaggcatgagccaccatacccggccttcatttttatatttttagtagagacaggatttcaccatgttggccaggctggtctcgaacttctgacctcaggtgatctgcccacttcagcagcctcccaagtgctggaattacaggcgtgagccaccgcctggccaattttttgtatttttagtagagacagggtttcaccatgttggccaggcgggtcttgaactcctgatctcagatgattaatccacctcagcctcccaaaatgctgaaattacagtgagccaccatgcccagcctctgagtcaaagtttctttaattgcaaagtagagatcattgttttttttttgctttttttgttttgagatggagtctcgctgtgtcacccaggctggagtgcagtggtgtgatctcagctcactgcaacctccacctcccaggttcaagtgattctcctgcctcagcctcccgagtagctgggactacagatgtgcgccaccatgcccggctaattttttgtatttttagtagagatggggtttcaccgtgttagccagga

SEQ ID NO: 93907 - DNA, 49252 bp, Homo sapiens
  misc_feature (1)...(49252): n = A,T,C or G
gttgcaccatgttggtcaggatggtcttgaattcctgacctcgtgatccacccacctcggcctcccaaagtgctgggattacaggcatgagccactgcgcctggccctttgtttttttgagatgaggtctcactacattgctcaagctggtctcaacctcctgagctcaagcagccctcccacctcagccttccaaagtgctgggattacaggcacaagccatcacacccagccagggacaccttatttcttaagtagctggtctcattttgtaggtaatgctggaggatggaagaagcaaagggtttggcttcgtctgcttctcatctcctgaagaagcaaccaaagcagtcactgagatgaatggacgcattgtgggctccaagccactatatgttgccctggcccagaggaaggaagagagaaaggctcacctgaccaaccagtwtatgcaacgagtggctggaatgagagcacttcctgccaatgccatcttaaatcarttccagcctgcagcgggtggctactttgtgccagcagtcccacaggtgggtgtgctgtttggtcacagctcttgggaacctgccggctggcagtattctgcagtggttggggagagggatttttcgttattagagttctagaatgtcacaataaggacccttcaagtaaaaatgaaggacttacccatggtcacaaacacacacccacagtggcagtggtagcataaaacagtccccattagctgacccctcagctcttgaatagaaagaacatttaaataattagcttaggtcctggttagtgagatgagatgagatacttctctaggatgggttcagtccttaagggggtgtttgggtattcttctgtcttacaggctcagggaaggcctccatattatacacctaaccagttagcacagatgaggcctaatccacgctggcagcaaggtgggagacctcaaggtaggtggtggggaacagtaattgacagcccaggatatacctgtcctggtctcccctgcctttccttcttccccactctgaggcacagcctaggttctggtccacatcacttctcaatgatgtgcaatttttctcttcaccaggcttccaaggaatgccaagtgctatacgccagtctgggcctcgtccaactcttcgccatctggctccaactggtaatgctccggcctctcgtggcctccctactaccactcagagagtcggtgagcaaactggcctttagaagtgtggcctggggaggagggagtcaggatgactaggctctgtcctgggttggtcagtttgttgggctcgaatttatcgagtcctggttctgtaatcttagctgtgtgcttaggtggccacttcaggagcagagaaacagtatgagttctaggtgtgtcagttgcttttaacattctttgctcatcggtgacctatgtgaaaaaggttagttgtagaagtttgctagctggatgaccacagaggcagcttgttcttttgggtggggtgaggaatacaaggaaacagtgtatacagaatatgtcttgtattccaagatgtggaaagagttgtatgttatcctttggctcatcctcgaaagtagtagtggccccctgtgcaatgtgttgcgtaaacgtgctttgaaatttctccttccgtgggacgtggccagttggacatctgccgccaacactgatgtgcatttgctggtctgttgtagggtctgagtgcccggaccgcttggctatggactttggtggggctggtgccgcccagcaagggctgactgacagctgccagtctggaggtggtattggatgcacacagaagggggaaagatgggatttgacgggtctttgcccagactgatgggctttaattgtatttgttctttccctaaggcgttcccacagctgtgcagaacttagcgccacgcgctgctgttgctgctgctgctccccgggctgttgccccctacaaatacgcctccagtgtccgcagccctcatcctgccatacagcctctgcaggtgaggttcaccagacagaatgcttaaaaggatttcccccatttccacttgatgtaaaagaagctgtgcttttgattccttcaacaggtattaaatgcctgctctgtgttatgacgctatgttctgattcactgtccctgcccttcaggggctcactagtgggaaagaaggggcttaaaagtgctctgcctgatgccagttcactcagaaatgcctcagagcgggcagccagtgcttcctcttctgtttgtacgaaataatgtgctcattcagctgtttgagcctccaggtcacttccgcatccaatgacctattggatccttggctgctctgcaagatgattggtacattaatgcaggaaataacttcaacttacagatcggatgttcagcttcaaagatgtaaagtgtgtgtaggaggtgaaggggttgaacctagagcttagattttctaagctgtaacttgctgtctctagacctgtgctctagatgcaactagtttgtttcagagcctaatagcaatttgctgtggaggtgtcaccctaagccttcaggcccataagctgcttaggagattactctttaactgtcctgtctcatactctctaagttggggatttcctagaacttgatgctatgtaaaataccttttctttgcaaggctttgactagcattgacgttgcatgttgaccgtttttaagcatttgatacaaaaacatttggtagaattaaggtgatgtggaatgtaattataaatgtgttgatatttactccctttgatccaatctgcactgagatttaccctaaaggaaaactaattttcaggaaaaggttatatacaagtgtttacccttatttatatcaaggcttttcattcttgagtaactttgggtgtattaaggaaatgtcagaaaatgcttgcctagcactataggtttgttttattatttacgtttcacttcgctttctgatagcatgccattttcattgtaattggttgtgtttatgtccataccactctgttcctcaacacacccctcaatccttcaaggactgaaattagttcctttagagcaaggacagccacctcctctcctctttcacatagtcagatgttcagatattgaacaggcactcaaccaccatcaggtgttgtcctttcctcagtgctaacccactgcctttcctggttcccaggcaccccagcctgcggtccatgtgcaggggcaggagccactgactgcctccatgctggctgcagcacccccccaggaacagaagcagatgctgggtgagtgacccacttgcttgcagaagaagagggtcccagagcctgatgccagctaggacaccagtgtccattgtttactgggatttgatttgtttttttattaactatcctccccataggagaacgcttgttcccactcatccaaacaatgcattcaaatctggctgggaagatcacgggaatgctgctggagatagacaactctgagctgctgcacatgttagagtcccccgagtctctccgctccaaggtgagctggggctcagaccctgcagcttcagttctcagcttgggaagactgggggcaaacttggatgcccaggtgcagcagaaagtgggatctgctgcccccaggacccctctcgtcatgccttgactgtgactggaggctgcagtgggtatttgggaaagtagttagcaccagaagcctagggatcatctgtacagttggctttggtccaccactaggtctgggcactggggaggggtggagtagctctcctagattcactgaccacctgaagatttctcgcaggtggatgaagctgtagcagttctacaggctcatcatgccaagaaagaagctgcccagaaggtgggcgctgttgctrctgctacctcttagacaaggaaaaaccgtatgtgtggctattttcatttttgttcctatgagcattgttcctatgagcattgtctttgtggtttgacctgaggttgtatatatgctcactgcttagctctgggaatacaataagtacagttagttacacggagtgtgttgcaggtgacttcttatcatgaggactgtggactttgtctgcaggagcttgagtgaataataaaactagtactggttgatggttgtaggtgtctccagatagggaaagaagagacagtaaaataagctaaggaaaaagcacatggtaaggaccagagctggtgtgttgggagggttgacttggcatagtcatgaccctcttgtcaagggcctcaggagccttgtcatctagtggtaaagaccagagatgctgctaaatgttgtacagtacacaggaggacagacccaacagaatgtccaaagtgtcaatagcactgaggttgagaaactctcttctagaataccttcctttatccactatatgttaatgaatctaaattatttgattatgcatttatttgtgttggtgcttttctttacaggattcaaaagccaaataaccccttatggaattcaactcaaggtttgaagacttcctagcttgtcctatggacctcaacaccaaggattacaaattgcaaatttaataggtcattttgtatcaaaaggtcaattatgaagcacctagaatttttcaattatacgaatatgttctttgggttctgctgtggcccagacagtgttaactttttttttattgtgggttttgattttttcccccagaaattggttttatttgatgtacccaagtcttacgtttcccaataaagaaaaaaaatctccataaaactgcctctgtctctgaccacagttttactctatgaattccggttttcactggaagtaactttaggatgtgaattggttccagtgatagtttattctttcttgacttgaagctgacaaagattagcaagatacacagaactgttaaatatgatcctgtcccacactgttctgttacagtatgattgttacattagccccatttaacttagagggaacagagatctgatgtggtcagagcagaccatgggtctggcccaggaaaatctggggcagagtggggttggcgcacaccccaaggacatacggtgagatctgcagatcccagttggttagttgagccccgtccttcccttcctgaactcggttggggtgtgtcctgtcccctcttatttcctgcagtcagtttatgctgcattcgagtcagcggatccagttccccagattctgcaaccaagttttcccctagcagggaaaatgggaggtctgtgactatagcaaatggtgctgaagtcttcagtgcttgtggtttctttgatgttcaaagtgacagtaaaatgacatcctaaaggccaagatcacatccctttgcagcctactttccctgcggctccagccttgcctgctttccctcctggagcttgcttggtgcttccttagtgccccatccaggcagtccttagaatgctcatccctcttggcaggctcctttagatctggtgtcacctcggctgggcacagtggctaacgcctgtaatcccagcactttgggatgccgaggcgggcggatcacaaggtcaggagatcgagaccatcctggctaacacggtgaaaccccgtctctactaaaaatacaaaaaaaattagccgggcgtggtggcgggcacctgtagttacaacttcttgggaggctgaggcaggagaatggcgtgaacctgggaggcggagctagcagtgagccgagatcgcgccactgcactccagcctgggcgacagagcgagactccgtctcaaaaaaaaaaaaaaaaaaatctggtgtcaccttaacagatctaaaggagatgtccttgtttccggacggccccttctttccttaatctggtgccggatggggtggggcacggtgcgggcttccggcggaagcgctggaagcaagatggcggccgccgagagggttcacaaagggtagggtggtgtggagcaaggcagggtcctcgcaggcagtgccaagattgagctgggggtgggcagagtgggcggggtgcggacccatggccctacgcatcctgggccaggtctcttgtggtgcttcacgctctcgacctgtgagtggtgcctgctagagctgcccagatcccttttccctaccccttctgaccctggacccagagtggtggttgcgatctgctaccgtgacgtcagccctcattcgttcgttccacaaactccacagctctggtccattagaggaaggaggtcccagaatagctgggaaattacgagaacagcctcactgcacgagttggtgaatgctgtgatggcgattgtatgatggacggtgatgttgaaaccagactggggaatgaccgccccatccggagaggtgagggtaaactttcgggatgctctgagtccagagatgggtttgaaagatgcaaagttaaccaagcagccaaggtgggagccaggctgttgcctgaatggagacaagcagcgagagtcaaaacccagagtctggccatacttagtatatgctatactaagaaatgtggatttttctccgttggccattggactgcttttgaagaataccaaccagaagagtaatataatcgtatttgtattttcttgggataacggaggagagaaaaagaaggcgatcccattcaggaaattgtcaccataaaccagggcaaaaaatgtaggtcagaagagggatagggagaggagtgtatctcacaagtggttttgttatacccagaagagtattgggacccctcccttcctctcctccctgtgctcatgttaacaaggtgttggagcaactgcaccaaaagtgtggagacattgattcagaatgctcttggtatctgcaaagggggtgaaggacagttctttgtgctacttttattccttttggaaacatcacagatattctgattctgctgtattatgaaacaggtgacactgaaaagtccctcttaagattcctgatgccaggaaaataggaaaaaattttaagtcatgagcattctgtgtatggctggtatataatgaatttcagggggatgtctctctaggtcagcatggtggtgatcttggagatggaataggaaggttctgaggacagcagagctaggatgatggtgtggctatgggttgaaatttacaaaaattaacaatctggctgggcgcggtggctcacacctgtaatcgcagcactttgggaggccgaggcgggcggatcacgaagtcaggagatcgagaccatcctggctaacacagtgaaaccccgtctctactaaaaatgcaaaaaattagccgggcgtagtggcgggcgcctgtagtcccagctacttgggaggctgaggcaggagaatggagtgaacccgggaggcggagcttgcagtgagctgagatcgcgccactgcactccaacctgagtgacagagccagactccgtctcaaaaaaaaaaaaaaaaaaaaaaaaaaaaaaatctgttggatttgaggttagactttaagttggaaccatttgggggctttgatttctcatcatttaatataaaaagtgtatagtaaaaaggccaggcgcggtggctcacgcctgcaatcccagcactttgggaggcagaggcgggcggatcacgaggtcaggagatcgagaccatcctggctaagacggtgaaaccccatctctactaaaaatccaaaaaattagccgggcgtggtggcaggctcctatagtcccagctaatcgggaggctgaggcaggagaatggcgtgaacccgggaggcggagcttgcagtgagccgagatcgcgccactgcactccagcctgggtgannnnnnnnnnnnnnnnnnnnnnnnnnnnnnnnnnnnnnnnnnnnnnnnnnnnnnnnnnnnnnnnnnnnnnnnnnnnnnnnnnnnnnnnnnnnnnnnnnnnnnnnnnnnnnnnnnnnnnnnnnnnnnnnnnnnnnnnnnnnnnnnnnnnnnnnnnnnnnnnnnnnnnnnnnnnnnnnnnnnnnnnnnnnnnnnnnnnnnnnnnnnnnnnnnnnnnnnnnnnnnnnnnnnnnnnnnnnnnnnnnnnnnnnnnnnnnnnnnnnnnnnnnnnnnnnnnnnnnnnnnnnnnnnnnnnnnnnnnnnnnnnnnnnnnncccttcctggcggctgtgctgttaaatagcagcagtgtagcagggtaagctcagcctcagcagtgaagccttggcctctgcttacctggttaagtttttcttcaattggtatcacaattacagtgcaagtttctatttgatcttttgtttttattttctaggttaggaattttagacccagttctgctactgactttctgtgtggacacaaactcactgagccttcagttcttcaaatcattttttttttcttttttttttttttttttgagatggagtctcactctgtcacccaggctggagtgcagtggagcgatcttggctcactgcaacctctgccttctgggttcaagcgattctcctgcctcagcctcccaagtagctgggactacaggtgcctgccaccacccccaactaatttttttgtatttttagtagagacggggtttcactatgttggccaggctggtcttgaactcctgacctcgtgatccgcctgccttggcctcccaaagtgctgggattacagatgtaagctgctgtgccagctttttttttttttttagagacggggtcttgctctgtcatccaggctggattgcagtgtcattgatcatagctcaagcggtcttcctgcctcagcctcccaaagtgctgtgattacaggtgtgagccactgcacctggcctcttcatatcttacaacggtaagactagcgggttcaggagcccttctatccctgagttttttttgtttttgtttttgtttttttttatggagacagagtctgtctgtgtcacccaggctggagtgcagtggcgcgatctcggctcactgcaacctccgcctcctgrgttcaagcagttctcctacctcagcctcccgaatagctgggactacaggcacacaccgccatgcccagctaattttttgtattttagtagagacggggtttcaccatgttgcccaggctggtctcaaactcctgagctcaggcagtccgcctgcctcaaagtgctaggattacaggtgtgagccaccgcacccagcctatccctgagttttataaagtagtaattcctactactcttggtctctcccagctaaaataagtttttcctgggaacgaagactatgatgctcccttctttagtagtcacctgacccaatggtaagatcaatgctctatacacaattaaagcttttttggaattaataattgttagaccaacaactttttctatttctgtaagttttataaacaaaggtcatcaaagtgcttggaaagcaacttcaggttttacgttctatagtggtacaactgaattttatyttattttaattagttaattaatttatttatttttgagatggagtcttgctttgtcacccaggctggagtgcaatggcgtgatcttggctcactgcagcctctgcctcctgggttcaagcgattgtcctgcctcaggagctgggactacaggcgcctgccaccatgcccaactagtttttttttgtatttttagtagagatggggtttcactatgttggccaggctggtcttgaactcctggcctcgtgatccgcctgccttggactctcaaagtgctgggattacaggcataaaccactgcgcctgacctatattttttttttagagatggggtctcgctctgctacccaggctggattgcagtgtcattgatcatagctcaagtggtcttcttgcctcagcctcccaaagtgctgtgattactggtgtgagccactgcacctggcctcttcatatcttacaacagtaagactaatgcattcaggagcccttctatccctgattttttttttttttttaatggagacggagtctctttctgttgcctaagctggagtgcagtggcgcgatctcggctcactgcaacctctgcctcctgggttcaagcagttctcctacctcagcctcccgaatagctgggactacaggcacacactgccacgcccagctaattttttgtattttagtagagatgaggtttcaccatgttgcccgggctggtctcaaactcctgagctcaggcagtccaccctcctcaaagtgctaggattacaggtgtgagccactgtgcccagcctatccctgagttttatgaagtagtaattcctactactcttggtctctcccagctaaaataagtttttcctgggaacaaagactatgatgctcccttctttagtagtctcctgacccagcggtaaggtgaatgctctatacacagttaaagcctgataggaattaatgattgttaaacaactttttctatttctgtaagttttataaacaaaggtcatcaaaatgcttggaaagcaacttcaggtttacattctatagtggtacaactgtattttattttaattagttaattaattaattatttttgagatggagtcttgctttgtcacccaggctggagtgcaraggtgcaatcgaggctcactgcagcctccacctcctggattcaagcgagtctcctgcctcagcgtttcaagtagctaggactacaggcgtgtgccactgcacccagctaatttttgtatttttagtagagacaaggttttaccatgttggccaggctgatctcaaactccagacctcaggtgatctgcctgcctcagcctcccaaagtgctgggattacagatgtgagccactgcagtcagcctgaattgtacaaagtttaaaattagttcattgtttatgtatatttatttaaaatgaaatgactaatatttctggatgcgttgctgaataaaccaagaaaaatctaaaaatttgactttcattttgtaaatgacatctggatatggcgtgtttcctcctattgctcacatattaacaacccatttctgcttttgcagaaaagcaccaaggattctcttttgttgaatttgagttggcagaggtaagaagttttccttttaatatttgactagtgtcactcttgtcattgattaccaaaggtgtcagtctgtttggatggatgtggtagtttccttgggctgttgtaacaaattatcatacatttgggtggcttaaaacaacagaaatttattatctcacaattctggagactagaggtccaaaatcaaggtgttggcagggccatgctcctctgaaggctctcaggaagactctttacttgccttcctggcttctagtggttcctcacaattccttggcttgtagtatcactctagtctctgcctgtcttcacatggctttcttccttgtatgtgtttctgtcttctcttataaagataccagtcattcagtcattggatttagggtccataacaattcagtatgaccttttcttaactaattacatctgtgaaggccctacttcytttttttttttttttttttttgagacaaggtctcactctatcacccaagctggagtgcagtggtgtgattacagctcactgctgcctcaaactcctgggctcaaatgatcctgctacctcagcctcccaagtagctaggactataggtgcacatcaccatgtctgcctaatttttaaaatttttatagagatgggggtctcactatattgctcaggctcrtcttcaactcctagcctcaagtcatcctcccacctcagttctccaaagcactgagattacatgtgagctactgcacccagcccaccaccccaaagaccctatttctaaataaagtccgattctgaggtttaggcagacatgaattttgggcgacactattcatcccactatagtggcttggtagtggcttttgcagagaaacaggaagttctggttgaagtatggcccaccaggcccggctcaaagttcccctcctgtattcagagtatagaagacaggtcttggagaggcctgagccctccggcctggcattgctcattcctgttttattgtgtgtattctctccctccatcaactgggcacccatctgtataccaccagctctaacaggcagtacacactcttagtaaaacacagtctaggcaagtaggaggggagattgtgtctttttttgtgtgcttgtgctactgagtttttatttgaacactgtaagaagagttgaactatgggcatgaactttttccttgtttatttttggcaggatgttgcagcagctgtcaacaacatggtatggctgagcatctttgttttttactgaagctgttatttggtgctactttttggtatagggaacacccatgtacctattgtgtttccaatttccatagtttcaaagttctgtagcaagcacaggtcatcgttatttgaaataattcaccatgaactagctaccaataaaattaattttttttttttttttttttctgagactgagtctgctctattacccaggctggagcgcagtgatgcaatctcagctcactgcaacctctgccttcccagttcacgtgatactcctacctcagcctcctgaatagctgggattacaggcacccgccaccacacccagctaatttttgtatttttagtagagacggggttttaccatgttggccagtctggtcttgaactcctgacctcaagtgacccgcctgccttggcctcccaaagtgctgggattacaagtgtgagccaccacacccatcctaaaattaattcttaaccagacatccttctcatttcacatttgttaaataccaaccacgtttgttggccaatctcttgaccattttgcaggggccagcaaactacagcctgtgggccaaatcattccacagtctgattttggtctttttttgagatacagtctcgctgtattacccaggctggagtggaatgcacgatctcgactcactacaaccttcacctcctgggctcaagcaatcctctcacctctgcctcccgagtagctgggactacaggtgtgtgctaccatgcccagctaattttagtatttttttgtagagacggggttttgctgtgttgcccaggctggtcttgaactcctgagctcaagcgatctaccaccttaggcttccaaagtgccacagtctgttttttgtatcctttgagctaaataattgctatcttttaaagggtgtgggggaaaaaaacccaatatgcaggagaggctgtatgtggcctacaaaaccaaaaatattttactatctagcctttttcagaaaatttgctaatccctaggctaggacagtgtactgcaaataaaatgtaacctgattgcaaagtttgtttgtttgtttatttatttatttatttatttttgacagtctcactctgttgcccaggctggagtgcattggcgcaatcttggctcactgcagcctctgccttttgggttcaagtgattttcctgcctcagccacccaagtagctgggattacaggcgcacaccactatgcccagctaatttttgtctttttagtagagacagggtttcaccatgttggccaggctggtcttgaactcttgatttcaagtggtctgcccgcctcagcctcccaaagtgccgggattacaggcatgagccaccacgcccagcctgcagggtcaatttgtgaatcttatgtaagagcagtgtttcatgtagtatatgaaagtgattatggagaactgctgtgattagctgtagtcaaaaacagccattgaagagttaggctctcttaaaccaattaacacctgaagaagagaaaatctgcaaggattatgacaaattgagtgcttcaaaagaaaatgatttgaggcagagtgtggtggctcacatttataatcccagcactttgggagatggaggcaggaggatcacttgaagccaggagttcaagacccaacctgggcaatagtgaggccctgtttctacaaaataataattttttttttttttttgagacagagtcttgctttgttgcccaggctggagtgcagtggcacaatctcggcttgcygcagcctctgcctcctgggttccagtgattcccctgcctcaacctcctgggtagctgggattacaggcgcatgccaccatacctggctaatttttgtatttttagtagagacgggcttttgccatgttggccaggctgctctcgaactcttgacctcaggtgatctgccagcctcagcctcccaaagtgctgggattataggtgtgagccactgtgcctggccaaataataataatttttaaaaaagaaaatgattttaattcttattgccactgtaacaaattactacaaatttagtggcttaaaacaacacaaatttatcttacaattttagaggtcagaaacccaaaaggggtctcactgggctaaaatcaaggtgttgccagggctctgttgcttctgggggctccaaggagaatctgtttccttgcctttcccagcttctagaggctacccacattatttggctcttggccccttccacttcaaaaccagcaatggcgtctcaaatctttctcacactgcatcactttgaaactctctacttctcttttccatatttagatgactcttgtgattacattgggtccatctgaataatcccagataataattttattttaaggttaactagcaaccttacatctgcaaccttacatctgcaaccttaattctttcctgtcatataacataacatagtcacaggttctgagaaataggctgtggacatctttggagagccattctgcctaccacaaaacccttaaatgccccctgccccctgctttttatttttgtgattgatattcatgactaaatatgaaacaaggatgtcatttaatgctagcattccattttttttttaattactgggaataaaattagtacctgatccatcttttttctaagaacaaaggacatacctgtaattataacctcagtcttactaaattaaggaatctttttttcatataacttttagttctcatgaaaaggcccaaaacaaacttctctcgaagtatcagttgttcttggctaatgaaatattcctacacttcattccatgttctttgttacgccttcatcaaacatgcccctcaacagtcaacaataccatttttctccagttgaaagctgatcttgactttctaaggtggactcaagtacttggtaactgcatttacccttatagtttcagagagtcctgagctcaaatccaaagatcttgccagcacagaccttcctgtttgttggtattaaagaaaggaagtgcatggtggctcaagggcattctagtggttagttttgtgcttagcctgcttatggggtgcaggctcccaggcttggaatcacaagcaggtctcagcctcctgggaagtaaatggaagactgtcaggtattcttttaacccaacaggtttaagcagctgagttgtatttcagtcttttcagaatgaatctgagctctttgggtggacaatttctgtcaatttggccaaaccaatgagagttaaggaaggcttttccagaccaggtgagtgggagcaactcacagattccctgtcatgtccacaactccacaactttggccttgtggccttggctgcttttttttttttttggagatagagtctcattctgtcgcccaggctggagtgcagtggtgtgatcacagctcactgcagtctctgccttccaggttcaagcaagtcttatgcctcagcctcccaagtagctgggattacaggcatgtgccaccatgcctggctaatttttgtatttttagtagagatggggtttcaccatgttggccagactggtctcgaatactggcctcaaatgacccacccaccttgacctcccaaagtgttgaggttataggcataagccactgcgcttggcccttggctgcatttttatcccagccttacttcctcttgtagtgatggtatgaacacaagtagagtggtttatagtgcagaagagaatgtagcacctccatggaaataaccactttgagattcttagcaaagctggaggtacggccccagtctatgtccaaaagtctagcttttggacatagacgtagactatgccatatcagccttggcacaggctgggacattccttttggcttgacttagttcctcctccttattctcattcacttctgttaagagctggacttagggcctgacacttaccagtgacaacttttcttgtcttggagagttcctaagagggaacttctgactgaaaccctacatattgagtccacttcgctgaccaaagcagtgaagaactggacatagctaattagctattggctcatggcttgaatttcttaacattcgtttgattccttcctttcagtttggtcagatgaagactgggtggagaagtttgctgggaagaggataaagaggaaggtggttgagacttcccaaagcagaaagccaggaggtaagaatgacagttcatgcttccataggagaggctgctgctttccacatagggaatttctgaggtgagtggtgttgggtgaatttaaaggagaagttttggctttcttatctaggtgagaaatatcttatgtgggctcaggtatttgtgattgctgctgagcaaggcggatatctgaggtgagaaaggatggtgagtactctgcatcaccagcatccgctatcctcctagtctttggcagcaggctcactgtcttcctgttcttgccctaattccaagggggcagaatcatgtagaggtcccttcccctcagtcagtacacaggcacaaggctctccctgccctctccacttgctcctgcttctccatcaggccatcctgactgttgcttcccaggataatttaagggctcctcctcctcagtccaccctttgagcagtgatatttccctgaattccttccttagccctcagcacctctctccacattatccttatgccatgtcagccccttctatctcctaaggttataacgatctttcattgtccgaatgatattctgatctctatccctagccctgacctttcacatatttctgtttgggtgtcttataggcaccataaataaagcatatcccaaatgggtttcatcacctttctggtctttttttatgcccaatcttagttcactttgccatcttcaacatagtcacacccaaaccagattccttggtgccagcttagatccctcactgtatttcatacctaatgcattaccataccctgctaattttatcttttaaatcttgcgtttctcctctccagttttcttctgccactgttgtcttggctgaggccttatcctctctcctgtgaataattggagtagcttcctaactggtctccctgccccaggcctgttttcctcctatccttagcagccagagggagctttctaaagggcagatctgactatctcactctccttaagcattctagggactcccttgatttataggattgagtccagcctccatcaaaagggacagaagacctctctatgttctgattcctgcttatgtctccatattttatctccattttatattctaggaaacaagagtttgtagatacctgtaaatctctgttttgatgtaagtcattcctctgcctgcagtgtccttttccaatttattttatgtggctaatgcctgctcatttctcatagcgcagcccatttactgccttctccaggaagcttttctgaatcctccagtgagtaaggcaagtatcactctgggctcccatggcctctgggttcctgtggcaccctctgtcctggcattatattgaaatgtgattatatagaaatgtgactgcattatattgaaattacttatttaacacatgtctaaatattgcttactctatgctaggcactgttctaagtgctctactaatatttaaccctaataacaattatttgagataagtactattattatccccagttctaggtgaggaagctggggcacagtgaagtcagtactttgttcagcgttacacagttcataatggtggagctgaggtctgaactaaggctgtagagctccaggatctgtgtgccttttacactgtgggtatccctccccygctggctagccagttcctcaagggcaggggccatatctatctaactgcctatctatttattttttatttttwgattcarggtcttgctctgttgcccaggctggagtgcagtggtaccatcacagctcactgcagctttgaccttccaggctcaagtggtcttcctgccccagcctcccaagtagctggaactacaggcacaccaccataaccagctacatttttcattttttattttgtagagacagggtcgcactgtgttgcccagattgatctcagaactcctgggctcaagcagtcctcttgccttggcctcccaaagtgctgggattacagtgtgagacaccccacccaactatatctatttaagaatcccagtacttggcctgatagctcaatacctgtatgttgaactattaatccaaaaaaacaatagagttggccggacgtggtggctcacgcctgtaatcccagcattttgtcaggccaaggcgggcagatcacgaggtcaggagttcgagaccagcctgaccaacgtggtgaaacctgtctctactaaaaatacaaaagttagccgggcatggtggcacgtgcctttaatcccagctactcaggaggctgaggcaggagaattgcttgaacccaggaggcggaggttgcagtgagttgagatcgcgctactgcactccagtctgggygacagagcaagactccctttccaaaaacaagcaaatgaaaaaatagagttttctctatcacacaaatgggaaggtttgtattgaatgttatatttatcctctatccagtcttgtcttggagcacaaagcaaaaaggcccagcatcctccactatcttctgaaaacttgccctcaggcctgagcaagagggctgcccggttgcttccatgtagccagccagcatatgtgcagggccaagtctagagggaggagggggtggcacatggatggtttcgtttaattggaagacagtgggtagattggagctggcatttgaagatgttgagagttgtggatcatgggcaagaaaagcgctgttctgggactgcggggcaggagaaggaaactgatgcttctgagggtgagtctgatgagataacatgcctgtgtgtgggcctcaggttagacagtgctgaggtctcccgtcactgggcatccagctgggtgctacggcmgtggctcctgccttctgcagccctgtcagggcccaaggccttccycatcagcacttgctccagcctactcactggagttgtgttctgggtgggtgtgtagaatactcrcactcctacttggggcatcagggagctctctagcaatttcttctgcacctagggagagcccactgctaaaaaaggcctagtcaaatcctcaggtgtacatggacatcaagattgggaacaagccggctggctgcatccaaaccctcctgcgttccgacgtcgtgcccatgaccacaggtgagcgggacaccatggtcaggacggtgggacactggtggctgaacaagatggggaggaagctacctggggtcctgggcccttaacactatttccatctgaggcgtctcagatcccagcatctagtaacaaatgaggcacagcaggcatttttgaagctctataaaggcttagagccattagaaagggtaggcaactaaaagttctaaacagttttaattatcctctggtttggttttattgtwgggtttttttttttttgtaattttatttggatatattttcaaacttacagatatatagaataagaattctgtaagaatatttcaaggggccaggtgcagtggttcacacctgtaatctcagcactttgggaggccatggtgggaggatcacttgagtccagcagtttgagatcagcctgggcaacacagcaaaagactccatctctacaaaaaatacaaagttagacgggtatagtgcgatgtgcctatagttccagctatttgggaggctgagacaagaggattgcttgagcccaggaggttgaggctgcagtgagccataattgcaccaccacactccagtctgggcaatagagcaaggccttgtcttaaaaaaaaagaaaaagaaaaaagaaaaaaagcagttaggggaactctcatatatcctttacctactcattaatttcctttttttgccctgtatgctttatcattttctttacatacattacacacagatgcgtatatgtatttttcccctgttccagtcgagaagttgaagaccatgcacctttactgccaaatacttcagtatatatttcctaagaaccagaatattcccttgcctaatcagagtacaactatcaaaattataaaatgtaacattgagtgatgagctatattcaaattttatcacttgtcccaatattgtcctttttagtaatttttagcaatttttcttccctgacaaggattcccatgttgatttagttgtcaagtctctttagtctccttttatttgaaaccgtttcttaatttttcattgtcttttttgatcttgacatctttgaagagaataggccagttgtgtttaagggtgctcctcagtttgtatttgcctagtacttcctcatgattagattgaggttatgtgttttggcatcaatagcacagaagcagtgtgttagtgcatcgtttgaggaagtacatgatgttatttcagatatttgcaatgttaattttgttgacttggttaaggagttatttgccaagtgtcttcactggaaaaaatgctattttttttttctttgagacaggatctagttctgttgcccaggctggagtgcggtgatgtgatcacggcttactgcagcttcaaccttccaggctcaagtgatcctcccagctcagcttcccaagtagctgggaccacaggcatgcaccaccatgcccagccaattttttattgttttttgtacagatggaggtttcactatgtttcccagctaattttttttttttttttttttgagacggagtcttgctctgttgcccaggctggagtgcaggggygcaatcttggctcactgcaagctccgcctcccaggtttacgccattctcctgcctcagcctcccaattagctgagactacaggtgcccaccaccacgcccagctaatttttttgtatttttaatagagacggggtttcaccatgttagccaggatggtctcgatctcctgaccttgtgatctgcccgtctcggcctcccaaagtgctgggattacaggcatgagccaccgcacccagcccttttgtatttttttttgtagagatggtgggttttgccatgttgtccagtctggtcttgaactggactcaagtgatcctcttacctcggcctcccaaaatgctgggattacagacatgagcggccgcacccagccagaaaagtactatttttaagggtatcaatcagaaactaaaactttctctccttactattcagcccatctcccagaggtagctacaattgacagttgtgttttcctttttttcttaagtattcatgatgacctttttttacccataatcttttttgtcttaatctagcttttaaaaatgtttcttaaagtcataattgcacatagtttaaagaaaatcgttctataataaaacattcttctgctcccccaacataatttttctgccctgccagaggcaacattcatttcttttaactattttaattatttgggcttttattgctatgtctctgaaaaatatactcatattactattagtaatcccagactggagtacaatggcatgatcttggctcactgcaacctccgcctcccgggttcaagtgattctcctgcttcagcctcccgagtagctgggattacaggcgcccaccaccatgcccagctggtttttatatttttagtagagacagggcttcaccatgttggccaggctggtcttgaactcctgacctcaggtgatccacccacctctgcctcccaaagcgctgagattacaggtgtgagccacggcgcctggcctccctcctctgctatccattttagatacctctcatcctcacctcagctggttcctctgctaatctaaatggcttatcaggtggggtgacctagacctttgtctgtggggatttgagctcctggtcattatataccttctcaggtcatcgctgcctagcataattgggtgggggagtccaaatgtttattcagttgtcctaagaccagtttatagaaagtccatctttgacccagtgatttaagatgccaagctttatgaaatatttaattcctttatatatatatatatatatatacacacgcacacacacacacacacacatatatatgcatatatacacacacatatacatacatacacatatatatacatttttgtatatgtgtgtgtgtgtgtgtgtgtgtatatatatatatatwttttttttttttgagacggaatttcactcttgttgcccaggctggagtaaaatggcatgatctcagcttactgcaaccttygcctcccgggttcaagtgattctcctgcttcagcctcccgagtagctgggattacaggcacatgccaccatgccgagctaattttctgtatttttattagagatagggttttaccacattggtcaggctggtcttgaactcctgacctcaggtgatccacccacctcggcctcccaaagtgctgggattacagacccgagccaccgcacctggcctatgtatatattttaatagagatgaggtcttgccgtgttgcccaggctggtctccaactcctctgctcaggcaatcctcctgccttggcctccccaagtactgagattacagatgtgagccaccatgcctagctgaaatactgaattttcatacgtttctgggtctattcgggactttctcttcttttcacctagtctgttctrtctatttgtgtgccacttccacacttaagcatttagtttaaataaaggtactatgtacttttttagatttggagagctggagtttgggkgtgtgtgtgtattttatttcagagacagggtctcactttgtcacctaggagtgtgccaccatgcctagctagtttctgtatttttagtagagatggggttttgccatgttggccaggctggtctcgaactcctgacctcaggtgatccacccaccttggcctcccaaagtgctgggattacaggcatgagccaccgtggctgggacccaaatgattatttttatttttgtagagatggcatgttacagagagctggagttttaattatctagttagatattcttacctcagcacttttctctttctcaatcccagagaattttctctacatgtgcacccatttaaaggactcggcttcaagggaagcagcttccaccgcattatcccccagttcatttgccagggcagtgatttcacaaaccacggtggcaccaggggtaagtccatctacaagaagaaatttgatgatgaaaactttatcttcaaacacacaggaccaggtaggaaccactcatcgtgtggtgacaagggaggctgggcgagggcagctgnccgtgcagggtggaaggatgagccgtggttctggctgagaaacagggaatctggaggagacccagctaccagacacaggagaaccgttcagccttgctagggtggagttagctttgggctttgaaaagcttttctgttttttattttgggttatttcagttcccatttgtctcctttcattaaaagaggaagaagcatagacgcctgggtctgctcctacaggggtgtcttgttattgtttttgtaactttttattttatgtartgtcaagctcacggaagagttacaagaatagtgcgatgaaccccatacacctttgctggcatttactcaagttcaccagttgtttatattggtgaacatcatttcctatttattctccttctgtgtatttttatagacagtgcgtatttttttagagccatttgaaagtaagttggagagttcatgttcctctaccactaaatacttcagcatgtatttcataagaaacagggtatttttaatgttaccaggacatagttctcaaaatcagaaaacaaacactgctacaatactattctctcaactgcagtgcatattcagatttcctcatgtgacagcacgtcatccttttggggcttttcatggttggcacgtgtcctagactcatagatgcgctgcccatccacccacaccacactgccctgttgcctcactcacatctcacgcgccgtcgctgcatgcactctccttcctcttgccaaggatcccgctgcctctctcgtgctccttcttacgtagtgcagaactctgtgtgctagagaaaagcacagccctgagctatctggtccctcttgagttgaggagctcaggtcttaagggcaccttgagcaatgcccagtggtcctcccagattgctggaggtacttgtcatccatcgtctgactggaaaacacgccttttcttcactcctcagccctccagcattgcttcatacactctccctctcagctgatggtgtcgcttatttatagaaacaatcagaagagaactatttagtcttcctgcagccagatctactcccctgcctgcatcattctctcctgcctggcctgcttgccttcctgtgacaatggtggcctccctcttctcctaccttttgccccatggtgtcttccctcagtctcttcccttgtctcttcctcctcctagtctctaaatttttggagggacccagtgctcrccatggcttttctgtatctgtattcactctttacctcaatagttctcacccttttaccctagcacctgcctcttacagctcatgctctagtgtgctgagatggaagtcacagctctgcacccttccagtgaatgcctaattaaaaacacggtattggctgggtgcagtggctcacgcctataatcccagcactttgggaggccgaggtgggaggattgcttgagcccaggagtttgagaccagcctgggcaacatggcaagaccccatctctacaaaaaatacaaaaaccagccaggcatcttggtgaacacctatagtcccagcttctcaggaggctgaggtaggaggatggcttgagctggggaggcagaggttgcaatgagccaagattgcaccatttggactccagcctgggtgacagagtgagactctgtctcaaacgaaaaaccccacagtattatttcatagttgtaatataaagggaaattaaaggaaaacaatttgtaataacataatatgcatttcagtattcaaatgcttggaagcaactacatgtatgaagtacttgaacatgtgtacttctgcctagagctgcacttagtagtgtggactgattcaggtgtgttgttttggcagaatcaaagtaacatgatgttttgaaatagtaaaaatctcttggtaaaattctgagcaaaaagaaatgaaaagtgacaggatgggttgatttctggaaaaatttgatacaaaaaaataattctttggatttatatggaacatggagttagggtgtaggctcagatcattataaatagatttttcttatctacatgaatgttattcagggcttttgaaagtccaggatttagagtaactctccattacgtaggagactgcaggacatctagagtccctccctgatcccttccttccaatgccagtagcaccgtattactgaccaccaaaaatagactgcagtttctggtagcccctagggggcagtatgataccactgagaacccatgccctgggcaatcacgccgcccagtcccaggactttcagtgaaatcaccgagttaagcttgtccacatgggtcaccatgctgatggctccctgagctccagactcctgtccaaccacctacctttcacctttgctggatatcccacgagcatctcacacttcacatgtccaaaatgtggccttggccttctcccccacacccttcctcccccttttccctgtttcagtaaatgactccaccatccacttagctgcttggtcagaaacttaggcgtcatcatggactcctgcatcacctgcaggccacatctatctgacttcaggtcatctcctggcccagctactcttcacccttcccccacgaccaccaagtcctgtttccagcctggcttcttcaccctcatagtctgatcttcacttggcagtcagagtgattgtttttaatcataaatctgatcacatcatcctcctgctgacccatcctgcgctgtgcgtggggacgctgtcctacagggttaacccaccttgggtcctggcacctctctgtgcccctaggatgtgctgcccctcgccctctgcatccataggcagtctcgctgttcctcagacatgctgagctcactcctgcctcagggcctttgcacatgcccttttctctcatggaatgttcttcctccactgtccagatggttcacacccacttccttcagatgccacccatgtgtccccttggctgagaggcctaccctgacctctccctaaaacaggctttcctgccacctcactcttctttttaatcagcttcagttttcttcttacgcttattacctgaaattgtgttatacatttattattttacttatttattttctgtctccctttctcccatgtcagcctcgtgagggcaggacttaggctttcttgttcaccattgtattctggaacggtgtctggcacacagcaagcatgcaataaatatttgaatatttattttaaaaagctattggttgtgcgtggtggctcatgcctattatcccagcactttgggaggccgaggccggcagatcacctgaggtcaggagttagaaaccagcctggccaacatggtgaaactccgtccctactaaaaatacaaaaaaattagccaggcgtggtggcgggtgcctgtagtctcagctacttgggaggctgaggcaggagaattacttgaacccaggaggcagaggttacagtgagccaagatcacgccactgcactccagcctgggcgacagagcaatactccgtctcaaaaaaaaagctattgacaggctgcttttttatgtgccaggctccctgattgactctgggaatcgagtggaatggggccaggtgcggtggttcgtgcctgtaatcccagcactttaggcttaggcaggcagattgcttgagccctggagtttgacaccagcctgggcaacatggcaaaaccctgtctctacaaaaattacaaaattagctgggcatggtggtgtgtgcctggtcacagctactcgagaggctgaggtgggagaatcgcttgagcctgggaggttgaggctgcagtgagctatgattgggccacagcactccagcctggatgacagagtgagatcatgtctcaaaaaacaaacaaaaagagtagaataggacatggtcctcatatgaagggcgtacccagtctagaggcccagccatgaagaggggggtttcttattgccacaacgagatgtagctccttatcctacgccccctagtcccctggcaaacccaggctttttatttgtttgttttgttgttgttgaggcagagtcttgctctgtctcccaagctggagtgctgtgacatgatcttggctcacttgcagcctcaacctcctgggctcaagcaatcctcctgcctcagcctcccaagtagctgggacttatagatacatgccaccacacctggctagttttaaattttttgtagagatgggatttttctctgttgcccaggctggtcttgtattcctggactcaagtgatcctcctgccttggcctgccaaagtgctgggattacaggcgtgagccacggtgcctggccccaggccttttagactgaactcagacatcacctccttcagaaagccttcatgatgagtgtttgtgtgagtatctgtttctctttttcacaaacacttaggtgactctagtgctcccattctatgcacaaatgtctctgtcactgggctttgccattttgtagtgtaattatcttttttttttaacggctttagtaggatattatttacataccatccagtttgcccacttaaagtacacattttaatggtttttaatgtattcacagagttgtgcaaccatcaccacaaataattttagaacattttatcccccaaaaggaaacttcataccctttagcagttgctacttatcctgttggtcccctgccctgggaaacccgaatttactttctgtctttayggattttcccattctaggcatttaatataagtggaatcatacaatatgtaggcttttgtgagtgtcttctttcacttagcataatgttttcaaggttcatccatgttgtagcatgtatcagtacatcattccttttttttctttttgttttggtttttggtttttttttttttttttttttttgagatggagtctcactttgtcacccaggctggattgcagtggtgcagtctcggctcactgcaagctccgcctcctgggttcacaccattctcctgcctcagcctcccagctgggaccacaggcacccgccaccacgcctggctaattttttgtatttttagtagagatggggtttcaccgtgttagccaggatggtctcgatctcctgacctcgtgatctgcccaccttggcctcccaaaatgttgggattacaggcgtgagccaccgcctccggccccatcattcctttttattgccaattaatacccactgtctgcaccccacatttgtttatccattcataagttgatagattgtttctactttttggctattacaaataatgccactgtgaacattcacatacaaatttttgtgtagacatatgttttcatttctcttagatgtagccatagaattggaaatgctgggttatataactatttatttatttttttttgagacagaatttcactctagagtgcagtgrcacaatctcggctcactgcaacctccacctccctggttcaagagattctcctgcctcagcctcccctagctaggattacaggcatgcacctccatactcggctaatttttgtatttttagtagagacggagctttgccatgatggccagctggtctcgaattcctggcctcaagtgatctgcacaaagtgctgagattacaggcatgagccaccgtgtctggctgataactatttttaatgttttgagaaacgaccagactgtttgaagtggctgtaccattttgcattctttttttttttttgagatggagtctcactctgttgcccaggctggagtgcagtggygcaatctcagcccactgcaagctccgcctcccgggttcacgccattctcctgcctcagcctcccgagtagctgggactacaggcgcctaccaccacgcctggctaatttttttgtatttttagtagagacrkggtttcacygtgttagccaggatggtcttgatctcctgaccttgtgatccgcccgcctyggcctcccaacgtgctgggattacaggcatgagccactgccccattttgcattcttaacggcagtgtatgatgtttctgatgcctctataccctcaccaacacttgtgattatccttctttttttattagacctatcctagtgatgtgaagtggtatctcattgtggttttgattggcatttccgtgctagttaatgatgttgagcatcttttcatgtgtttattggccttctctatatcttctttggaaaaatgtctcttcagaccctttaccaatttttaattggattatttgtctttctattgttgagtaagaattcttttgttttttgttttttgagacaggttctcactctgtcacccagcctggagtgcagtgatgtgatcacagctcactgcagccttgaccctctgggcccaagtgatccacctgtctcagcctttcaagtagctgggactacaggtgcatgccaccaggcccagctaattttattttttgtagagacagggtctccctgtgttgcccaggcttgcctcaagtgatccgcctgccttcacttctcaaagtgctgggattataggcatgagtcaccacacctgaccaaatatagtcaagagtccttctttttttatttttgtagtgacggggtcttgctctgttgaccagactggagtgcagtggcacagtcacagcttgctgtggcctcaaattcctgggctcaagtgatccctctgtctcagactcctaagtagctggaactacaggcatgcaccacaatgcctggctaattttttcttattttttgtagagatggggctctcacttcgttccccaggctggtcccaaactcctagcctcaagtgatccacccgcctcagcctcccaaagtactgggattacaggcgtgagccactgcgcccggccttttctttcattctataggttgtcttttcacttttttgatggcgtcgtttgaagcacaaaatattttaattttgataaagtctaatttatctttttttgtcacttgtacttttggtgtagtgattatgaagatttactcctacactttctattaagtattttatggttttctctcttacactgaagtctttactccatttgaagttaatttttgtgtatagtgtgaggaaagtggtccagcgttactcttttacatgtggattttcagtcgtcctarcaccatttgttgaaaaggctagtttttttcctgtttaattgtcttggtatccttggtgaatatagttgaccataaatgtaagggtttcttctggattctaaattatattttgttgatctgtatgtctgttattaggccattactactgtgtcttaaattccatagctttgtagtaaatttttaattctggaaatgcgagtcctccaactttgtttttcctttcaagattgttttggttatcctgagtctcttacatttcttaagaattttgggataagcttatcaactcgtatgaaaaaagccagctaggattttaatacagattgcactgaatgtgaagaatttaggagtatcatcatcttaacaatattaagtcttctgatccatgaacacaggatatcttttcatttgtttaggtcttcttcagtgtttttcagtaatgttctttggttttcttttttttttttttttaattgggatggggtcttgctatgttatctaggctggtctcgaactccagggctcaagcaatcctgccaccttgtcctcccaaaatgctgggattatagatgtaagccaccatgcctagcgagtcagaattctttaaatattttagatacaggtctcttatcagatgtataatttgcaaatagtttctctcattcttttttttttttttttagacagggtctcactgtattgcccaggctggagtgcagtggtgcaatcacagctcaccacagtcttggaactcctgtacccaagtggtccttatgtttcagctttacaactagttggaactataggcacacaccaccacacctggctaattttaaaaaatatttttgtagacagctgtgactgcaccattgcactccagcctggacaacagagcaagactcttctaaaaaaaatacacacacatatatatatagcaattatatttcttttcttatttttgagacagagtcttgctatgtcgcccaggctggagtgcagtggcagcatctcagctcactgcaagctccacctcccgggtccacgccattctcctgcctcagcctcctgagtagctgggactacaggcgcccgccaccacgccgagctaattttttgtatttttagtagagatagggtttcaccatgttagccaggatggtctcgatctcctgaccttgtgatctgcccgcctcggcctcccaaagtgttgggattacgggtgtgagccaccgtgcctggccgtagatatagcaattatatttctatacatcagcaatgaacaacctgaaaacagaataaaaagaaaaacaattatacttacaatagcataaaaaagaataaaatatttaggaataagtttaaaagatgtatacagcttatactttgaaaaccacaaaacaggccaggcatggtggttcacactcataatcccagcacgttgggagactgaagtgggaaaatcacttgagtccaggagtctgagaccagcccgagtcaacataatgagacctcatctctacaaaaatatatataatcaattgtatattgattttgtattctgcaacattgctaaacttgtttaatagttcttttttttttctttttttgagatggagtctcactctgtcgcccaggctggagtgcggtggcacgatctcagctcactgcaacctccacctcccaggttcacgccattttcctgcctcagcctcctgagtagctgggactacaggcgcccgccaccacgcctggctaattttttgtatttttagtagagatggggtttcaccgtgttagccaggatggtctcaatttcctgaccttgtgatccgcgcaccttggcctcccaaagtgctggggttacaggcgtgagccaccatgcccggcctgtttattagttctaatagttttttttgtggattttttaggattttctatatgcaagagtgtgtcatctgcaaatagaaatagctttacattttccttgccgattggatgcctttcatttcatttttttcacctaattaccctggctagaaccttcagtacaatgttgaatagaagtgtcaagggcagatatcctcgtcttgttcctgaccttagggggaaagcatcttgtctttcacatgtagttttctgttgataccttttatcagattgagaaagttcccccttccactcctagtttattgagttttcattatgaaaaggtgttggattttgtctactgctttttctgtatctgagatgattatgtggtttttgttctttatactattgataattgtctattacattgattgatttttagatgttaaaccaactttgcattcctgagatgaatccacatcttttttgggtggctgtatttcactagattgtgagctccaccactgttagggccagtgtccccagggggcaggtaggggtggatgtccctaaagtctgtctttattctgctccttcactcccctgagtgtcccctcttctattctgtctgcaaaggcaaggatgggaagccaaggcagaaggtgatcattggcaactgtggggagtatgtgtgaggcggcactctctctgctctccactctgctcttgcccctgcacatccaggaaggagctgccagcctcagaggaggcagcaccgagggtgccctatttgaagcaagcaggatttgtggcatgaggcccaccttagggtcagcttggagcacctctgtaggcacagcctggactgttcccaagtgcagctgtgggcccacgaaccagcacaggtgctccttctccaaccaccacttttctcggcatttgctgctgggtctgctgtgggcccaccaatgtggctcctggatgttttgttctctttggtttgctaaaataaattctagttcttatactgctgcctgccagccaggtcccaggtgttttcagaggttgctgctgggacaggccatagcatctcggctgctgctcttctctcttaggccaagtcccttaggagatgccctcggcagcccattgtggggcagtagaagtcaaagccatgtaaaagtgcctgtgtcttttctttctggtcagttaccattcctgctctcacaccagctggtcttgtgcctgatggacatttgtaatcagtctcactgacctggcactcattatgcacttcctgaaccaacagaactgtattaccgaggagcacacagggcgcttctttagtcagcggatgtgcttggtgctggggagaaacaagccaggggtggctcctacttcctcctccccaaccccaggcctacctggaaactgcagtgtggtgtcatggtgcgcagcctgtgctaggatggcctctcaccctgcaccrattttgggccagccaggccacctcatggcctctttcaggtgttgaaactgagccctatcagtctccagaaacctcccccagggctgcccactggctcccatgacatgtcctaggagctctgtctgaatcaagccttttttttttttttttttttttgagatggagttttgcttttgtcactcaggctggagcatgatctcagctcactacaacctctgcctcccaggttcaagcaattctgcctcagcctcccaagtagctgggattataggcacccgccaccatgcccagctaatttttgtattttcagtagagatgggggtttcgccatgttggccaggctggtcttaaactcctgacctcaggtgatccacctgccttggcctcccagaatgctggctgaatcaagtcttgatgttgagtatccaccagggtgagggtggtggggaaaggagaagcctattgccctggccccagtgaccccaagccagctccacctctggcaccctgggtggggcttctccccgcttgatcagcttgggcctgcagctttcccagcaggcactctcactcctcaatgtcggtgtcattactggtggtcagtcatggccgtcaggacaggcagcattgaggccaggataaggcagctactcagggctgccatgaagcccaggagagaagaggatgtgtgtgaattgctcaacactgtgggttctgggggtgacaggcaggctggcccgaggccccgggagggagaactggtcccacaaccctgtgaaacaagggaggaccttattgctgtgcttgcctgattaccctgggaaggagggaccaagggaccagccagaggccagtgggagaggaaccatcagggtttccccggaagttatcccagtgggtccatctgtgacccttgtactctgaggtcacctaagcctcagaggtgaggcacctgcccctgcttgtgccaattgctgcacagagaaggagaggaggttcttggcccagggattccagacccatggccagcctcgtggccatgcgatctcagcactaggctgcctgccaccctggtcacaggagccccatcccggcctctgaggaagggaacgcaagaccagacatacaagggagaagctaaagcagaactgaagggatggaaggctgctaaaagttatgttttcaaagaacatttaatcacagaaactttcaaaatattttgtacattgaatagatccgatcaccaagcagtgcatagagtaggatcctaactttgtaaaatatccatatgtcatatataaagaaagacaaatgtatatgtgccaagtaagaagactggaaggaattatgaacagtggttatctctgtgattgattatgggtgtttgtattctggtttttgttattttcaaaattttccccagcacacagataacattttcttacgtgagaaaaaattttttttaaaaagcagggggtggagagcggcaactgtttgctcaagacttttcagtaaggaaaggaacctggggtagaaagctcccccttcagctgcccatgagggcacaggtgggccccacactcactacggggccagggcagggccrcacacctgccacttcctcagcagagaccctagcgcrtgggtcactgctggcccagactccttccacgagcaggcgagkgtgcagggccacacctcatccaagagatgatcacgtttaggtttttgatgaaaagcatagctctcaggtaaatacagcagcacctctaagcatattctgggaggagtgggttttatgaggaaggcacacaaggaacgcccaaatttgcaagtccctttaaaatgagcctgctcagaattgctgtttattccacaggtctgcgcaggcatggcactaagtgtcccatggcacatttggccctcatggaggcctcaaaagggcaggaccagcaccctcttctacggaggaaggaacgggcacagcaggtacatgatgtggtcaaattaacaagaggcagaggccgggtaagtggctcacgcctgtaatcctagcactttgggaggctgaggcaggaggattgcttgagctcaggagttcaagactggcctgggcaaagtttaagaccggcctgggcaacatagtgagacctggtttctataaaaaatwwaaaaattagctgggtatggtggcgtgtgcctgtcatcccagcaactcgggctgargtgggaggattgcttgagcccagcaggttgaggctgcagtgagccatgacactgccactgcactccagcctgggcgacaaagcaagaccatgtatgtctttaaaaaaaaaaaaaaaaaggcagccaggacctgatgccaggtcgacttggctccaaaacctgccctctccttttcacagcctcctttcctgtgaaataatagggaatttctctaaagcgcatcgcccggtccctatgtaaagacaaagaaacaggactttgcacgctcacctggcattagggccagcactgtgctgcagttgtgaagatggccactgggttgggggttgttctgcaccaaatggccccagactccctgtcagtggctacttgttgcagccagtgggcctgagctgaccacccttatttatgctcctgatgtgcagccttgaatgcatcctgggctgtgggaggcaaccaggccagaagatgaccttgatagctgagcactgacccttcatcagctgtgtgtccttacgacctcctccctttctgaggccttctgtatgtgatgtcatttggtgggtggctaaagttgctagaagtctggccaccaggaaggccacgactgtcacactttgtgctttgctgcataaaaagggagtctcatcatgatcctcaggcctgctgtgcacacctgatgggcayagcagcgtttgcgtcttgaaaacattcatttcacaaactcctagcacacccaaaccatgccaggttacacactgggcactgaagagaccacacatttgtcagtttccgaaactctactgcccagtattggaagaagagagctgttaaatcaggtcctgcaatggcagataggccccaagtcctatggcagcagggggctcaggccatgtctcaagctctgggagaaggtcatgggggcagatgggttctctgggttggaagagcctttggaattaaagagtcctatgtcctcatgttgcagatgagaaactgaagcgtgaataagaaaggggacttgtcctgacaccaagtcagtggctgagttggaaccrgaatacctgtctcctaacactcaggccattgcctcttccaatctctgctagctgagcttgaagccttagactagtggggaactcaccatcttccagacagcctgggcccaccctttatgtacatgagagggtctcttcctctgcgcttgcacatggaggccctccctggtccaggtggaggggctgctgtcccgcagtgtggccccagcctccacccctgctgctggaccagctytccccaggcccctccctgggggtgcagcacgtgaactccagagaggcgcatccttgggcccatggggaggtggaaccactctgccaggctgtgcctgtggatggggcgggcccaggatctgcttttaatgacacggtttgggcagctggactctgtctgttccagcaggtaaattacaggcttagcaagtcagaaatcaaataaacactccaactcccagtggctgttccaaggagaacagcggtttccgggaacagtggaggccgagacaaacctccccacccaactcagcctaattactgcctgtcactccctgggmcagggaccttttctttgactcacagacccaagacacaggacagcgctggtgggcacccagggtgacgccrattttggtggccagcttgttcataactcctagacacaagcaaacactggcagtccccacccttgccccatgcctggccggagactgccagtcaccctgctttggatggaatggattgctctgcagtggggcaggagggggaactgaggtcttattgacaatgcctggtggtggctgtctgcagttctgtgctgaggcctggaggccctgtcctggttcagtgggaaaggtacgtaggttgattactgacatgagccatgggcaaggggagyaggctgcgggggcatttgctctgtgccagcctacactacatgttggagctgctggtcttgcctctgtctcagtgctgagccccaaatgggtcagcatggtagagatggtggagggaactggaagcccccaggattctttgctcctgtgggagtcatacctctttcccaggcaggagaaggggcaggcccagggcaagggaatacacatgacataaaatatccccagtggccaggcacggtggctcatgcctgtcatcccaacactttgggaggccgggcgggtggatcacctgaggtcaggagttcaagaccagcctggccgatatggtgaaaccccgtctctactaaaaatacaagaatgagctgggcgtggtggtgggcccctgtaatcccagctactcaggaggctgaggcacgagaattgcttgaacctgggaggcagaggttgcagtgagccaggattgcaccactgcactccagcctgggtgacagagtgagactctatctggaaaaaaaaaaaaaaaatccccagtggcttcgtggggatgtccagcttattctttttctaatatgctaactgcaccctggaccaaatgagaagaatcccagaacacactgtgctgagaacataagcgtgtccaattttgcccagaaatggccagtgttgtacctgggaagaggcagagcccttctcctcacacctaaaccctctggtgaatggagaaaagctcgggtcagccaacctcagaccatccggggccagccacagtctgacaggtcctaagataggacttctgtgctgactcactccagacagtgcagtcagcacaggctctgaggctgctgtgtgccttaggccaccaaagtgtcgggcagagtgacagccacaaaccccaggggaggggcacagaggtaccgagaaargaccagaagcctgacaggaagtaggcacmgagagtgagggcccctgacactcctgcttgagctgtgacagcatttaagggttttctgcctctgcagggcccgatccagatgagaagggtggctgcagtwgggcygggcgggykgactcagtggcagccgcaggccttgaccaccatgttgcggtgcttgcgcaggatgacgttgttgctgctgtcatagtagagcacagaggtggcgctcagcttggtgggtgcacagcacgccttggggactgcgtttggcttcatcaggtgcacctggccaggaagggagcacaggcaggggcatgaggccagtggcctcctctgaggacccacctagccccgccccagctccacctgctccctgccctggccatctccaagccacatgggagcagcacaataataagaattattaacaggaataagagcagccctgagagctctgggagcgggagctgtggtrgcccacagtgcccagggagggatacatggcagccccagggtgtggggcaggtgggcagggcactaatgaggggcctcgagtcccaggccaagggctcagacttcctcctggggataatgggaaggagaacctcatggccaggtttgtgcccttagtgaggtccccaagggggaacctggaaggaccactgtcttcttatagcccttcagacccccccagaggctctgcctccccacaccctggcctccctccccaggctctgggaggccaggcctcgccccctctcctgtgctgctccttctcccagaggactgcatccgccctcagcacttcaaggccctgcatgtgcccgcacctctccactcccctggctcagcttggacctctcttctgaactccagacttgcggatcctgctccccttcccacttctgcacttgggggtctaatgaggcctcagtggaacatagaattcctcccgccctgacatcatagctcccgcctgggaggcctcctggatgactcctttcgcctcctcccttccctgagagcagcccctggctcaacctccacctccgtgctgcctcggaccacctgcccagtcgagctgccatcacctgccaggtgaccacagcagccctcactcatcccctgctcctctgccttccactcccgcgaccatcagcctccccaagccagaaaggtccttctggagggtgacgcagaccaggacactgctttgctgaagacctctgacagcctctggggttgcttggaataaaatccaccctccttcccagggaaccccaggccctacgggagctggcctggctcacccyggcatcacctccctccactctcctccccttcactgcacccagcccctctcctccctgctggccctgaacttagggccagcctgctcctgtcttagggccttgcacttgctccttctggaacattcctcctccagctgctgacgtgcccctccttgtgtggagaggctgggcccagtctcactccactgacggcacggctgctctgctcttcctcacaggaggtgtcaactccacggttggtttgcttctgtgcccaccgacagcctcccctagagcacagtgcctgtttgctgccctgtaggctgtgagcactcactctagttgagcccctgaggggcaggggcaagggcagaggagatggagtccrggagctgcaggtgcagtcaccttcccatgtacctcccacacatgcagctgtgagaaccacacggcataaagggtggctgggccaggccaccccacgcgtcctcatcacccctgggcctttccaaggagatggctccaggtgtccagcaaacaccatttgactgcccagaaaggaagtattatcataggctcagagcagcttttggtaatttctttcctctcacaccaaggcattgtgtgcgcacktgtgtgtgtgtgtgtgtgtgtgtgtgtgttttaatttttattttagagacagggttttgctgtgttgctcaggcttgtcttgaacttctgggctcgtgtgctgcgattacagggtgagccactgcgcctgatcaaggcatcaccgttgaacctcctaagaggaaaacataaggctgtgcaataccaggaactgggattctaggtaaaaacttctagaaggaagcctcggtgccagaatccgcaaacacacagagcactcagtggtgagcagcaccagtgatcccatcagaagcctgcttttgtcctttaaggttgccccagacaccaaggcatcaaaagccaggggatccagaraaaacacagacagccaagagagaaactgcgggaaaaagccaaaaggttgagagccacaccatctagaagcttcctgcctgtggtgcggcacaggtgggtgagtgcacacgcacaccccacacactgtgcrcacatatcacrggcggtcagacttgccagcgtactcgggggcccgtgtgttaagatcacacagcccccacacagtgtacacatctgtttcatgtgctgtgcctctgagcgccgcacgcaggtgtgtaagtgtcccacaggagtttgttcagtgcatagaacaggcatgcatacgcgactgttcaygtgtgtccgtgtttgggtgtgggtctatgtgtagtagtgtggctgtatgaggaccagttcctgcagagctgtgggaagttagcgacgttactgactctgtgcagacaaagcccccsagacatggagcaggtggcctcactgccctcccggctggctggaccagacccctctctgcagggcctcccaccccagggggctgggcaggatgggcacggtactgaccagggactgcaggatggcgtggttggtggcrttcatgcaggagtccagygggaaggagcactccccctcacagtaataggcygagtagccttggggggcgatgacccagtcctggggggcaagggagaaggtgagtcccatccatgtgcycctccctgagcctcagggcccaaacccatcctccagccctgcagggccgtctcccccaagaggcttgaatccacccaggaacccccggcrgaaaaggctgggcaggagctcaggcccaacawcccccatcttcactttgygtcccctccccagccggccctccccwgcyggccctcccctgcccacrcctcccagagctgcagtcgtagccaatgcagggaggtctcagttaccctgcrgcaatgctgacagcttagttggttgattcagtcttcattttcatggttttaaaaaaaacaaaaaanasaacaamaacaamaaaaccctttctcaccatattctcactttagaaaacttggaaaacacagaagaaaaaaatacataagaaaattgaagtcaccatgattctatgtcctccctgcagattcacttctgatctacaggtggtgattgtcatttcagaaacaagragagtcagcaattaccagccagccraggtcctggaagctgacgtagagctcgtgccgacggcagacctgccggccgtgggagccgyggacgtcatctgcagggacagaaggggcaaggtcttttctggggttcctrctgtgtgcagctactatggggtaccagggtgggggatgccctgatgagcacatttgtcaaataaatgaatgacaggaaaccatytggtctcataaagcccatccctggaactctgcttgtaccatgacccagctcagaagcctgccatggctcccaatggctagagtgacactgtgcccagtcctcccctgtccttcagcctatgagcgtctttatgctccagtaaacagcccagcaggaccctcggccatcctgtgcctcctcctctctggagacccctgtgactccagcccaccctctcctgccacacccattcccgaggttcaagtggctcacgaccaggccagtcaagggccgactccctgggaaggagggcacggggttgggtcaggcctgtccctgatcctgaagggcttggcccagttggggagaaaactcgcataagcaaccgaggatcccacagggtgcccaggcacaaccgcaggtcatgaggggctgcggctcccagggaaggggcagctgattctgaaggaggctcctgagaaagacccggaggagccagggggagagagggagacttctgggcagcagggacagccaggacaggcctccggagtgccggtcaccagggtgcatcagggccaagatggtgtcaggaaaggtggctggagagtggccgtcagcttgaaccgacctgagcctgagggctctgggccaccacttggttctcgccctgcctctctcagccagaagcccacagggcctcggccccagcctgcccgaccctcaccaaagatccctgggagtcggttggcctgcggcagctcgttgcttttcttcggytgcctcctcctcagtggcctcactgcccgaggggtgcggatgggactcggactggccctgaagaaagtgaccacgaaaggctgttgggagcgtggggcccgttgacccagcaggccggccaggccaggatccacgctgtgccctgagacagaaaggagagaggggtcactcacgggcagyggccctgcagcagacacagcagcggtctctctgccggggcctgggcaggtccaggagcgtggaggctgaggacccaaggggtcctgctgagcctcagtttccacatctgaagcctggagtccttggtccagccccagccagtccacgtctctcctggggacagatttggaggaggtgggagggggtgctcagtgagctgcaggcggtgttattagtgacagctgcgtcacaaataataacatttgtgaagtgttttacaagttggaagatttttcccatggatcacctcattgggtccttacagtgaccctgcagctcctacttcacaggagacccagagtcctactgccagtgactccgagaaccagcgctcccaccttggtccaaggaccccgagacctgtgttctgtcttccgtcccgcactttctggggtgtgaatgtcaaacttatcaccgagacagctcgtggtagcatctgccaggttgagcgagtgcttgttctgctgggcacagcccaagagcagggcattaactgtctccctgatgcccacaagggagatgccaggcagagcagaaacattgaaccaagtcccagagcccaggttgcagcctgcggcagtctcattccagagcccgagttcttatgcacgagctgggcttatggacagaaaagaaagaaagaaaaggctgaaacagagatctgacttgggcctcagccccaggaggagtgaagcctgtaaacgggattgtcccccacagccgcttccagactgaggatgccgctgaaaacatgataactaaccctggagatgccaagcctcaccaataaaactgtgtatcatcctgtacttgtttggatttcaataacctttctattgtaaaagcaattaagtaaagaaacttttgaggccaggcaaggtggctcacgcttgtaatcccagcactttgggaggccgaggtgggaggattgcttgaacctaggcatttgagaccagcctgggcaacatagtgagaccctgtctcaacaaaaatataaaaacaaaaatgagctgggcatggtggtgaacttcccgggaagctgaggtgggaggactgcttgagcctgggaggttgaggctgcagtgaggtgtgattgtgtcaccacactccagctgggcgacagaatgagagtgtgtttcaagaaaaaaaaaacaaaacacaaaactttttctggttgtttaaataagtctccacaataaacatttcaaatttataaaatcccttggagcagtataccgtaattgacttgatattggctcatcatagacatgtaggttatttcccggctttcatgataaagatgggagtgcaatggagcctcttcactccgtgcatgggtgaaatttcctgatactgaatggcagaagcatgattaccagctcattttcatgtctctttaaacagtgccagttgttcagtttacacgaaagtacatttcacctccatgttataagcacagatgtacacacgtatgtacacacaggcatatgtttgcataaacacacagatgcacatacgctcagacagacatcacacacacagatgtatttattcctacgtagttctccagtacaccctacaggtcaaggacactgcctgccccaccctcagtcccactcaaaggtcagcccttaagcagctgtgcctcagccctggtgtcccttggccacttgactgaacaaccagtgaatccagagaccaacctttgacccgtgacatcatccgccacaaacaaatgcactggcaggagaggctccctccctctcacgagcatggacaagagctgctgagacagggaggctgtgagctgcagatgctaacatgggaaggaggcccagagagaatccactgggcagggcttgagtcacggtgagtcaaggttatggggaagcagcagaaatacaaggaacagagctggggcacagaggaaaagacaagtgaggtcacaacggagagagaacagagcagcctgagtggggtggtggtggtcaccagcccgggcactggagtgtcactctgcagactggctgacccatggggacagcctggggcccagggcagccctcctggctccacttgcagctctgtcctgtgactccctggggagccctgcctgccatggggcctgagaggccatcagtcctgcaggctttcctcactatttgcttctgtgcagctgtgttcaagggtcttatggggggtctcccagacacaggatagaatgtcgcattagatcagttacaccacagaccctcacagagcccctctgagccaggcctggcttgggtgctgggaacccctctgtaggtctcacaggccaggcgagcctgactagggaaccttggaagcagctaatcccaggttcccattttacagaagcagaaactaaggcccagagagagcagcaactgtccaaggtcccagagcaaggtgggtcggagccaggattgtcatatacttttccagcaaactgcagggcccagctggatgtggctgggcaagatggggggtggtgaaggggactaacagtgggtctgggttcagagccctgcatctggcaggcctggagaagctcccccatccccagccctctccttccagagcccagagcctcccttctccatcagctctgcttcttacccacccattcttaggcaggactccctggctccagctggctgcagggaaggccaagcagtcaaggtggggggctctcaggctgcccagctgtgggcaggccccttccagaaaggtggagttggaggcccagagggtcacttgtccgcttctagatacctcagccttttccacactgctcctgggaaactgacgcccagggcaaatcaggtgcccctctccaggagccccaaaaggcaccccactgcccactagatgacatttcatttcaagcccccaaccccagccatagtccctggccccttttccacacccccagtctgtgccctccatgagcgccaactctccctgccctgctctccttcccaggatctggcctttcctgcagggtgaggctccaatgggcccctggaaagtctgtccttgaccagtgagaacttactactctgaccacatgcccccartggcckgggaacccccagagctacacttatgcagtgcatgcaccaggccaggcttggctgtcaacagcacgtgtgcacgcgtgcatgcgcacacacacacacacacaatcttaattttagtttttgagactatagattcaggaggaaatgcctcgcagcctcttgggttacaacggaccatcacacaagtggccagtttgggcctccatcccagagaggagggcctaagtgtctggtgtgaatgatgcaggaacaattcaaatgaagctgagaaaactcatctagtcccttggttagggttctagaactcctcctgtcctaggctgtagcctttggccacacacagatagaggaagcttcctggtggatttcagcaccggcagcctctcccctctcagtctctcccatcacccggtcccttcccttggagatggtcctgctttccttctacggacatctagaagcttaacatctcataggtcccaggaggagagatgtgggaggaggaggggaggcttcagggaaacaaaatttaacaacaaaggccccagaagaaataccagataacggataaaaacgttcaagaaggccgggtgcaatggctcaagcctgtactttgggaggccaaggcaggtggatcacctgaggcccagagtttgagaccagcctggccaatatggagaaaccctatctctactgttaaaaatatatatacaaaaattagctaggcatggtggcacatgcctgtaatcccagctacttgagaggctgagacatgagaattgcttgaacccaggaagcaggggttgcagtgagctgagactggaccactgtactctagcctagataacagagtgagattctgtctaaaaaagaaaaaaaaattacagtaagctaaggttaattggcccaactcagtggctcatgtctgtaatcccagcactttgggaggctgaggcaagtggatcgcttgagctcaagtgttcaagaccagcctgggcaacatggtgaaactccatttctataaataaatttaaaaaataaaaaaaaataagcaggcattgtgatgtgcgcctgtagtcccagctactcaggaggctgagttaggattgcttgagcccaggaggcagaggttgcagtgagatcactgcattccattgcattccagcctgagtgacagagccagaccctgcctcaaaaaaaagaaaaaagaaagagaaggaaaaagaaaaaacaagctcatgaagatagcatgtcttccaatcacaaactcacatctttgctcgcctatttctcactgcagtagtaaaatgtcccttcaggtgtactctgggttgagtgattttctccctcgtcagtttttatctccatttcatggttcaagtacgagggaggcgcttgaatcaaatcttgctgtgaatgcgctgagctgtgcacgctctgtgtaaacatcacagagcaaagcggacatccattcctcaccactgcagacctgcgccttgcagtgctcgagaaacacagtgaggaactgatctgttttcctgttgtttttaattaaagtcgcagctctctagaggagcactgtccacctagggaggaaagtaggaggccagtagcaaacccctcccagagctggggacatgtattcccctggggaacccggtggcatccgccctgaggagcgcaccaccccgcccagatccaggtcccgtcagggtrccacctgctgcatgggcctgaggttcggggacacagcaaaggcacaccccgtgctctttttgatgtygtccaccgtcaggccctcccagagctccctcagcgtcagctctttcttcctgtgcacgtcaaacacggccttctcggtgatgatgcggtccacgcaccgcttcccggtcagcggcatggtgcatttctccatgay

SEQ ID NO: 93908 - DNA, 32388 bp, Homo sapiens
ccaagaaagccagagataagtggctagtccgcctaccctaaaaagccaatctagtagccagtagtagctagcagactaaaaaggttttgagttccaccccagacataagatagatatagccctgggtcctaaattccacacatacccagatggctcagatatcagctccaccataccttgattccagaatcccaaagctctgcaataagcttcaaccgttcttggagaaagttcttctgtggtgtggccacaaacacttgagtctctgtagtccgcaccttctcacctttggtctaataagagagaagaaagtaaaactaataaaaacctcctttccaccagcaattccaaaaatcaagacaaaaagaatcatcagaaaaccactccaactacacctccagaaacaggagggtttttaggtctccagccccacctcacacctatctaggacctaccttcatcctctgctccacaatgtagaagattcgctcaaccccaatgctgagtcccacacatggcaccttgtggcccttggggtcaaacatgcscaccagcccatcatagcgcccaccagcagccacactgcccacattcaggggctcctccccagcctgagttggggtctgcagcagcactgcttcatagatcactcctgtatagtagtctaggccccgagccaggctgaggtcaaaggagatctgtggggacaagattacagtcagtcccaaactagactcgggaccctgagagccctagagctcagcaggaggtccatttgcaattcagcttaccttatcagcaattccaaataaagtcaggtattcaaatagcagctttaggtctcccaggccctccagggcctgcttgttctgggatagtctgggatcctgaaacatttgctctactagggataccccacctggagagaaataaagtctctgctgttcactcacatgtgtttcattcaaaattatccctaatgtgctctagctagtcttcctcattttctttaaaaaaaaaaaaaaaaaaaaaagatcccagtctcacatgacaagaccctcctcctttgcctctagctttgccatctgaagacacaaagtcgttacaataagtaaaagagaaattaaattcaggacaggccctggagcttagcatatctacagaaaagagttgtttcagaggtagaatttgagcacatgtcaccttcagcctggttctatcacagctctgaaaaccctggttcttaccatgacactggacatagtccccaattcgatcagccacctcaggagccaggcctttcttcaccaccatctcatgtctcacatctttccaagccatctgcataaacacccaaacattagcccagccccaagatctttctttctcaaactgaaaaaggacaactcaacttccattcagtatatacatcacaagtagctaactgtatactcagcaaagtcagagacagcttaagaaatccagtcacaatccccactgtatagcatgactcagatcttccttcagagtatgcctccttaccttccaccccaaaatagcccacttccagccacaatctccttatttttcactagtggtatggatttgagggcagggcagaagctagatagggtctactgaagtatgtcttctttgttaccttgtctagtttatctatggaggagcagatggcacggaacttgctttcaggaacaccacagacagcaaacatcccatccacaatccgccggtcatttacctgagaactcaatgtcagtgacccaagtgcttgtcaatgcccttccactcaaaacaatggcagtacctactttcctgacacacaaaaaggatggaaatttcacaggaagagtacagacatataggaaatacaacagctttactaggaaagtcctacagttgcaggcttaagggttggagtcacccaagtttgggacttgcataaacagtattaggccaaatccagacttctcccacagttctcagccctggcctcaccttaatgagaaagtctcccaactgcaatccacttaggatttcacacatgatcttcaaacactctgcatcggggatcatagggtcaaactgaccagcaatgtcaaaatcctacagcaaagaaaaagatgggaaaaaacatccattatccagccagtttcaaggttgtggcccctagaactatcaaactgtgctgctcccatcaggtcacttacacactggcagaactccctataacggccttggactatggttgggctctctcgccgccacacctttccaacatgataacgtttcatcttcttcaccttattcatggccagataacgagcaaagggaacctcacataaatgggttaaggaagagggatactgcatccaaagattaggcccagtatacagacattagggaggactgggcctggatctcatccactagggtaagaacaaggaccttcccttttttccactatccccaaggcctagcagtgcttggaattcaatatatattgaatagtgtcaaatgaaggaatctcacctagcaaaactaaaagttcagcagaaagcaaggcaagtagagatagaagtgacccaagaactaacttcaggtctttctgcccattcagatcgattccgaaccatctcaaaatagtcaagcttcagaacttggatttgcctaacaacttctaagctactggttctgaaagtgcagggaaaggactacatgcatcttaattacccacgatgcttgtttaaaatgcagactgtaggccagatgcagtggctcacacccgtaaccccagcactttaggaggccaagatgggaggatcacttgaaacgatgagtttacaaccagcctgggcaacaaagacacccatctccacaaaaaaaattttttttttgagacagagttttgctcttgtcacccaggctggagtgcaatggcgcaatctcggctcactgcaacctctgcctcctgggttcaagtgattctcctgcctcagcctccctagtagctgggattacaggcacctgccaccacagccagctaactttttacgtcaaaagagatctgtggagacaaggtgacagtcagtcccaaactagactcagaacctgagagccccagagctcagcaggagctgagtagagatggggtttcactatattggccaggctggtcttgaactcctgacctcaggtgatccacctgcctcagcctcccaaagggcttggattacaggcgtgagccacgtgtctggccaaaaaaaacaattttttaatacaaattattgagccccattccagctacagaattagctaagaatctctgggactgcagccaaatgtctgtgcttctgcaagctcccccaaaggattatgatacacactagagttaaatgacagggctccaggccaggcttccgtagcagaactgccttctgggagaaactagaagtataggcaatggacctctaagatcccaaagtcacgttctccacttttgtcagagaaagcccgctggatttggaaagagacaggtcaggctcyagtactcaaaaggatacagtaaggtcatagcggagggacaacagctctccaccttgatccttcagatcatacatgagcccagagtcctctccatacttctcagtcagggtttcctatagggstcaaacagaatgagcsacagttgaaagcatgactccaaaacacagatgagaagccctttgggacactgaacgccattgaagaagtgagtgaggttgcacgtactctttcttctccccttaccttcagctcaaatgctggggtgtccatcccctttgctccatgacgtttaaagcagctgataaccaaatcaagaattttctccctcacaaccatatgctgaggactaagatccctggtaccctggaaaccaaaagcagccatagtgaaaacaaaaacaaaaaataagtccatttcagacaaggagttaaactacacttattatgtaatctcaggtctggagctgaaatctactgagttcaaatgactctgagccgcacctagtatctcaagaatagtatatatttttaaaatttactgtaaagaacattaaaaggggtcagagagacatgcaaggcagaggtcagtcctccaaggcactctaatgggatagggtaggcaaaaagtattacctttggggtcttgataataaaatttggtttctcttgatgtgctttcagttgggatgttaacactgcctctgcaacctggcagaagaatgaatgtgagatgtggcttctctggacactggccagacctgtggcatctctgaccctgttgaccaccaacctgcaaagactcttcaccctgagcaacaggaagccaaagcaccatttcatctatcccaatctcagtcccaccccaaagaatctatgttgtatttacaattacacgtgtaatatatatgaggtcaggtcttcaccacacaagcttcctcactgtatatggatttttttttttttttttgagacagagtctcggtctgttgcccaggctggagtacagtggcacaatcacggctcactgcaatctctgcctcctggttcaagcaattctcctgccttagcctcccgagtagctgggactacaggcgcgccaccaccacgcccagctaatttttgtatttttagtagagatggggtttcaccatgttggccaggctgctcttgaactcctgacctcgtgatccaaccgcttcagcctcccaaagtgctgggattacagacatgagccaccgagctcagccgcatttttaatattctcaaatactttaagaatctgagaataatgaaggcactgaacaacccaccactaccaacaccaaccattcaggggtagggattatggtgatcttctccaggtcaccgttcctactgaaagagcaaaaataatttttttttttttttcagatagagtcttactctgtcgcccaggctggagtgcagtggcacgatctcagctcctgcaacctccgcctcccgggttcaagcgattctcctgtctctgcctcccgagtagctgggattacaggcacatgccaccacgcccggctaatttttgtatttttagtagatacggggtttcgccatacaggtcaggctggtctcaaactcctgacctcaggtgatccaccccccttggcctcccaaagtgatgggattacaggcatgagccactgtgcccggacaaaaaaataataatttttaataaggtagcactggttatcaggtttagagagaggaaaactgtaacttgaagacaagggaaccagctcaaggacacagaacaagcctgtggaatgataagatatggatttcttgaatgagctaaaaaactcagactgataagatgctgtgattgaatatcaataaaagatctgtgccctattgttcacgatagcacaaagcatctgctaagagagcattagaatctttccgaagtaaggcaaaacttaatcagtgacattaccagcacgctgtatgcccttccaaaaatagagratgtggtggttccatactatggcgattatctgccctaagagaagtccaagttcaagtacacaatcccttatctgcaattccaaaatccaaaactctctgacatctgaaaatgtttttctgagattcattttgaggtaaattctaagatgaactcagtctacttctgatctttagtcatctcatttactaggaatattcatatatttcgcttaaaaatgttactgtttgagtccaagagtttcaggaaaaagtgtggatatgaattaaaatactcccttactacatatccgtgtataagtcattcatttaatcttgcagcctccgtttcctcaactgcagaatggaaatcaaaactccaacctctcaagattgctccaaggattaaatgaccaggcatccaaatcgcttagttcagtgtcagtacatagtgggcactcgataaaaaccgattgtaacactactggaatacaggccgcgaggctatgcgttcagatctggagaccctgctgggacagaccagagataattctgtctcgctcacctggctttggcaacggaccgccccggtgcacgaagcgcagggcggtcgcaggagctggctgagcagcgaagcccaggccctcctgggaagaagtccgagcaggggcatcgcgcggcaggacgccggctttccgggacaggaacaaaaggcctgggaaggaggcgggtcagacaccaggaagggtggagggcactgcaaaggcggaacccgcgcaccagggaaaactcgggcgtttgcgcacctcactagtcacgaaggctgaggtgggatcctcccaagttcccttagtagccagcttcggcacttccgggaggagccggaaataatttttgtgctcggcggaggctctctaggcgtgcgacccagcgactcgatagccggaagtcatccttgctgaggctggggcaaccaccgcaggtcgagacagcaggcggctcaagtggacagccgggatggcagagcgtgcggcgctggaggagctggtgaaacttcagggagagcgcgtgcgaggcctcaagcagcagaaggccagcgccgagctggtgagatttaggcagcaggggagagggccaaggcaaagcctgggaggacgtaaagccagggtgttcgggacatagggtagrgatgtgagggaagcgaccagtcttgtagggaggagagtgggctgcgtggggagacatccggggtgggtcccgagagaaacaaagctaggcctgagcagagagatgtgatgagggaggaatattgaatgaatggcgggggagggaggagagtgacagatggatagctcagcgcmttctttccctccacagatcgaggaggaggtggcgaaactcctgaaactgaaggcacagctgggtcctgatgaaagcaaacagaaatttgtgctcaaaacccccaaggtaatatcattcctgtagggagccactgagaaagtctctaactctactcacggggcgcttatgtctgcctccctaaaccagstcattgaggaggatctgaaatgctgcagaggagaggacagtcgctctgggcgctgggctggactggactctacctgagtcattctgggatggcaaagtgatggcagaaactaggccagctgggtgatcaggggagtcagcctgctgctgctactccttcgttcattcaataaatgtgtatttagcgctatgtctctagcactatacaaagcactgaatatataccatggtggacaatatagcctaccctcatggagcttacattctactgaaggagagagacttagaacaaataatcccacacagatttttttgttttttttttaaacagagtatcctctrttgcacaggctggagtgcagtggcacatcttggctcactgcagccgctgcctcctgggttcaagcgattctcctgcttcagcctcctgagtagctgggactacaggtgcccaccaccatgcccagctaatttttgtatttttagtagagacggggtttcaccatattggccagratggtcttgaacttctgacctcaagtgatctgcccgcctcagtctcccaaagtgctgggattacagacgtgtgccaccgcacccggccaccacatgtggttatgtaattacatattgtgaaaaatgatataaagaaattaaggttgctctgagaaaaataagggagaactggggagtctgagaaaggctaactgaggaagtgatatactaactgatctaatgaatgagtaggagatagccagaggacaagtgtgacaaagataggtccaggtagagtatggaaaccctaaagtgggaaagaactttggtagttttgaggaactagaggatgatctacatggctagaactaagttaaggagagtagagtggaatgaggttggagattctgagctcatcctccagttcagttccactttctgtaagttctataaacagaactgtttaccccttcatctaggtgctcttggcacttcatacatatttgttattacaccaactttaagtagttatttatgtcgtttatttaccctgagactgagactagatgcctaaataggtatagtcagccctccatatcccaaggtcccacattcacagattcaaccaactgtggatcaaaaccattcaggggaaaagaaacgattaagaaaaaaaatctggctgagtgtggtggcttacacctgtaatcccagcactttgggaggccacaaggggaggatcatttgagcccaggagcttgagaccagcctgagcaacatagtgagtccctatctctaaaaacaaacaaacaaataaaaaccttttgaaatctaacaataaaaatttcaaataaaaaatatagtatagcaactatttacatagcctttacattgtctaaggcattataaacactctagagactatttaaagtatataggaggatgtgcatataattttatgtcaagggcttgagcatccatggatttttggtatycacatggggcccagaacaaatctcctgtggatactgagggatgattctatttaatacatgtatttgaaattgaattccaaaggagaggggagatggtctgttttccttgwgttaaggttaattctttgggatcctaaattcattgagctgtttctttctacatataactaatttttgaaggttaaagagacagtgtaaaatcccaaagtggtgatcatcaatgatttttcaaactattagatgaaaagcttactgtggaatttatgatggatcagtctgtcctcactagtgatcagttttaacatcactaaaagtaggacaactagacattatgttcctgctgatgtgatgcaagaagaagtacacagcaccacctgggaagtattcttgccaagtaaattgaacttgaatctaatcagatctttggactaactatcagtttacaggaaatactagagatggaggaacatgttagatggcacatcaagcatattgttcaccaaatctagaatgtgaaaatttttttttaggacaaatggcccaatttcctcagttaataaatgacctttttaaaataaaaaaaaaaagttggggagggaaggaaactattgtagattaaatagacatatcagctgattacaacgcatagacttcattctgaagctgattcaaataaatcaaccataaaaagatattattgaggcaactggggaaaactgaccatggcttagcattagataatattaaggagttgctgttasttttgttagttataataaagatagagtctttggggttttttaaatgtccgtatgagttagagattcatactgaagtatttatggatgaaatgatatgacgtctgggatttatttaaaaatatgtaagaaaaacatgtcagggcttaaatgaaataagaatagcagatgttaatggttgttgaagctgggtaatggataaatggtgacctgtaatactattctctatattgtgtctttgaaaatttccatactatagtgttaagattatgctagagagttaatatccattttagtattaacaatagaaaactcagtattgtggggacaagactctttcaagggatcttcatggtcaaaactatttctataataattcttttgttttgttttgttttgttttgttttgttttgttttgtttgagacggagtcttgctctgtcgcccaggctggagtgcagtggcgtgatctcagctcactgcaacctccgcctcccgggttcaagcgattgtcctgcctcagccttccgagtagctgggactacagggatgtgccaccgcacctagctaattttttgtatttttagtacagatggggtttcaccgtgttggctgcgctggtcttgaattcctggcctcaagtgatcctcccacctcggcctcctaaagtgctgggattacaggcgtgagccactgcgcctggcccttctataataattctaagacattatctgcctttttcgttgtgttaacatttgcactgaaggcacaaaagcgctggtgagtagaactgctggtgccttagcatacattaagacagtgacactaaactgtactaatagccagtgtgttcttcactgccatgcactcacagtaagtaaataaataaatwaattaattaattaatttaaaaaattcagttttacttaactatgtcattgataaaatggtaaaactttgtttgttttggggtttctttggagacagaatctcactctgttgcccaggctggagttcagtgtcacgatcttggctcactgcagcctccacttcccgggttcaagcaattattgtgcctcagcctcctgagtatctgggattacaggcgggtaccaccacatgcagctaattttttgtatttttacagaaatacaaaaaacatacaagaaacctacaacatgtttcaccatgttgmccaggctggtttggaactcttgagctcaggcaatctgcccaccttggcctcccaaagtgctaggctgagccaccatgcctggccaaaaacttactgattttattgaatcttgacccttgaggaccctatttttaaatatttgctatgacaaaatgggaagtacacataaagcacttctgcacgccaaggtagggaaaatgcttatgccattgttcaagttgcaagctgatctagctacttttttcatagaacatcttgttttatttgaattaacaactgaaagataaattatggtttttcaaacttaaatatttggcagacatttttacaacaataaacgaagtgagcctcgtcacctcaaggaaaacatctgacagtacttgtaggcagtgaaaaaattcaagtattcaggtgamagttagaattttagaaaacttaktcagggcatggtggctcaagcctataatcccagcactttgggagaccaaggcgggcggatcacctgaggtcgggagtttgagaccaacctgaccaacatagagaaaccccatctctactaaaaattagctgggcgtggtggcgcatgcttgtaatgccagctactagggargctaaggcacaagaatcgcttgaacctgggaagcagaggttgtggtgagccgagatcgcgtcattgcactccagcctaggcaacgagtgaaactacatctcaaaaaaaaaaaaaaaagaattttagaaaacttgcatcttccatcataagcttgacagcttcccaataattaaagagttttctactgggtgtggtggcttacgcctgtaatcccagcactttgagagaccaaggtgggcggatcacctgaggtcgggagtttgagaccagcctagccaacatggtgaaacgctgtctctactaaaaataaaaatttagccaggtatggtagctcacgtctgtaatcccagctccttgggaggctgaggcaggagaatcgtttgaacctgggaggtggaggttgcagtgagccgagaacacgccactgtactccagcctgggtgacagagtgagactccatctcaaaaacaaacaaacaaataaaaacaggccaggcaaggtggctcatgcctgtaatccaagcactttgggaagcagaggcaagtggatcatgaggtcaggagatcaagaccatcctggctaacatggtggaaccccgtctctactaaaaatacaaaaaatttgccgggcgtggtggcacgcgcctgtatgtagtcccagttactcaggaggctgaggcaggagaattatttgaacctgggaggtggaggttgcagtgagccgagatcacaccactgcacttcagcctgggtgacagagcgagactccatctcaaaaaaaaaaaaaaaagactttcttgatgagatctgaagtgatgtaaataaataaggcttcctgatattgtataatgaaatgtatcaacatttgaaagacctgttatgaaatcatgcacaggcaaaggatccattcattcaaagtacaaaatacagtagtggatttttttttgtaggaaaatatacgtaacataaaatttaccattttaatgattttttttttttttttgagacagagtctcactctgtcaccaggctggagtgcagtggcatgaccttggctcactgcagcctccacctcctgggttcaagcaattctcctgcctcagcstcccaggtagctgggactacaggtgtgtgccaccacgcccagctaatttttgtattttttagtagagatggggtttcaccatgttggccaggatagtctcgatctcttgaccccgtgatccacctgccttggcctcccaaagtgctgggattacaggtgtgagccaccacgcccagcccattttaatgatttttaagtgtacagttcagtaacatgaagtacattcatactcataaccatcaccattatccacctccagaattttttcatcatccccaattgaaactctgtacccattaaacaataactccccacttcaccctccctccagcccctggtaactgctatcctactttctactttctgtctctatggatttgactattctaggtactagataagtgagagactaattgttctttttttttttttttaagttcattgatctagctttcaaattccacattgcaaccaatctttaagaaacaaccacttgttggattctgatgtagtaccaaagaaaaatatccacagttagctgaaaagtttgttaaaatactcttccttttacaactacatatctgtgtaaggttagattttcgttatatacttcaaccagcacgacatatcacgacagattgaatgcaaaaatcacatatgagaatcctgctgtcttctattcagtcagacattaaagatttgcaaagatgtaaatcagtgccactcttctcactaaattgttttggaaaacagttacctttttctaaaatattatttgcgttaacatataatagatatattatttgtgttaacatatgttatttgttaaatgaataaatattttaaaatttttgccgttctaattctaatacagtaaatattgataggtataatccactttggggtcttgaatacatagtaagagtgtaaagaggtcctgaaaccaaagactttggagtagggtataaaagcccagattggaagctctgacctggaaggacaacacagttctagtcctgactgccacgaacatgctgaatggccttaagaaatgacttaacttctcaacatcctgtacttcatctgtaaaatttatctgcctagcctatgtcatagagttgttaccagaaacaaattagagaacaaacagttgtaactaagatttaaaagaaaagttatattgggagagaaacgttgcttataaaatttggaattcaattagttgagccagtttgagttggttatattgcctataatcatgtaggtatttttttgttgttattatttttgtttgtttggttgggtttgtttttgtttttgtttttgttttgacagagtcttgctctgtctcccaggctggagtgcagtggcactatctcagctcactgcaagctccacctgccgggttcacgccattctcctgcctcagcctcccaagtagctgggactacaggcacctgccaccacgcccggctaatttttttgtatttttagtagagacggggtttcacagtgttcgccaggatggtcttgatctcctgacttcgtgatccgcccgcctcggcctccccaagtgctggcattacaggtgtgagccaccgcgcccggctggttggtttgttttgtttttgagacagagtctcgctctgtctctcagtctggagtgcagtggtgcaatcttggctcactgcaacctccgcctcccaggttcaagtgattctccctgccttgagcctcctgagtagctgggattacaggcacctgccaccaccatttgtttgttttattgagacagtctcactctgttgcccaggctggagtgcagtggcacaatctcggctcactgcaacctccacctcccaggttcaaggatcctcatgcatcagcctcccaagtagctgggactacaaggggcgtgtcgtcgcacccggctaatttctgtatttttagtagagacgaggtttcaccatgttggccaggctggtctcgaacccctgacctcaggcaatccatctgccttggcctcccgaagtgctgggattacaggcgtgagccactgtgcctggcctcaggtaggtgtttgttattaggccaggaaatgttctgttatcygagagagagtgtttagaaaaatggcttaaagaaaagagttctaagaattttagaaaatagacccaaacttaaaagggaatggagtttggaaggcagatagcaaatgggtgtgggaattaatagggaattatttgtacttgttttaaaactcagtggcctgtaggaaaatctgtttagagcaggatttgctttttcattattgaggtcatccttttatatttccaaaacatattgttcttggttttcaaacctcatttctggttctctggctgatttcaactccaagggcacaagagactatagtccccggcagatggcagttcgcgagaaggtgtttgacgtaatcatccgttgcttcaagcgccacggtgcagaagtcattgatacacctgtatttgaactaaaggtgaggaatgggcaagaagaaactacatggtagatgagtgggcatttgaataacaaagaagatgacaacaagagagtgagggtccaaagggcccactcctgttgtggacacagaccagtctttgctccaataagaagrgggacaagaatggcttggagggagaggccctgtcttttattatcttggttgtggccagcagattccaaaagagagccattctttggaatggtaattgttctgggtcctctctacattgtattgcgtggcatctgtacttggaatgttttctagattcatgcaaaccatacgtacataaatatgcaaccactctcctattgatggactctgaagttgttagtagttctttgctattaaaaactagattgcaactgggcacatctgtagttcctgcttctcaggaggctgaagcagaaagatcactggatccgaggagttcaaggctgtagtgtgctatgatggtgcctgtgaatagccaccatactccagtctgggcaatgtagcaagcccctgtctctaaaacaaaccagccaacccagattgcattactacctgcttcaaacccagtgattcccactgcacttatagtacaacccaaactctttactcaggtttacagagccctaggtgatctggccactgcctctcctacctcatctcatgctatttttcctcttgcccactatgctactctggtcttcttcctactcttggaacatagtcagtgtgtttgtacctccacacctttgttcttgctcttcccctttcctgaactccctttccttagctctttgcatgatttatttcagattatactagagactgcagattttaattcctttttaaaaaaaaaaaatacaaatagagacagaggtcttgctatgttgcccaggctgcttgcgaacgaacccctggcctcaagtggtcctccttcctcagcctcccaaagtgctgacattacaggcatgagccaccacgtccagccagccagattttaatttcagagctcagctaaaatgccactcctcaagtaatcttctccaactaccttctttaaagtagctgttctctctcttatcacaatgagctagtttattgcctttaggctataaaactgtctgaaattatctgttgtttccttcatcaatgtctctttttattgatatttaattgtacatatttatgagactgtttttacctactgtattagtttgctagggctaccataacaaagtaccatagactaggtagtctaaacaacagaaatttattttctcacagttccagaggctggaagttgacataacatgttggcaggcctagttctttctgaaggccataaggaaggatctgttccaggcctctctccatggcttgtagatggccatcatctccctttgttttttttttaattgagacagagtctcgctctgttgcctgggctggagtgcagtggcaccatctcatctcactgcaactccacctcccaggttcaagcgattctcctgcctcagtctcctaagtagctgggattacaacacgtgtgccaccacacctggctaatttttctatttttagtagagacgaggtttcaccatgttgaccaggttggtggtcttgaattcctggcctccagtgattcgcccaccccagcctcccaaagtgctggaattacaggcatgagccaccgcgcccagcctccctttgtctttacatcgtcttccctctgtccctatctaaattttctcttcttacaacaacatattggatcagagcccaacttggagacctcatgttagcttaatcatctctttaaagaccctatcaccaaatgtagacatgttcagaggttactgggagttaggacttaaacaaatgaattggggagggtggggccagggggacacagttcagcccgtaacactagtgtgttactgtttctgatactgcatactgggaagtttcaggctttttaatctttgccaacctggtaagtgaaatatgctattaccgatgatagacatcacagggcaaggactgctgtaatgcccttaagacattccccagtttttacttttgacattattcgaatctcaggcatcaaaaaacatttatgtttrttggtctgataacctattcctagtagtttatcatcaagaaaaatacttttttttaaaaaaaaaaagagctatatacctaaatattagatattgaaatgttatggggaatttttttttttttgagacagagtttcactctcgtcacccaggctggagtgcaatggtgcgatctctgctcactgcaccctctgcctcccgggttcaagcgattctcctgcctaagcctccgaatagctgggattagatgcctaccagctcccccagctaattttgtatttttagtagagacagggtttcaccatgttggccaggctggtcacgaactcctgacctcaggtgatccatccgccttggcctcccaaagtgctgggattacaggcgtgagccgctatgcctggcctaaaaaaatttttttttaaattagaataacctaaacacctaacagtataacatgagggaggaagtaagtacagagcttcttctcactggaatttatgcatcttttaaaaacacttcaggccgggcgctgtggctcgcacttgtaatcccagtactttgggaggctgaagcgggcagatcacgaggtcaagagatcgagactatcctggccaacatggtgaaaccctgtctctactaaaaatacaaaacttagccgggcatggtggcacccgcctgtagtcgcagccactctggaggctgaggcaggagaatctcttgaaccccggagtcagaggttgcagtgagccgagatcacgccactgcactccagcctggtgacagagcgagactccatttcaaaaaaaaaaaacaaacttcatgctgagaagtctgaagaaaaaaaagatttttaagaggaaaatgtgtaagaaaaatacttcagctctgttacaaaatcaaaatagaaaaaaacacaaaattggtgtttccttttaatgataactacatcagacacctaagaattgggataaagagcagagggaaatgtagacaagttggaatcagtcatgtttgttttcaaaacttccttttaaattgttatgtttattattatgaccacatttatttatgttttctccaggaaacactgatgggaaagtatggggaagactccaagcttatctatgacctgaaggaycagggcggggagctcctgtcccttcgctatgacctcactgtatctttctaaacttgggctcttgagactttggatggattggcactcacttggctcaggtttaagaatggtagagtaggtaggatcaaatatgaggcctttggcgattaggggaattatttctctaaaccaggagtggaactttggctaaacagagcatacacatccttagaaatcttctgaatcctgagtgagacctcagcttgatgtcagggcccagttccaactctacagtcatcccctggctccagaatacctctcccctgccctgtccagtgaacaaaattcttcttaatggactagcaacacatttcccttgtctccaagctacacagagaatcatctgcttagaaatcccatatgggggcctttttctggtcgcctttttctggtctgtggccaacctgcccagccccttgccatgctcaaaaaagtccagtcaacactacaaaagggaaaggtgccttaatcttttttgarccttcagctacctcatgtggtagcacagctgatgctttctgatgtttgtaagtgctattaatcttatgggtggcagttttacccacatagggaggggttagaccccagcttctgttggtgatgataatcaacttgcagacagtgataggaggggctttctccttaactctttgtcatcaggttccttttgctcggtatttggcaatgaataaactgaccaacattaaacgctaccacatagcaaaggtatatcggcgggataacccagccatgacccgtggccgataccgggaattctaccagtgtgtgagtgttgggaaaccgtggggcaggatgagttacttggggctctctcaagccagcagaatctattgagtactcacggtgtcctgagcaaattggatgacccagataatgctcttagggtttctatggtggtttttttgtttgttttttgtttttttgagacggagtctcgctctgttgcccaagctggagtgcagtggtgcagtcttggctcactgcaacctctgcctcctgggttcaaacgattcttctgcctcagccacctgagtagctgggattacaggcgcctgccactatgcccggctaattttttgtatttttagtagagacggggttttaccatgttggccaggctggtctcgaactcctggtctcatgatccgcctgcctcggcctcccaaagtgctgggattacaggcgtgagccaccgcacccagcctcttctatggtgttttcatgcagatttcacaaaatccctgtggtgggggaggagaataaagtctcttcattttacatatgagtaaacttgatacccagcccatgaagagatcatagggataagaaaggcaaagtcaggactagaactcttggtccagtgctctttattttaaaccacagtgataggatcacagcagagaataaggaaattagctttgatacatcaaatcatccagactgatgccagggcttctggatgaatagggaaaatggctaagcactaaagccatataatcaccccatccagtaggaggagttaagaagatgatgaagtagaaaatgaaggaatagcccagtagatggaaaggaaaccaaaactggtgagaagcccaaagatgccggggtttacctctgggctgatgatcagaaaatgaaagagaaattctatgcttgagtgcaaccaggccttcctagaggacagagctcccagagtccccccttcagaaaggtgaatccctgaagaccgctggctaaccctctccctgcaggattttgacattgctgggaactttgatcccatgatccctgatgcagagtgcctgaagatcatgtgygagatcctgagttcacttcagataggcgacttcctggtcaaggtcagagctgacaaggctgggagggcaaagttgggcctggcctctcayaagagaagatccttgtgcagagggaccagtagcctaagtgaccatgactattgcaggtcatgtaagaaaagagattcccccctcactatgcattggttccttgcaggtaaacgatcgacgcattctagatgggatgtttgctatctgtggtgtttctgayagcaagttccgtaccatctgctcctcagtagacaagctggacaaggtaacaacccaagtacttgacttyttttcccagatcccaccctgccttgggaaatggaaaacaagattgagagagagagaggtgcatgcctctatacccaccagaggaaggttagccccaggatgtaggctcatgggcagctactgctctaaaacggttccccgaggacagtacacacttgctctgtggtgcggaagctgcccaggggtccctgactggtgtctgtctgcctaggtgtcctgggaagaggtgaagaatgagatggtgggagagaagggccttgcaccwgaggtggctgaccgcattggggactatgtccagcaacatggtgaggaacagaaccaagcctccccagcagccgtcccactgccctcagtcctaaagttgaaactgttctgtgttatgtatgtaggggagtgagtgtgtctatgcatatgtacacacacatgcatgggcgactagagkccaggcaagaaggtcaaccctccttaccttttttgtttccttgtcagcctcactcacaagtctgtctccccaggtggggtatccctggtggaacagctgctccaggatcctaaactatcccaaaacaagcaggccttggagggcytgggagacctgaagttgctctttgagtacctgaccctatttggcattgatgacaaagtgagtcaagttggggacrggatcccttctgagctctggggcttcaggtccctgatcttaatctggcactgaccattttcttatctccacagatctcctttgacctgagccttgctcgagggctggattactacactggggtgatctatgaggcagtgctgctacagaccccagcccaggcaggggaagagcccctgggtgtgggcagtgtggctgctggaggacgctatgatgggctagtgggcatgttcgaccccaaagggcgcaaggtgccatgtgtggggctcagcattggggtggagcggattttctccatcgtggaacagagactagaggtaggtcctaggaggtaggtagaagatagtctgagcaggtggtggcacctaagctatctgatctccaagggagcaagtggtgctgctttgggcagggagcatctcacagaaatggagaaaagattattgctctttttcacagatttctaccccattatatgtaagttttatggatctttaatccataatctttctgcactcaatcctctgctctgggtctctacttccttcagggctgtcacaaacctgggctggtgtatccaagacttagatcttcctcatgatacggaatacttaacattttactgccttgtgccaggcactgtgcttggtgcttttcatgcattatcaaaatataattgttactacagccctgtgagagtagctaattttattaattgcattttccagatgagaacactgaagcattatagatcaaataatttgcttaaggccatgaaacttgtaagtggtagggtcagaatttgaatccaggcagtctgactccaaagtcttgccactaaccacactgcaatactgtctctaaatgggaagcatgtgtctgaggccctgggatccctcagatggctaccgtgactctctagcacctagagtaacaccaaggaagcctcttgtagcctcaagccctcctttgttgctgctggtcttaagtggctggttgcatttcatcttctgggaaatgctctggcaacctccccacagtcctatgccttttctctagggtggaaaccacccatttcccagttgagatcatttttccagtaggcatcttacattctaagaactatgaaaatagttttcctgaaaaagacaagggaagcagcagcagcattctcctttccccacacccatatacacgcctgtgccctgtaactgaagtgtgagaggcacagtgtcataaatgggtagatagtaagtggggactaaaactgtcaagggtgatctaattggggtgggctcatagtagtacttctgtgtgaatgctttggtggacccttaaggtactacatggaccagcctgggcaacatgatgagaccctgtctctacagattaaaaaaaaaaatttttttttttttttaaattagctgagtatggtggtgtgtgcctgtagtcaggaggctgaggtgggaggatcacttgagcttgggaggtcgaagctgcagtgatcacaccacggcacttcagcctggatgacagagaccctgtctcaaaaaaaaaaaaaaggtactacatggagataagcttgaagttactgtaaaaaagctacctttactcttgccctaagttatttattctgatacgtcctatgtacaagtcagtcagttcagtcctcatatctactaaaagctacctttatgcccaaggtgctagatgagaagacagggcccctgccctggtagagctgagttgggcctggtctcaaaatcccgactagagcctgctttgtttgctccttgaaggtgttagcccagctctcttttatctgccccttccccaggytttggaggagaagatacggaccacggagacacaggtgcttgtggcatctgcacagaagaagctgstagaggaaagactaaagcttgtctcagaactgtgggatgctgggatcaaggtatgggaggcaagccccagggtggcagcaaacttaggtgtgctggacacaaactgaataaaagctcacccataatggatcctgccattacttctcaaaagtagagctaagaacagrgtgccagcttggacaccctctgtccctgaggacagcagaagscagccttcatcttctgctcttgtcccctgcaggctgagctgctgtacaagaagaacccaaagctactgaaccagttacagtactgtgaggaggcaggcatcccactggtggctatcatcggcgagcaggaactcaaggatggggtcatcaagctccgttcagtgacgagcagggaagaggtgagggaggtgggcaggaaggctaagggacagagaatgtatgccattttggcaggcccatgcccattcaagacctgagaaaaagcctggcattgatattagtacaactcataaaagccttgagggcttaacctgttactgtggtcttagtagggtgagatctccatccctgcatataccttatggtttgttggctcccccaagaggcacactctagcctgaggtgtttaattaggttcctgctcccagctgagacaagcctgatgcctagagggctagaggaaactaggcactcggggagcagtggaatggaagatgcttataccaccttcttctcccatcctggccaggtggatgtccgaagagaagaccttgtggaggaaatcaaaaggagaacaggccagcccctctgcatctgctgaactgaacaaactatcagaggaaaggaagtgggactggcactatttgaggttaagacaaactgcatatgtacttcaattgctttgcacttttccgtttcagcggaagacctgaagagtggtcagaacagagcctttgatttttattatggttattttattgattattactggcaaaaacggccaggtacaacacctttttcatacaaggcccaggaggcttagtccagtctgtgctcctgggctacaaggacccagcctgagatggtcccatytgcagggccccgcaccagttggagcagatgcctccccmccaccaattgccaaaggtccaataaaatgcctcaaccmcggagtctgcgtgtgtcagtgatgcctagccccgccttccccagcagaccaatgtagggatggaaaagggagaaaaacagtaaacttgtgaccctgaggttcttgtctccagcgtccaccctgcggcttgggagctcctcctsgggaggcagcccccgtacatacgcacccgcgactttgcagctttcacctgaaggtctgagcgaagcccgggcggcgcacgtgcagtggatacctccacccccctgggaggcggggtcgcgctcagagccaatgagagcttgcggggtggaggggtagggaagcttccagaggccggtggggaggaagttataaagagggtacgagggggccagctggagagccatgcagtccaagcgggattgtgaggtaagcggctggcgacttgggggccggcgagccccgccggagcgggggtcggctttagggaccccagtaccacaggagaggtgggggcgcgcttggcgatccgccattccaaccttcctttccctctcagctgtggtgtgagagggtgaatccagagaacaaggcggcgctggaggcgtgggtcagggagacaggcatccgcctggtgcaggtgaacgggcagaggaagtatggcgggccacccccaggtacggtagtcccagcccctccgcctgtccggctacaccagccccctttgggggaggggctgctccgagccttcactgtcagaaactgcgaactacccggatttataccccccagcaaaggaggaactgtggctccacgtccacccgccccgtcgagggagggggccaatctcaaggtgtacctactctgtgccagcccccttgttagcgcagtcacctaattatgccaaccacccagggtacgggtgtaaacccatttcacagacctttgttcacatcgcctcccacccccgcgcgctgggtccgtgggctcagaattcgaaagcgtcgcctgacggtggccttgcataccctcttcccacaggctgggtgggcagcccgccgccagctgggtcagaggtgttcatcgggcggctgcctcaggacgtgtacgagcaccagcttatcccgctgttccagcgcgtgggccgcctctacgagttccgcctgatgatgaccttcagcggcctgaaccgcggcttcgcctatgcccgctacagctcgaggcgcggcgcgcaggccgccatcgccacgctgcacaaccayccgctgcggccgtcctgcccgctgctcgtgtgccgcagcaccgagaagtgtgagctgagcgttgacggcctgccgccgaatctgacccgcagcgcgctgctgctcgcgctgcagccgctgggtcccggcttgcaggaggcgcggctgctgcccagccccggaccggcgcccgggcagatcgctctgctcaaattcagctcgcaccgggccgctgccatggccaaaaaggccctggtggaaggtaggctggggcgggggtgctggttggggccaaacgcgttctgcccrgcactttatactgagcatagctgttaaagttacaagatcttagagtcaaacatgccagaatttgcaaccttttactatttgatctcagatttttaaaacttccaatggtgctaccaccaccgcttacctaaatttgtgacacttcccgagcattacctcctgacttaattctcaaccttcccccacccccacaccgcaaaataggcacaggaccctcaagctatgaggaaactgttagagaaattgatttgctcaagggaatccaactgagctttttactactatagaatctgtttcctcagactgttatgagaattaagtaacataatgggtgtacggtacttagcacactgactgacttacagcaagttttcccagtaaagattagccattatgatggttatgaggcagacaaagcctgcaattaaccagtacttctccaaggaaacttgtaaggtagcagtgtgttatactccctttgcaaataatggaggctgaaggcttcattgtcttttcttacccatggtcacactaccaggaaatgggaaggctacaaataacaggactgtgtagctccaaagggctcaccacctggaggcttgggcccagggtttagacctgcccttgtctttgcatttttcctacagggcagtcacacctctgtggagagcaggtggctgtggagtggctcaagccagacctgaagcagcgacttcgccagcagcttgtgggtcccttcttgcggtccccacagccagagggcagccagttggctttggcaagggacaagttagggttccaaggggctcgggctaccctgcagttgctgtgccaacgaatgaagctgggcagccctgtgttcctcaccaagtgtttgggcataggacctgctggctggcaccgcttctggtaccaggtggtgattcctgggcatccggtgcccttcagcggcctcatctgggttgtgctgaccctagatggccgggatgggcatgaggtggccaaggatgctgtgtctgtacggctgctgcaggcactcagtgagtctggggccaacctcctgtggtctgctggggctgaggcaggtaccatggttaaacagtgactccattctttctccacaggcaccctgaatgggcatgcagagcctgtgtcaggccccatcccagcaggcctgggtggccactttctgacccccaaaggtggggaggggcatgggcccaggcccatcagcctccctgctgggacagggacctatggcacctgggggcagcttaggtttgggttaagttgtggtgaggggccttgccctcccgctcccagcccagggtccaacctgacccagtgatcttccatggccgttccttgtcccacccccacccgatcataccttcccccctctgccacagcttagcatgaatcttctttattgtcctgatttgtcctctttgttggtttttatttgtggggaagggcagctgagccaaaggggtcagaaattctgccctttgcctccaccacatggcattctggttttggtttctgtatagttttgggtctttctatgctggttgtatttatattaaacccctggttagtatatacttgtgtctgtgctgtcttgccctagcttagagtttgtttacactggtagagtgaatagctgctacggggcaagtacttcctcacatcagtgctttgagtgcatcttcttgtgctgcactgtagggtattataaattcatatccaggccgggtgtgttggcttttgcctgtaatcccagcactttgggaggctgaggcgggtggatcacctgaggtcaggagttcgagaccagcctggccagcatggagaaaccccgtctctactgaaaatacaaaaattagcctggcatggtggcagacacctgtaatcccagctacttgggaggctgaggcaggagaattgcttgaacccgggaggcggaggttgcagtgagccaagatcacgccattgcactccagccctggcaacaagagcgaaaccctgtctcaaaaaaaaaaaaaaaaaaaatttcatatccagccaggcacagtggctcatgcctgtaatcccagcattttgggaggccaaggcaggaggatcacttgagcccaggagttccaagaccagcttggtcaacatagtgaaacccctggtctctaccaaaaaaaaatcacaaaaattagtcaagcatggtggcagatgcctgttaagtctcagctaccaggcaggctgaggtggatcacttgagcccaggaagtcaaggatgcagtgagccatgatcaacccactgtactccagcctgggtgacagagtgagaccttgtctcaaaaaatataaatttttttggccaggtgtggtggctcgtgcctgtaatcccagcactttgggaagcagaggcaggtggatcatttgagtccaggagttgaagaccagcctgggcaaaacagacccgtttctaccaaaaaaaaaaaacaaaaattggcctggtgtggtagtgcacacctgtagtcccagctgctccagaggctaaggtggaaggacaatctgagcctggggacattgaggctgcagtgagccaagatcaagccagcgcactccagcctggacgatggcaaaaccctgtcttttcaaaaaataattcatatcctctctggggatgcagcccaataagcaagactcttgcctggtgaggacccgtctcaagattcaattcattccttcagtcactgtcatccccagtctcctccttttcttcctgagccatggagtcttctccctcttccctcagtcctgcgaagaagtcatcggtgctccaagtcttgctgctcagagcccgcagtggtcctcccttttttttgcgccgacggtagtcatccaccaccacagctcgcagctgggccatgtcccaaaacttgaggcgctggtcatggccactactggccaggaagcggccacagtgggagagggccagctcctccacaggctccccagtgtgctggcccacactgcccaccactcggttcggtaggatgttcacagccctgggcagggaaagaacagtgttgagtactggctagctgggtctgcccttcctgtgacctaagggctgtccaggcttccctcacctgatgactccatcagtggagccagtacacagcagactctcggtgactggaaccatgcagtcgatagattcagctctcagggcaaagcggtcacttgtggccccaaagccattccaattgaagaggtagatggtaccttcactggagccacaggctaccttcttcccccactgcagggaaatagagaaaacaatgtggaagctgcctcagactaagcccccagcacacacccctccatcccaccataaccagctgtactttcatgagagtgacagaggtcaggtccccagactgaggttctgagagcagctcaaaccgacgcctcttaatgttgaagatgccaaggcagccatccccgctgtagagagtagagcagtaggcttagacgcaaggtctatttgaggaagacatttcacacagggaggggaggggaggcaaggcagctttgaagttgtacctggctgtcagcagcagctttttggctggatccagagccatgtctgcgatgtactcttcatgttgcctcatatccattaaggggccctccttccgctggtcccagagacggataccacctgtgtcatccccagtggccagaacattctcatccaccagcagaagactattgatgggggcactagagacacagatgtagaacttcttggagcatctctgtcccagtggggacctcctggtccttacccttcacctccatgcacatacacagaattggctgctctccttacccatgagccttggaaacacgtctttccagttggccctgctccacatctagaacatggatggctttgtccttggagacagtaatgagctctggggaaaaggtgcccaggtcatggtgctgctcactgctcccttccaccacattgctggttgtcttccccagtactcactctgcccatcttcagagaaggccacagctcggcaggccttgagatggtgacctgatgaccagagctccttggtttctccctcttggcaagagtaggaaaagctggggagagggcaaggagggtaaatgactccagacccagcctgggttgcattgagtgcagagaccaactagacagagcagccttcccacctacctaagagttcctgcttctacacctctaagcccaaaaagtttaccatctcatttctccattttcagtgagtttgaaatgttaggtcctgcttttttcaatatatgttagttcaaggtatatttgcgcaagatttctttgtgatcccacccaacccctctttatcatctttgaaagccccagcctggacaaagattgggtctggaccactgtggaggagatatttgttacatcaatgacaaaagaccagccccagaagttagaaatctaaaaatcagtaaggtagagcaggctcttgcacttcaggtctgcaggagctagagaaagccacaattaattacagtacattgagagtacgtgctgaaaaagaggcaagatcaaaatggaggtgggggagaggcaccagcctgtaaacaactttgaggtgagtactgtttatggaatacccccaagtgcctgcctcagagcagatcctcaaaaagggcagaatgaatacatgcttaattgccagtgagttccaggtaggcagaactgagcctgctcattttctctatcccagtgctgaacgtgaaaaagtagcttaataaacattcacaaattgaatgaatacttgggaagggagaagagagccctggaaagctaaggtggtgacatgtgggttggatcatacaagagtagaatttgcctggcagagagcaagggccagatactggaggcagcagagataaggaatgaggagggttccttgtagcaggagagtagcatgactgaatctagaaagatgggctggggtgggcatgagaccacatgagccaagcagaagtttgaatttaatcctcggaaaaggaaccttttcacaatagtcatggctgagggtggggaaggggagaaccaagaattttcctccagaaccttttttaagacaagggaagcaacaaagttgtgtggaatgtgaagaaaggtggatgtctagggcaactcccaagtgcctggcaccataaatatggatagtagtagaagggaacctacatttgttgaagagctgcttaggtgctgtactgcaaacttgtcccctctgcaagggtaggtataattccccctttcaaagatgaaaatacagaagttaacacgctcaaggccattacagctaatgaggggttgaggtttaaattcattaagtaaatctgataagcataacatcttcaacttttccactgcctctaacctgtatcttttgttcaaaatcaaacatgtgttgagcatctaccctagactagaggttggagataaaatagagaacaaaaccgatgacagattacactccagaacagtgttttttcacattctagtcatataacggactagtaagctacgatcagcattttgtgtacatgtacacaataatagaataaaatcagcaattgtatcacagagcatcatatataatgtaaaaggtatttctctgtgaggcaaggtcaaagacgtttgaaaaacattagtgaaggagacagcattcaaataattacacaaatggacatatggttaccaaccattcattattaagggaaaggtaccatggcacctggtgccatggcagcatctaacaggtaaccaattttagtctggggagagaggaagagggaagagatcctggaaactcagagatagtaggtaaaagtgaggggaaaggagttttccggacagaatagcacatgcaaatgggctgaggtttcgagatttttttttgagatggagttttgctcttgttgcccaggctggagtgcaatggcacgatctcggctcactgccacctccacctcccaggttcaagcgattctcctgcctcagcctcccgagaagctgggattacaggtgcccgccaccacacccagctaatttttctatttttagtagagacaggatttcaccatgttggccaggctggtctccaactcctgacctcaggtgataccccaccttggtctcccaaagtgctgggattacaggcatgagccaccacgcccggcccaagacgtatttttaaaaggtatggatgaatgagcacagatggtcagggcgttgaaggcaggattgagaaatttgtactaaatcctaaaagcagaccattgaagggttttaatcaagggagtgtctcactctattgtccaagctggagtgcagtggcacgatcttggctcactgcaacctccaccgcccgaatccaagtgattcttctgcctcagcctcccgtgtagctgggattacaggcccgcgccaccacaccgggctaatttttgtatttttagtagagacggggtttcaccatgttgaacaggctggtctcgagctccaacctcaggtgacccgcccacctcggcctcccaaagtgcgggtattacaggcgtgagccaagatttgtggtttgaaaaatcacttaaaggggcctgctgagcctgtctcgggcacaatataataatccggtaggagtccgggcacggtggtttacgcctgtaatcccagcactctgggaggaaggcaggtggatcacgaggtcaggagttcaagaccagcctggccaagatggtgaaaccccgtctctactacaaatacaaaaaaaattagccgggcgtggtggcgggcgcttataatcccagctactcgggaggct

SEQ ID NO: 93909 - DNA, 21287 bp, Homo sapiens
  misc_feature (1)...(21287): n = A,T,C or G
ttcttgtgtctggcattttggggaggtgctgacatgagaatctggagaaatggtcagggggagtgaaggtgtatgtgtgaatttggccagctagtgatctccattttcccagtatttttgaagacaytggggattacgtaccctccacaaccaagacacctcgggacaaggagcgggagagatatcgggaacgggagcgtgatcgggaaagagacagagaccgtgaccgagagcgagagcgagaacgagatcgggaacgagagcgagagcgggaccgagagagagaagaggaaaagaagagacacagctactttgagaagccaaaagtagatgatgaggtgagatgtgggcccttagtaccaggtgatggagttgcccctctctggaaatgtgagcaaggttgggtaaggaattgtttcaaacttgggggagggatgagtaggaatctctcatggtaacactaacttcacattttgtgttctttccagcccatggacgttgacaaaggtgagttgtacacacagcatctcacagttgctctagcagtcctgctttcccctggtagggctcagagctggcaacggtgggattgggggacctcctggttctgggttcttgtaagaactgtgtcttgctttattgaataggtggagttccctccaccttcctgggccatggcagggcatatttgctcttagatataattcctgtggccctggggttctgaggaggtgaggtagaggtcaagtatggaatgttctggataccctaccctcatctcaaccagagtgactcattaattggagtttgtttaaaactttgttagacaaaagggttctatgccttaaaaatgttttttaagtgtgttgtggggaggaggttgtgagagcctcagttcaagrtctgggctgagttctcttttctcctaggacctgggtctaccaaggagttgatcaagtccatcaatgaaaagtttgctgggtctgctggctgggaaggcacagaatcatatcctttattttaatacgttcctgggttccagagaactggtctctttactccaaccccccctgcctccctgctccctcctaccctgcccctctccttcccttttacgctgaattttgacagaatgaaaccatcccttgttccttcccagagcacccataacagctcacagcccactcagaattttcatgttggggcttctagcccttggccccctcctggctgaagctttacagcaataggtagaatcctgtgtagtgttttctttaacatagcatatgctgaagaagccagaagacaaaaagcagctgggagatttctttggcatgtccaacagttatgcagagtgctacccagccacgtatgtgaaacctggttaaggaagggaggctgggatgattgggaaacaagttgggggtgaaatggaaatttgattcgctaagtcccagggctacttcttttttttttttttttttttttggagacagagtctcactctgtcacccaggctggaatgcaatggtataatctctgctcgctgcaatctccatctcccgggttcaagcgattctcctgcctcaccctcccaagtagctgggattataggcatgcatcaccacacctggctagtttttgtatttttagtagagatgaggtttcaccatgttggtgaggctggtcttgaactcctgacctcaggtaatctgccctcctcagcctccaaaagtgcggggattacaggagtgagccactgcgcctggcccaaggctacttcttacttggatgaactattttattaggctctaagtgggaggtctagggggtggtcattcctatgcagataacctcttagtcgggtaggtttccagatgaagcatagggtcagggtatgcaacatctgtttaactcttgcttctccttaggatggatgacatggctgtggatagtgatgaggaggtggattatagcaaaatggaccaggtatgtagttagaaggatggtgggcgcctttgggcagttattatttgttttacatgtatctccttccccactcctaaaaaatctatctcatttactgggccccaccctcctttrgctgcagcagtagaaacagcagcattgagggtcatgagcagcttaactatttcagagtctttgcacaagatcaaatgacatagggtcaaaaatctattttttacttcctatagcaaagtgccaggctttgattcccatggtaggcagtaagcaagcatcaatgcataagtagaaagggcagaaaaaattgcagtctttggaaaataactaaattttattctagccaggattgaagttttcctctaagtcttaagcaaaattaaaaagaaaaaaaccactaatgccactaatagtgaagaagtctgtgttcttcccctgagttcactgtattgaaatagcatggtttaatcttggagccttgtttaatcctgcctctactgtttattagttttgtgaacttgccaagctctttcactgtttatgcctcagtttcctcatcaggaaaatggagagaaatatagttccctcttcatagattttatgagaattaagtgagatatgcatttagtgtacagaataatgcctgtcacatagtaagtatgtaataagcatttattattacttatcagggtatgatttatgaattgtggaacctgggattatgggagagtctggcttcaatcaagggctgaaattccatttccactgacatctcttccttccccatcccccrattctgtcctgcaacagggtaacaagaaggggcccttaggccgttgggactttgatacccaggaagaatacagcgagtatatgaacaacaaagaagctttgcccaagtgagtcggtactgaatatgggcagggtgtgaggaggggtgtggggatttggtggaatagtgcatataaggttagagggtgtggtctggctgagatgttccccactaagttctttgcccacaggactctgggaaaacctcgccactgctatgcaatctctgatgcattctttcccaactgcttttttcagggctgcattccagtatggtatcaaaatgtctgaagggcggaaaaccaggcgcttcaaggaaaccaatgacaaagcagagcttgatcgccagtggaagaagattagygcagtaagtaggatggccccttgggtgggagggtttcagctgggagaagacattagcctgcagattcaggaacaggcaaggggctggagagccatggaaatgagaggtcagccttgggcctcaggtgagcttagatgggcagcttggtgatagactatcctgttgtttttgcagatcattgagaagaggaagaagatggaagctgatgggtgagcggcattattcttcctctgtgggactggtgggaattgcttagtgtattgatcttatactgacccatttctccttccattgcagggttgaagtcaaaagaccaaaatactaatcactagttacaaccagagatgctccacaaggatatgctccccactgttttctttctacaatttccaaaggttgcaagatgtttttttgtggatgaatataaaattttattgtgtaattacttggttccattaaaattggttaacttgctattttctttgttgagcatgtcccctccagtgcccttgaagcaccaagaacactaattccactggttgtgtaaaatcacatgcagaaagtcatcagtcctttcctgagctgtggttctagattcctagacagtaaggatgctctctagccagtgtgcccagtagagaagagaataatgatcctcactgatgggcaagaggtggatagaggaatgtaagtatgattggtctcaaatgtcagactcattccggcccatcttcaggcctagtccctggggaaagatttcctggggattgctgtcagcctgatgggctgctaatctgatctccaggctatgaaggactgggctctggatgaaggcatctaatgaaaatcacttatgggtgggaaccaaaaccttttatgagtttatgtactatgagctttattaatgttgagtacaaatcactgtctccttggctaaaggtgtaaccttagggaagtgctttgggtttagagctgatatagtgtggccctgcaggtacaggaattcctatcctagaccagaagggtttggtgcccttcatcaccctgaaacatttgccaaggcccagaataggtctgttgacctttgaatcacaccattcccttcccttttcttcccttctgctcattaccagcactttggcctggtgctcatcattaggtgtcactactgcttcctggctggatgccacgctgccactgtctaccctgagcccaagatttgtggcctcaccagatccaagaaagctagaaagtcaccttagccattaccttgtctttgattatattcaccttggtaggacaggtttttgtgaggaagccagtattgtgcatggcatgtaagaggctgaaattgggccttgctgcaatagcacctagaatggctaatttcagacaaatgacaccatggttctatggatgtaggtaggcagtcccaattattaaaaatggtcacagagacatggcacaggtgaagacatctggagagtcactaaaagcaagacctggagattgtgggtttgaaattcagtttctgaggccaggctcgatggctcatgcccacagtctcagtgctttgggaggccaaagcaggagagtctcttgaggccaggagttcatgagtctatagctatgcaggaggatcgaaccgaagagttcaaggctgtagtgagctatgatcacaccactgcattctgagcctgggtgacagagcaagaccttgatttaaaaaaagaaattcaggggctgggcgccgtggctcacgcctataatcctagcactttgggaggctgaggtgggaagacacgtcaagagttcaaggccagcctgggcaacatactgagtcctcgtttctacaaaatatacaaaaattggccaggtgcggtggctcacgcctgtagtcccagcactttgggaggccaaggcgggcggatcacgaggtcaggagtttgagaccagcctggccaacatggtgaaaccctgtttctactaaagatacaaaaaattagctgggcgtggtggcatgcgcctctagtcccatctactcggtaggctgaggcaggaaaatctcttgaacccgggagacggaggttgcagtgagccgagatcgcaccattgcactccagccagggcgagactccgtctcaataaataaataaaaattagccaggcgtggtgccgcgtgcctgtagttccagctactcggaggatcgcttgagccgagcggtgatcgtgccactgcactccagcctgcgcgacagcgcaagaccctgtctcaaaacaaagcaaaacaaaaaagaaaaaaaaattcttggtaactgagcactgcttgtccagcccattgagtttctgtagacaaattgtaggaactggcacagcaaactggccacaaagacgttaggggcgtggacaccagctgcttgagctgcctgctgtcccagactcccgtatgtcatcgcgcagcgtgggattttgcggcttcctgacagcccaggctgtcgcttgacttgatcttgggtttcaccaagccacgaaggactagcgtccctstctcctatcccaagggcattaagcctgtctggatgaagtaggagaggaaagatttacacgcagttctcaactttacrtgacgtgactagggagggaattgacggtcgcaccgtctacctagcccaaacggggtcacagcaggacaaggaagtagccgatctcccagatgcggtctcttcgctccgctccacccgcaccagcagcggcccacccacctctcctgtaagaggaagaacgtcccggagayacttccggccccgccccccgaggcggaagcggagtgccaggctactcctcccgcagtgtgggtggttccgaggctgactaccctgmggcggcgcggytcgcagtccttctcagcatggaccgcacttgtgaggagaggcccgctgaggatgggagcgacgaggaggacccagactccatggaagccccaacccggatccgggacactccggaagacatcgtgctggaagctccggctagtgggctggcgttccatccggccygtgacctactggctgcaggggacgtggacggggacgtgttcgtgtgagagcggggcagggccggggcgccgggtctggaagcttcccgggggtggacctgggaacaggagagatgagagaaagtkgcagggagacaaattttgcaagattctttgggtccartttattcagtaacattcggctcttctatcacaccaatctgttgaaagaactggaatgtcgtgacagagcccagataccgtagtaggccaaaaagccctttaaggccttgttatttcccaccgattattatttatttacttacctatttatttttgagacggagtctcgctctgtcgccgaggctggagtgcagtggcgcgatctgggctcactgcaacctcccccttccgggttcaagcagttctcttcctcagcctcccgagtagctgggattataagcgcccgccaccacgcccggctaattttttttgtatttgtagtagagacggggtttcaccatcttggccaggctggtcttgaactcctgacctcgtgatccacctgccttcctcccagagtgctgggattacaggcgtaaaccaccgtgcccggactcctaccggattattatattgtgcccgagacaggctcagcaggcccctttaagtgatttttcaaaccacaaatcttggctcacgcctgtaatacccgcactttgggaggccgaggtgggcgggtcacctgaggttggagctcgagaccagcctgttcaacatggtgaaaccccgtctctactaaaaatacaaaaattagcccggtgtggtggcgcgggcctgtaatcccagctacacgggaggctgaggcagaagaatcacttggattcgggcggtggaggttgcagtgagccaagatcgtgccactgcactccagcttggacaatagagtgagacactcccttgattaaaacccttcaatggtctgcttttaggatttagtacaaatttctcaatcctgccttcaacgccctgaccatctgtgctcattcatccataccttttaaaaatacgtcttgggccgggcgtggtggctcatgcctgtaatcccagcactttgggagaccaaggtggggtatcacctgaggtcaggagttggagaccagcctggccaacatggtgaaatcctgtctctactaaaaatagaaaaattagctgggtgtggtggcgggcacctgtaatcccagcttctcgggaggctgaggcaggagaatcgcttgaacctgggaggtggaggtggcagtgagccgagatcgtgccattgcactccagcctgggcaacaagagcaaaactccatctcaaaaaaaaatctcgaaacctcagcccatttgcatgtgctattctgtccggaaaactcctttcccctcacttttacctactatctctgagtttccaggatctcttccctcttcctctctccccagactaaaattggttacctgttagatgctgccatggcaccaggtgccatggtacctttcccttaataatgaatggttggtaaccatatgtccatttgtgtaattatttgaatgctgtctccttcactaatgtttttcaaacgtctttgaccttgcctcacagagaaataccttttacattatatatgatgctctgtgatacaattgctgattttattctattattgtgtacatgtacacaaaatgctgatcgtagcttactagtccgttatatgactagaatgtgaaaaaacactgttctggagtgtaatctgtcatcggttttgttctctrttttatctccaacctctagtctagggtagatgctcaacacatgtttgattttgaacaaaagatacaggttagaggcagtggaaaagttgaagatgttatgcttatcagatttacttaatgaatttaaacctcaacccctcattagctgtaatggccttgagcgtgttaacttctgtattttcatctttgaaagggggaattatacctacccttgcagaggggacaagtttgcagtacagcacctaagcagctcttcaacaaatgtaggttcccttctactactatccatatttatggtgccaggcacttgggagttgccctagacatccacctttcttcacattccacacaactttgttgcttcccttgtcttaaaaaaggttctggaggaaaattcttggttctccccttccccaccctcagccatgactattgtgaaaaggttccttttccgaggattaaattcaaacttctgcttggctcatgtggtctcatgcccacccyagcccatctttctagattcagtcatgctactctcctgctacaaggaaccctcctcattccttatctctgctscctccagtatctggcccttgctctctgccaggcaaattctactcttgtatgatccaacccacatgtcaccaccttagctttccagggctctcttctcccttcccaagtattcattcaatttgtgaatgtttattaagctactttttcacgttcagcactgggatagagaaaatgagcaggctcagttctgcctacctggaactcactggcaattaagcatgtattcattctgccctttttgaggatctgctctgaggcaggcacttgggggtattccrtaaacagtactcacctcaaagttgtttacaggctggtgcctctcccccacctccattttgatcttgcctctttttcagcacgtactctcaatgtactgtaattaattgtggctttctctagctcctgcagacctgaagtgcaagagcctgctctaccttactgatttttagatttctaacttctggggctggtcttttgtcattgatgtaacaaatatctcctccacagtggtccagacccaatctttgtccaggctggggctttcaaagatgataaagaggggttgggtgggatcacaaagaaatcttgngcaaatataccttgaactaacatatattgaaaaaagcaggacctaacatttcaaactcactgaaaatggagaaatgagatggtaaactttttgggcttagaggtgtagaagcaggaactcttaggtaggtgggaaggctgctctgtctagttggtytctgcactcaatgcaacccaggctgggtctggagtcatttaccctccttgccctctccccagcttttcctactcttgccaagagggagaaaccaaggagctctggtcatcaggtcaccatctcaaggcctgccgagctgtggccttctctgaagatgggcagagtgagtactggggaagacaaccagcaatgtggtggaagggagcagtgagcagcaccatgacctgrgcaccttttccccagagctcattactgtctccaaggacaaagccatccatgttctagatgtggagcagggccaactggaaagacgtgtttccaaggctcatgggtaaggagagcagccaattctgtgtatgtgcatggaggtgaagggtaaggaccaggaggtccccactgggacagagatgctccaagaagttctacatctgtgtctctagtgcccccatcaayagtcttctgctggtggatgagaatgttctggccactggggatgacacaggtggtatcygtctctgggaccagcggaaggagggccccttaatggatatgaggcaacatgaagagtacatcgcagacatggctctggatccagccaaaaagctgctgctgacagccaggtacaacttcaaagctgccttgcctccyctcccctccctgtgtgaaatgtcttcctcaaatagaccttgcgtctaagcctactgctctactctctacagcggggatggctgccttggcatcttcaacattaagaggcgtcggtttgagctgctctcagaacctcagtytggggacctgacctctgtcactctcatgaaagtacagctggttatggtgggatggaggggtgtgtgctgggggcttagtctgaggcagcttccacattgttttctctatttccctgcagtgggggaagaaggtagcctgtggctccagtgaaggtaccatctrcctcttcaattggaatggctttggggccacaagtgaccgctttgccctgagagctgaatctatcgactgcatggttccagtcacmgagagtctgctgtgtactggctccactgatggagtcatcaggtgagggaagcctggacagcccttaggtcacaggaagggcagacccagctagccagtactcaacactgttctttccctgcccagggctgtgaacatcctaccgaaccgagtggtgggcagtgtgggccagcacactggggagcctgtggaggagctggccctctcccactgtggccgcttcctggccagtagtggccatgaccagcgcctcaagttttgggacatggcccagctgcgagctgtggtggtggatgactaccgtcggcgcaaaaaaaagggaggaccactgcgggctctgagcagcaagacttggagcaccgatgacttyttcgcaggactgagrgaagagggagaagactccatggctcaggaagaaaaggaggagactggggatgacagtgactgaaggaatgaattgaatcttgagaygggtcctcaccaggcaagagtcttgcttattgggctgcatccccagagaggatatgaattattttttgaaaagacagggttttgccatcgtccaggctggagtgcgctggcttgatcttggctcactgcagcctcaatgtccccaggctcagattgtccttccaccttagcctctggagcagctgggactacaggtgtgcactaccacaccaggccaatttttgttttttttttttggtagaaacgggtctgttttgcccaggctggtcttcaactcctggactcaaatgatccacctgcctctgcttcccaaagtgctgggattacaggcacgagccaccacacctggccaaaaaaatttatattttttgagacaaggtctcactctgtcacccaggctggagtacagtgggttgatcatggctcactgcatccttgacttcctgggctcaagtgatccacctcagcctgcctggtagctgagacttaacaggcatctgccaccatgcttgactaatttttgtgatttttttttggtagagaccaggggtttcactatgttgaccaagctggtcttggaactcctgggctcaagtgatcctcctgccttggcctcccaaaatgctgggattacaggcatgagccactgtgcctggctggatatgaaattttttttttttttttttttgagacagggtttcgctcttgttgccagggctggagtgcaatggcgtgatcttggctcactgcaacctccgcctcccgggttcaagcaattctcctgcctcagcctcccaagtagctgggattacaggtgtctgccaccatgccaggctaatttttgtattttcagtagagacggggtttctccatgctggccaggctggtctcgaactcctgacctcaggtgatccacccgcctcagcctcccaaagtgctgggattacaggcaaaagccaacacacccggcctggatatgaatttataataccctacagtgcarcacaagaagatgcactcaaagcactgatgtgaggaagtacttgccccgtagcagctattcactctaccagtgtaaacaaactctaagctagggcaagacagcacagacacaagtatatactaaccaggggtttaatataaatacaaccagcatagaaagacccaaaactatacagaaaccaaaaccagaatgccatgtggtggaggcaaagggcagaatttctgacccctttggctcagctgcccttccccacaaataaaaaccaacaaagaggacaaatcaggacaataaagaagattcatgctaagctgtggcagaggggggaaggtatgatcgggtggsggtgggacaaggaayggccatggaagatmactgggtcaggttggaccctgggctgggagcgggagggcaaggcccctcaccacaacttaacccaaacctaagctgcccccaggtgccataggtccctgtcccagcagggaggctgatgggcctgggcccatgcccctccccacctttgggggtcagaaagtggccacccaggcctgctgggatggggcctgacacaggctctgcatgcccattcagggtgcctgtggagaaagaatggagtcactgtttaaccatggtacctgcctcagccccagcagaccacaggaggttggccccagactcactgagtgcctgcagcagccgtacagacacagcatccttggccacctcatgcccatcccggccatctagggtcagcacaacccagatgaggccgctgaagggcaccggatgcccaggaatcaccacctggtaccagaagcggtgccagccagcaggtcctatgcccaaacacttggtgaggaacacagggctgcccagcttcattcgttggcacagcaactgcagggtagcccgagccccttggaaccctaacttgtcccttgccaaagccaactggctgccctctggctgtggggaccgcaagaagggacccacaagctgctggcgaagtcgctgcttcaggtctggcttgagccactccacagccacctgctctccacagaggtgtgactgccctgtaggaaaaatgcaaagacaagggcaggtctaaaccctgggcccaagcctccaggtggtgagccctttggagctacacagtcctgttatttgtagccttcccatttcctggtagtgtgaccatgggtaagaaaagacaatgaagccttcagcctccattatttgcaaagggagtataacacactgctaccttacaagtttccttggagaagtactggttaattgcaggctttgtctgcctcataaccatcataatggctaatctttactgggaaaacttgctgtaagtcagtcagtgtgctaagtaccgtacacccattatgttacttaattctcataacagtctgaggaaacagattctatagtagtaaaaagctcagttggattcccttgagcaaatcaatttctctaacagtttcctcatagcttgagggtcctgtgcctattttgcggtgtgggggtgggggaaggttgagaattaagtcaggaggtaatgctcgggaagtgtcacaaatttaggtaagcggtggtggtagcaccattggaagttttaaaaatctgagatcaaatagtaaaaggttgcaaattctggcatgtttgactctaagatcttgtaactttaacagctatgctcagtataaagtgcygggcagaacgcgtttggccccaaccagcacccccgccccagcctaccttccaccagggcctttttggccatggcagcggcccggtgcgagctgaatttgagcagagcgatctgcccgggcgccggtccggggctgggcagcagccgcgcctcctgcaagccgggacccagcggctgcagcgcgagcagcagcgcgctgcgggtcagattcggcggcaggccgtcaacgctcagctcacacttctcggtgctgcggcacacgagcagcgggcaggacggccgcagcggrtggttgtgcagcgtggcgatggcggcctgcgcgccgcgcctcgagctgtagcgggcataggcgaagccgcggttcaggccgctgaaggtcatcatcaggcggaactcgtagaggcggcccacgcgctggaacagcgggataagctggtgctcgtacacgtcctgaggcagccgcccgatgaacacctctgacccagctggcggcgggctgcccacccagcctgtgggaagagggtatgcaaggccaccgtcaggcgacgctttcgaattctgagcccacggacccagcgcgcgggggtgggaggcgatgtgaacaaaggtctgtgaaatgggtttacacccgtaccctgggtggttggcataattaggtgactgcgctaacaagggggctggcacagagtaggtacaccttgagattggccccctccctcgacggggcgggtggacgtggagccacagttcctcctttgctggggggtataaatccgggtagttcgcagtttctgacagtgaaggctcggagcagcccctcccccaaagggggctggtgtagccggacaggcggaggggctgggactaccgtacctgggggtggcccgccatacttcctctgcccgttcacctgcaccaggcggatgcctgtctccctgacccacgcctccagcgccgccttgttctctggattcaccctctcacaccacagctgagagggaaaggaaggttggaatggcggatcgccaagcgcgcccccacctctcctgtggtactggggtccctaaagccgacccccgctccggcggggctcgccggcccccaagtcgccagccgcttacctcacaatcccgcttggactgcatggctctccagctggccccctcgtaccctctttataacttcctccccaccggcctctggaagcttccctacccctccaccccgcaagctctcattggctctgagcgcgaccccgcctcccaggggggtggaggtatccactgcacgtgcgccgcccgggcttcgctcagaccttcaggtgaaagctgcaaagtcgcgggtgcgtatgtacgggggctgcctcccsaggaggagctcccaagccgcagggtggacgctggagacaagaacctcagggtcacaagtttactgtttttctcccttttccatccctacattggtctgctggggaaggcggggctaggcatcactgacacacgcagactccgkggttgaggcattttattggacctttggcaattggtggkggggaggcatctgctccaactggtgcggggccctgcaratgggaccatctcaggctgggtccttgtagcccaggagcacagactggactaagcctcctgggccttgtatgaaaaaggtgttgtacctggccgtttttgccagtaataatcaataaaataaccataataaaaatcaaaggctctgttctgaccactcttcaggtcttccgctgaaacggaaaagtgcaaagcaattgaagtacatatgcagtttgtcttaacctcaaatagtgccagtcccacttcctttcctctgatagtttgttcagttcagcagatgcagaggggctggcctgttctccttttgatttcctccacaaggtcttctcttcggacatccacctggccaggatgggagaagaaggtggtataagcatcttccattccactgctccccgagtgcctagtttcctctagccctctaggcatcaggcttgtctcagctgggagcaggaacctaattaaacacctcaggctagagtgtgcctcttgggggagccaacaaaccataaggtatatgcagggatggagatctcaccctactaagaccacagtaacaggttaagccctcaaggcttttatgagttgtactaatatcaatgccaggctttttctcaggtcttgaatgggcatgggcctgccaaaatggcatacattctctgtcccttagccttcctgcccacctccctcacctcttccctgctcgtcactgaacggagcttgatgaccccatccttgagttcctgctcgccgatgatagccaccagtgggatgcctgcctcctcacagtactgtaactggttcagtagctttgggttcttcttgtacagcagctcagcctgcaggggacaagagcagaagatgaaggctggcttctgctgtcctcagggacagagggtgtccaagctggcaccctgttcttagctctacttttgagaagtaatggcaggatccattatgggtgagcttttattcagtttgtgtccagcacacctaagtttgctgccaccctggggcttgcctcccataccttgatcccagcatcccacagttctgagacaagctttagtctttcctctascagcttcttctgtgcagatgccacaagcacctgtgtctccgtggtccgtatcttctcctccaaarcctggggaaggggcagataaaagagagctgggctaacaccttcaaggagcaaacaaagcaggctctagtcgggattttgagaccaggcccaactcagctctaccagggcaggggccctgtcttctcatctagcaccttgggcataaaggtagcttttagtagatatgaggactgaactgactgacttgtacataggacgtatcagaataaataacttagggcaagagtaaaggtagcttttttacagtaacttcaagcttatctccatgtagtaccttttttttttttttgagacagggtctctgtcatccaggctgaagtgccgtggtgtgatcactgcagcttcgacctcccaagctcaagtgatcctcccacctcagcctcctgactacaggcacacaccaccatactcagctaatttaaaaaaaaaaaaaaatttttttttttaatctgtagagacagggtctcatcatgttgcccaggctggtccatgtagtaccttaagggtccaccaaagcattcacacagaagtactactatgagcccaccccaattagatcacccttgacagttttagtccccacttactatctacccatttatgacactgtgcctctcacacttcagttacagggcacaggcgtgtatatgggtgtggggaaaggagaatgctgctgctgcttcccttgtctttttcaggaaaactattttcatagttcttagaatgtaagatgcctactggaaaaatgatctcaactgggaaatgggtggtttccaccctagagaaaaggcataggactgtggggaggttgccagagcatttcccagaagatgaaatgcaaccagccacttaagaccagcagcaacaaaggagggcttgaggctacaagaggcttccttggtgttactctaggtgctagagagtcacggtagccatctgagggatcccagggcctcagacacatgcttcccatttagagacagtattgcagtgtggttagtggcaagactttggagtcagactgcctggattcaaattctgaccctaccacttacaagtttcatggccttaagcaaattatttgatctataatgcttcagtgttctcatctggaaaatgcaattaataaaattagctactctcacagggctgtagtaacaattatattttgataatgcatgaaaagcaccaagcacagtgcctggcacaaggcagtaaaatgttaagtattccgtatcatgaggaagatctaagtcttggatacaccagcccaggtttgtgacagccctgaaggaagtagagacccagagcagaggattgagtgcagaaagattatggattaaagatccataaaacttacatataatggggtagaaatctgtgaaaaagagcaataatcttttctccatttctgtgagatgctccctgcccaaagcagcaccacttgctcccttggagatcagatagcttaggtgccaccacctgctcagactatcttctacctacctcctaggacctacctctagtctctgttccacgatggagaaaatccgctccaccccaatgctgagccccacacatggcaccttgcgccctttggggtcgaacatgcccactagcccatcatagcgtcctccagcagccacactgcccacacccaggggctcttcccctgcctgggctggggtctgtagcagcactgcctcatagatcaccccagtgtagtaatccagccctcgagcaaggctcaggtcaaaggagatctgtggagataagaaaatggtcagtgccagattaagatcagggacctgaagccccagagctcagaagggatccygtccccaacttgactcactttgtcatcaatgccaaatagggtcaggtactcaaagagcaacttcaggtctcccargccctccaaggcctgcttgttttgggatagtttaggatcctggagcagctgttccaccagggataccccacctggggagacagacttgtgagtgaggctgacaaggaaacaaaaaaggtaaggagggttgaccttcttgcctggactctagtcgcccatgcatgtgtgtgtacatatgcatagacacactcactcccctacatacataacacagaacagtttcaactttaggactgagggcagtgggacggctgctggggaggcttggttctgttcctcaccatgttgctggacatagtccccaatgcggtcagccacctcwggtgcaaggcccttctctcccaccatctcattcttcacctcttcccaggacacctaggcagacagacaccagtcagggacccctgggcagcttccgcaccacagagcaagtgtgtactgtcctcggggaaccgttttagagcagtagctgcccatgagcctacatcctggggctaaccttcctctggtgggtatagaggcatgcacctctctctctctcaatcttgttttccatttcccaaggcagggtgggatctgggaaaagaagtcaagtacttgggttgttaccttgtccagcttgtctactgaggagcagatggtacggaacttgctrtcagaaacaccacagatagcaaacatcccatctagaatgcgtcgatcgtttacctgcaaggaaccaatgcatagtgaggggggaatctcttttcttacatgacctgcaatagtcatggtcacttaggctactggtccctctgcacaaggatcttctcttrtgagaggccaggcccaactttgccctcccagccttgtcagctctgaccttgaccaggaagtcgcctatctgaagtgaactcaggatctcrcacatgatcttcaggcactctgcatcagggatcatgggatcaaagttcccagcaatgtcaaaatcctgcagggagagggttagccagcggtcttcagggattcacctttctgaaggggggactctgggagctctgtcctctaggaaggcctggttgcactcaagcatagaatttctctttcattttctgatcatcagcccagaggtaaaccccggcatctttgggcttctcaccagttttggtttcctttccatctactgggctattccttcattttctacttcatcatcttcttaactcctcctactggatggggtgattatatggctttagtgcttagccattttccctattcatccagaagccctggcatcagtctggatgatttgatgtatcaaagctaatttccttattctctgctgtgatcctatcactgtggtttaaaataaagagcactggaccaagagttctagtcctgactttgcctttcttatccctatgatctcttcatgggctgggtatcaagtttactcatatgtaaaatgaagagactttattctcctcccccaccacagggattttgtgaaatctgcatgaaaacaccatagaagaggctgggtgcggtggctcacgcctgtaatcccagcactttgggaggccgaggcaggcggatcatgagaccaggagttcgagaccagcctggccaacatggtaaaaccccgtctctactaaaaatacaaaaaattagccgggcatagtggcaggcgcctgtaatcccagctactcaggtggctgaggcagaagaatcgtttgaacccaggaggcagaggttgcagtgagccaagactgcaccactgcactccagcttgggcaacagagcgagactccgtctcaaaaaaacaaaaaacaaacaaaaaaaccaccatagaaaccctaagagcattatctgggtcatccaatttgctcaggacaccgtgagtactcaatagattctgctggcttgagagagccccaagtaactcatcctgccccacggtttcccaacactcacacactggtagaattcccggtatcggccacgggtcatggctgggttatcccgccgatatacctttgctatgtggtagcgtttaatgttggtcagtttattcattgccaaataccgagcaaaaggaacctgatgacaaagagttaaggagaaagcccctcctatcactgtctgcaagttgattatcatcaccaacagaagctggggtctaacccctccctatgtgggtaaaactgccacccataagattaatagcacttacaaacatcagaaagcatcagctgtgctaccacatgaggtagctgaaggctcaaaaaagattaaggcacctttcccttttgtagtgttgactggacttttttgagcatggcaaggggctgggcaggttggccacagaccagaaaaaggcgaccagaaaaaggcccccatatgggatttctaagcagatgattctctgtgtagcttggagacaagggaaatgtgttgctagtccattaagaagaattttgttcactggacagggcaggggagaggtattctggagccaggggatgactgtagagttggaactgggccctgacatcaagctgaggtctcactcaggattcagaagatttctaaggatgtgtatgctctgtttagccaaagttccactcctggtttagagaaataattcccctaatcgccaaaggcctcatatttgatcctacctactctaccattcttaaacctgagccaagtgagtgccaatccatccaaagtctcaagagcccaagtttagaaagatacagtgaggtcatagcgaagggacaggagctccccgccctgrtccttcaggtcatagataagcttggagtcttccccatactttcccatcagtgtttcctggagaaaacataaataaatgtggtcataataataaacataacaatttaaaaggaagttttgaaaacaaacatgactgattccaacttgtctacatttccctctgctctttatcccaattcttaggtgtctgatgtagttatcattaaaaggaaacaccaattttgtgtttttttctattttgattttgtaacagagctgaagtatttttcttacacattttcctcttk

SEQ ID NO: 93910 - DNA, 18382 bp, Homo sapiens
  misc_feature (1)...(18382): n = A,T,C or G
accccatctctactaaaaatacaaaaattagctgggcatggtggtgggcgcctgtagtcccagctactcgggaggctgaggcaagagaatcgcctgaacatgggaggcggaggctgcagtgagctgagatcgcgctactgcactccagcctgggcaacaagagcaagactctgtctccaaaaaaaaaaaaagggggtgggggaaagggggttggggggccaggtgcggtggctcacgcctgtaatcccagcacttcagcaggccgaggcgggtggatcatgaggtcagatcgagaccagcctggctaacacggtgaaaccctgtctctactaaaaatacaaaaaattagccgggcgtggtggcgggcgcctgtagtcccagctactcgggaggctgaggcaggagaatggcatgaacctgggaggcggagcttgccatgagccaagatcgtgccactgcagtccagcctgggtgacagagcgagactccatctcaaaaaaaaaaaaaaaaaagaacagccctttgtgggtggcaaatgcctctgaaatcgcttattgtaggctccagggcaggaaagtaagaggaagagttcacattgtatttgcatgactctcggatgctgagggaaccatgccctgttccctcagtactcacgcctcagcagtggggccaacagccctatagttagctgtggtgctgataagctcggtttcttcataatctttgttcactccatctctccgttccttggcacgatcccggtacttctctgctagctctctctctctctcaatttcttgttggcgtagcttggcataataactgtgaccagagaaaggcaaatgtataaggctcatcagctgctacctcaaggtcaacagaactgttcctgcttgcttccctacatctccaacctactctctatggggaaaagctcatgtctgtcctgatagaactgctggccacctcttcgtagttactcaaaatcagaactacaacttcttccagcttatagatatacttttccagtgccaacttgggacactccatctgtcacttcagaactttttaataccacccaactctaccaattctctatagatataagacttttccacacaaaaatcagaaaatcttctgaatttttaccaccttctaaatttcagctgaaaagaacgtattatttgctggtccactctcagaataaaggaaaagccaagtaccaggtcctgaaactttcgtatcatataaataacgatgatgatataataatgatgatggccgtcaagatttattgggtggttaccatatgccaggcattggtgctaaatgcctacatgtactttcacagctgatcctcatgacatcctgataaaagttattattgctactgtatctccattctatctgtggattagagaggctaagcaaatgtctaggttatccaccaagaaactagcgaagatgagattaaaatatagataggcctattccaaagccctctactgccactctaagtatcactctgtttcattaagaaagtagagagcctcaagacaaaatcttagtttctagcttcataattagcccctacttctttcccctaaacactatccaccttaaaatctaaaacccttcacccttccttcaccttttctttttcctccttcgtgcagctgggtcttcatcctcattgtactcccttggcatcctagaagagacgagaaattcactgatagcaaaatattgccacagccccagaaaccccaagaagtctccttgaggatttttagaaagacctagaatactgatcaaagtaacactttcaatcaagcagaaatccacaycaatatttgtaggtgggcagttctcaaactttagagagtatcataaatacctgagggactattaaaagtcattctacttagtagaaagaaataggaaggagcaagaaacaagttgggagacaggttggatcacccaaagacttactcatggtgacgtgacttagaaggtggtgcagaggtaggtgcagccctgggggtcatgagaagtttcctgaagtcttcattggtgagttttgatctagaagaaaaggcaaagattttaaatattaggactcaataagaaatgaaaaaggaacaagtaaaaatcatgattaaattaacagaaatcagggaaatacaaattaaaacaaagatatgacactgtttttttttttttgagacggagtctcactgtcacccatattggccaggctggtcttgaactcctgaccttgtgatccacccacctcggcctcccaaagtgctgggattatagggatgagccaccgcacccagctttttttttttttttttaagacagagtctccctctgttgccccggctggagtgcagtggcatgatctcagcccactgcaacctctgcctcctgggttcaagtaattctcctgcctcagcctcacaagtagctgggaatacaggtgcccgccaacacacccagctaatttttgtatttttattagaggtgttggccaggctggtcccaaacttctgacctcaggtgatctgcccacctcagcctcccaaagtgctgggattataggtgtaagccaccacgcccgaccagatatgccatgccacttttaatgcatcagagtgttaactaccagaaagtttgataaatcaagtgtgagtgagaatttgggaaggggactctctcatataatgctgatgagaatgtaaaccagtataaccaatttgaagggcaattttgcagtatttgttaaaatttaagtatatatatcctatgagccagcaactccatttatttatatttagcctggtccattactgacatatgtatataagaaggcctgtaaatttaattcagttatagccttgaaaataatcagtctggccgggtgcagtggctcacacctataatcgccgcactttgggaggctgacgcaggcggatcacccgaggtcaggagttcaagaccagcatggccaacatggtgatatcccatctctactaaaaatacaaaaaaattagctgggcgttgtggtgggcgcctgtaatcctagctactcaggaggctgaggcaggaaaatcgcttgaacctgggaggcggagtttgcagtgagccgagatctaggtattacactccagcctgggcaaaaagagcaagactctgtctcaaaaaaataaaaaaaagaaaagaatcagtctgaaacagactaagcgtttattagctggagactgactaaactatgatggtgtttcccaaagagggaaagacagcactaatggtacaagagattattttaattggtacactaacaaagactcctctcttgatcaaattaaagtcagactcctttaaagctctcttctgactagggctcttccttggcctgctgacctcagttttaaaaaggaatcctaagtcagttcacagaaagttttcccactcttgatatccaatccaacttgatatctaatcaagttcctcttctccccaaggaagactttattgaagactactgtaacaagagtcaagaccattgtaatagagtagagagactgaacttaattccgaatacaacagggacaagtgagaatttatagaaaattactaaaagcaacttggttaggtatgggggtggagcggtggttgatttctttgttaaaactgtgctcagcaggccacggatgagtcctgctgaaaaatgggactctttggggaacctgactaaagtttagccaaggagggaatgcttgtcactgctctgaaagataatctcagaaacactgagcagggtttaaaaagaagcaagttgcaaaaatgatatatacagcataatatcatttaactcaaatattttaaatcacaaagcaatgttgtgttttcctcagatatgcatgtatgtgtataaatgcatttaaaaaagagtaggagggccaggcgcagtggctcacgcctgtaatcccagcactttgggccgccgagacgggcagatcatttgaggtcaggagttcaagaccagcctggccaacatagcgaaaccctgtctctactaatacaaaaattagccaagcatggtggggcatgcctgtaatcccagctactggggaaactgaggcagaagaattgcttgagcccaggaggcaaaggttgctgtgagcagaaataatgccattgaactccagcctgggcaacgggaggaaaagatatgccaaaaaaggtaactgtggttacttctaagaaaaggactgaggctgggcacggtggctcacgcctgtaatgccagcactttaggaggctgaggcgggtggatcacttcaggccaggagttcaagaccagcctgacgaacacagtgaaaccctgtctctactaaaaatacaaaaaaaaaaatcagtcgtgcatggtggcacatgcctgtagtcccagctacttgggaggctgaggcaggagaaccgcttgaactcaggaggcagaggttgcagtgagccaagattgcatcactgcactccagcctgggtaacagtgagactccgtctcaaaaaaaaaaaaaaagaaagaaaagaaaagaaaagaaaaaaaaaaagaaatggactggaattggggatgttatcaaagatgattttatcgggggccaggcacggtggctcacgcctgtactcccaccactttgggaggcagaggcgggtggatcacctgaagtcgggatttcaagaccagcctgatcaacatggagaaaccccatctctactaaaaatacaaaattagccgggcgtagtggaacatgcctgtaatcccagctactcggaaggctgaggcaggagaattgcttgaacccgggaggcggaggttgtggtgagccgagatcgcaccactgcattccagcctgagcaacaagagcgaaactcagtctcaaaaaaaataaaaagatgattttacccttatttcctatgttttaatttgctattggaagaagtaattcctatataatgtgtaattacacaacacgtataaaaaaaaaaaaaaacttaacacctttcctgcaggaatttcccttctaatacccttatgcacttggcctgatccagttaaggctcacagagataaagggccagcgggtataattttttaccatccttgatgacaagacattcagaattctttcaccatcaccaccacttttctattcattgcccaactcatttccatggtcctagcacaaaatactcactggtggaaggagtgaggatcatccacatcgtggccatcgggggccaaagggttggagaacggctcacctgacaaaaaaaattgacgttaatttaatcagtctcttacgtgtcagatcctatgcaaaaatttgagatatagtagtgaacaatacagaacaaaagttagaacagcgacagtgtcaacacaatgtaataagtgctgaaataggaaactacaagaagctgtgggagcacaaagcagaggaccctaatcctgcgctggaggatcagagaagacttccggaagatcacgtctaaaatactacgtaaaagataaatacgcgcaacccaggattaagtatggggacaggactgggggaaagcgatccacgcacaaaagccgcccatcatcacttggagtaggagtgaggactggggacggagtttggagctgtcggcctcacttaggaccctgtggcttctccgggctcaagcgtcacacatacatacatacacacacacacacacacacacacacacacacacacacacccggcttaagctcagaagctacaataatgcgccaagtgccccaagtgccatggggaagaaataacggatggcctgagccttactatctcgctccggcattttgttatcgttctttcgctgtcaccaacaatcgagtctccaacagcaacaccgcagcgacaagctctttcccacagtgcacctcagaatcaacccacactgctttgcgttcgcagcctttccgcttcctgtttttccctccgaccaaccccgagcgcaaagaaattgacctcgcagcggtcctacaatrcttttatatcattggccaagctttaccccgcccctgcctcatgcagcctatgggctaggctttagggtccgcggttggtcagaccggrgcacttggcctgaagacctggaattggcgacttcgatattaacaaggatggcggcggccgcagcaagtcgaggagtcggggcaaagstgggcctgcgtgagattcgcatccacttatgtcagcgctcgcccggcagccagggcgtcaggtgaggcgcggcgtggtgaggcgggcrggcttcgggacgccagggtcacgacctcgacctccctgaagttgagggaagcccccgcccacagcacgcgcggcgctctctcsggccccgcagggacttcattgagaaacgctacgtggagctgaagaaggcgaatcccgacctacccatcctaatccgcgaatgctccgatgtgcagcccaagctctgggcccgctacggtgagtgcgggacgccargggtctggggctccggtaggggaacaagggtttgagaagagaagggaccgcccaaggtcgtgcagaaacccgtggagaaactagaactcggactttagccttgctgttgatcttgtttccatgaagaaatttatattcgcagggttatatgatgcgttgtattccgggcaacataagtatgcaggctgaccgaatcctgcgtagggaccaggagctgacgtttttgtagttaagaatgggcttcagacaggagagaagttagtcaatatagtttctccaaataacgtgtagccagwgtcagtccaggtagtgtgtgagaatctcagtaattttgcacatagagctgggccctgtgctgagtgcttccctgcctaactcatttaatcttcattagttaggaggaagcgtgttcttcttttctcactgtagagattagaaaacggaatcaaaactttgttttgcactattgttaaactctagctgcaactttagatgcagctagagtttaacaggattgagcctttacatttattccccttcctagaatgcacttacccctctaagactggcatggcaatgtattgcaaaatgaaattttcctatcatgttgcctaacacattgtaggtatgcaataaatgtttatacatactgaataacaggattttaatcacagcttttaactatatggtgccctgggaatgacgggaggaggtggaggagagtgaccaccttaagcagattggttctcagagtagatatctgtgagacacagtagacattagacatgcactaataattggagaaggaaaaaagcttctccttccaaaagccagtagactacaggaggagatagacacgagtaactttagtgtattgtgctgggtattatgttagatagcctatgggagcctagagaatgggtacccagctgggtgcggtggttcacgcctgtaatcccagcactttgggaggctgaagcaggtggatcacctgaggtcaggagttcaagaccagcctggccaacatggtaaaaccccgtctctactaaacatacaaaaattagccggrtrtggtggcgggcacctgtaatcccagctactcaggaggctgaggcaggagaattgcttgaacccaggaggtggaggttgcagtgagtggagatcgtgccaccacactccagcctgggtgacagagygagactccgtctcaaaaaaaaaaaaaaaaaaagagagagaatgggctcccagctgaggctggacccatgcaatacattgctcaccgtagttaataataaatgcctacagtgcccccgaaagcttccctgaaacaacccattgyggccatccagaatcagccaaaattctatttggacttgggcttcctagatgtgtttgagacctattgtattaattctaggcataccaaatgtattttgatcatatctctttaatactcttcctgtcttaacaagactaagataaagacaaagatcttttattttactttggtagcctccagggtgcagaatagttaaagacacctccctctctctcttcagcatttggccaagagacgaatgtccctttgaacaacttcagtgctgatcaggtaaccagagccctggagaacgttctaagtggtaaagcctgaagcctccactgaggattaagagcaacagccccagagcctgggctctgctggacttagtataatgtgaaaaaaatgtgttctcctattcctcataaagcttgtgctgtaaaatactttctcagggtgttcttgtcctcatctaccctctaccccttactgtgcaaccactgaggcaaagtagcttaatataaaaataaaactttattctgtctcatcaaaagctaccagctgctgaagcaaacatgaagggtggcgggggggcagggattctagggccccagagtaagtagaccacactgagtcccttttggtcctcctgcctggatagtgctgagtggaaggggaggagctgggacccaaaggtcttggcttaggtgtgggagcagagaacatgagacctcattatggtcctaaatctccaaaggctctactggacaaacaagcttgatgttaagagagaggggaatgagtgacattgagaaacaagatcacccttgaagagctgtctgctggagagcatacacacgatcctggagctgggcctcttcctgatgcctttccagggcttgcagccctgactgctgcaggaagacctgaacagcctaggggcagggaagaaaattcaacacacctggtctctgtgtcctaagactcaattcccacagcctcatgggtcagccnactccagagggtgcattccccaacaagaggatgaagtttctgacatggaacctatatangttagccaggcccagagaaacaactatagttaggactggatgggaagggagccactgtgtggcttcagaacaggggtgactgaggatgtgggccagaaacctatacctctggctgatacaggaacagcagatgcagcagctccaaactctggcctactacttyagtgtcagaaaaggctagtgtgtgcagcaaggcgggaagcaggggccctggccacagccgctggcagtaagcaggacccttttctgcaacattgcacagaactgtgagcacctgcagatagacacatatatagtctacaaagaatgaaacacamagatcataacaatagctaaaatatatgacatggtgaccacatgcccaggcaccatgccaagctcttctacatrcatgttctcatactcctacaactaccctatgatgcaagattatcctcagttataagtgaggagactgaagcttaaggtggttagttgatttgtccaaggataaataatccagtttaagggacacacacctagattggttgggccctgaggccacacaccaccacctgctggctctcaactaagggtacatctgagggctcaggactgctgtcccatacaatccractaccagatcttggattcaagtaaccccaatacataccattacgctcaccacgttagatactggcaacagctgtaagagaggctcaatcagatccagggagagcaaggaggtacagaaactaggactgtttgctggaagagaagtaccagggtgaaaaactgctttcccccaccacccctgtcaatactacccacctcagcctaggccatgaggaaatatccccattatccaaatgtccaggcctgggcagattatggtgcgtaccagtgaggttgttgaggagccaaaggccctcagggagcagactgggctgtttctggaaaaagaactgcagaaggataaataaggctgccacaacacgctcatctctgagctgcatttgccctcccacagtctccactgctgcctcagttagcaggttgcttagacatcgaagcacggggcatgccagctgcaaagacaaattggggggtcaggtgtaagaaggaagaggttacctgcattccagagtatcaagaaacatctcccagaatttcacctgacatcttcacctaccagctccagtcctgcatcctcgsttttctggacagccccagccaagtccaacagcagcaaccccagagtagacagagccccatggcyaatgagcagaggattgctgacctggctgggcaacaggaagcaagcagtccctaggtatatagtcaattccacctttaagaagagaagcagttgcctaggcgtggtggcttatgcctgtaatcccagcactttgggaggctgaggtgggtggatcacctgaggtcaggagtttgagaccagcctggccaacatggcgaaactccgtctctattagaaatacaaaaattagccgggcatagtggcacgcatctgtagtctcagctactcaggaggctgaggcaggagaatcgcttgaacccgggaggcagaggttgcagtgagctgagatcgcaccactgtactccatccagcctgggtgacagagtgagactgtctcaaaaaaaaagagaaacagctaaggtctgtgggtctcctgggctccaaaaagagaagacagtggagggaggaaaactcactatagcaattccagacacaagttcaaagagttgaatgtcatggaagggagccccagggaagatctgtggtactttcccaattgccctgttacctgcagatgatgtaatgaaggcaccaggcaaactccacagcgaccccagggttgagctttgggccaggttgcaacatttgtagcatgtgctgagggagagtggaggccaagatggagctgctggcagaagcagggctgtaagtaggaaccacgaagatgccagtggttcttaccaaaccctgatagcaggngggagagtgtccaaacccaaagccctgcccagatgggaaagtgtccaaacccaaagcccttcctagccagacacatgaatttaaaatgtgcaacagctttggaaatcattcaggcatccgggagctatactactgagtgggtcacctctggctgcacatctaaagacaattttactcacggaatgatcttctctggagcttcctcagcctgtagaagctgggacaaggcatatccgagagcttccagcacagccacatggggggactggaagtagacagggtaaggatctgactggaagctgggtcatcaggtcttcagagactttcagccccttggcacagggcagaggctggagctacctaaccaaagtagatggagcatgtggggaggagcaaaggaagggttgcccagggaggaagaaaggagtcacctggatgcaggcagccaaggctggaacaatgccctgtggcaggagctgccttctcacagcctcactctccacgatcaggttacccagtgtatacagacacagctcctgagaacaggcaacaaaagcactgggcttggcctgtttcatgccaggctgcgtgtggggagatggggaggggaggtgatggggacgctggagcagctatccttgcggctcacaagagggtggggagatgatgggtgtagccatggctgtaggcataagggcaaacatgttttcttcctcctacctgccagctcaaactggtcccaaaagcacaattttaaaatctaaaccaagaacaagataggaagggacagggcttactatgaagtctgagctgtgactggagaggtaggtgaggaggtaagaagtggctggcaggcaggcctcagcaacagtggactgctcggagtgagagagctcatgcaggcaccgagccgcctcaagctgcagcagggcctggttgctggtcaggagcccraccagggtccgcatgctgccctccagcctatgtgagtgagtaccagagccctgcttagyttgtggtccatccctcagagccccaactcctccctccaccacaccatccacactgaccggatsaaggtttgctgtgtttcagggtgctgcaagcctcgacgaaggctgaccagagccccctctctctccttttcctctgtcccccgctgggcttgccgcaggaactgctgcacctggagttcagggcagggaaaggagaacacacggttcacagaaagcaagtcctaagtctctctctgcccacttcacctgtgagccttccaatatcacaccttcagaacttgtcattcacactaatgcaactaataagcatctaccttgcagtggagtggacagagaatcagaactgagttctaataccatacctgccacttactccatatgggacctgaacctaagtttcctcacctgaaaatgagaataacaatatctatcctgccttcatacagggttctttcaaggatatttaaacctctcagcctggcaaaacctactcctctagccattctccccatgcaacctacactctaacaacaaccagcctaacatgagctttttctttttcttttttttacatttccgagcttttgcacatgctatttcttctgcctggataccctctccagcttcccactctcttcaggtttctgctcctcatttcctctgggaagttagctctttttgagagacttaggagtttctcttgttcctcatgtttccttcccttgtgacatctgtcttcttcaccgggctgtgagcacctcaaagaaaaggactctatcctttcatctttgtgtacctcagtgaccagcacagtgtcctggcataaagtaagcatacaatggaatagtatgacctaggaataagttgataatatatatgtcaacatggtatgtacggtaaactatgtacgtaaacataatacaaatacaggggatactcaatgcttactgaataaatcctttcattcactcattcaataaacactgagtacttaactatatgccagataatgtgcaggcaaccgggttttcaatgacaacacaggatctaggttttcctgcaattaaagtctagttggagaaataacaatagacaaaccattagataatgattaatattctacaagaaacaagtaggtggccgggcacagtggctcacgcctgtaatcccagcactttgggaggccaaggcgggtggatcatgaggccaggtgttccagaccagcctgacaaacatgatgaaaccccgcctctacttaaaatacaaaaattagtggtggcgcgcgcctgtaatccctgctactcgggaggctgaggcaggagaatcgcttgaacccgggaggcggatgttgcagtgagccgagatcatgccactgcactccagcctggcgacagagcgagagtctcaaaaaaaaaaaaagaaaagaaaagaaaaaaaataggctctcaagacagaataccaaaagaaacgaacgttagacgtagcgaatgccaagggcttgagacacaaatccgatatatcgttgcaggaactaaaaagaggacggtgggtaggatgagaaaactgataaaatttgagttaggaagaggctagaccatgctatgctttgcaaggcacaggaaagattttggtctccacgtgtttttaaaggacgtagtgacggtgacaagcatagatgcagggtgaccttttaggagactgcagtagtatccagagaggaggtggtggtggcagcttcgatggtgaggcatgtaaagactccaaagctcttcaggaggtaaacaactaggacttgatgatggatcgatatggggttgtgggtcaaagagttgtgcaggatgattcccctgtttctggcttgacccactggatgcgtggaagtgtagagtggattgcgttcaggtttggggcagacctcgagtactcccgggagtctggcgccagcgggcgtggactccagcgcaccctaccttgccccctcacctcggtttccccgaggatcgcagccacacatccctctccagcttcctctggggcgtcgtttctcagcagcctcttgctgaccagctgctgctccctccgcgccttccgcagtgctgggggcagaggagccggctgagcgtgggaaggacgaccacaacccagaacccgcggctccgagcctggggtctcaacttatccccgaccgccatatacccccgcgctccctcggccgcccacacctgcctcccgctcccgccggcggcgccgtagctcctccaccccgcagaccgtgggcctgaggcggccctgccgtcggctccacatggtggagcaggaggaggaaagccgaaggaaacagcagccacaacgctcccaggggcgtagaagatggcaccgactgcgcagcctcagcacagggcgggaacaggcggggagggcgcgaggagcggggtgggtgctgggtgagggcggggctcggcgagtggacgcctcgcggggacggtgggcggggcgagggctagagacgctgcaccactagaccagagccagaggcgtcgctctgcctctgattgatttcctgtcttaccaattctaggaaaaaaagtctctcatccctgacctcgagtgacccaagccagcagtgtcacaatctactcagcaaacacaacttccccacccacaatacgctctagatgaaagttcaaaacaatcccgaactgcgggaagcgccatgatgccgtttcactattaatgcggatcccactgatgagagctgccaaaaacgcttgaagcgtcattgaattgtcaacgaaaagagtccaactctgtaaaatatttgaagagacttattctgagccaaatatgagtgaccatggcccttgacacagccctcaggaggtcctgagaacatgtgcccaaggtggtccggtacagcttggttttacatattttagggagatatgagacttcagttcattcaagaaatacactggttgggccgggcctggtggctcatgcctgtaatcccagcactttgggaggcctgggcgggtggatcarctgaggtcaggaatttgagaccagcctggccaacatggtgaaaccccatctttactaaaaatacaaaaattagccgggagtagtggtgggtgcctgtaatcccagctactcgggagcctgaggcaggagaatcgtttgaacccgggaggcggagattgcagtgggccgagatcgcgccccattgcctggggtacaagagcgaaactccgtctcaaaaaaaaaaaaaagaaagaaagaaagaaagaaatctgggatatgatgaggtttctcttcaaataattagatcaatcttttattctttaattcatagtactcccccccacacacacttttgttttcctttttctcctttttgccttcgttagatgccgaggcacgccacagtacaagacgttatcagtaccagacgttatcagtaccagctcacattcctttcattatttggaaagaggactaactttctagttcattacaggcaccccttcccctttcctctccactttcttttacgtgcccacattacctaaaaaaatcaaatgtttagccaaccgggattagttcagattgtatgacccgaccccggccaatggggaaagggtacaggggcaggacttgcgtcaggaataaaggctctcgtgcccctttgttcaggtgtgctctcatggcgactggccaagcagacacccctctgagcagaagtaaaattgctttgctaataatcctttgttcgagtgttcaatttcccttaggattttgagcgttattcctaagagaaagaaaagaaagaaaggaaggaagaaagaaagaaagaaagaaagggagaaaagaaagaaagaaaagaaaagaggaaaggaggaagggaagagaggggagggggaaagagagaaagacattggtttgtgggacaacagaaaggcgggacaactcgaagtggggcggtggggggcttccagcttataggtagattttaaatttttctggttgacaattggttgagtttctctaaagacctgaaatcaatagaaaggaatgtctgggttaagataaaggattgtggagacccaagttcttatttgcagaggaaaccttcaaatcctaggcttcagagagaatgggttgtaaaatgtttcttatcaaacttaaagtctgtgttgatgttaacggtagagaggtataatgaggcacgttcaacccctacttcccatcatggcctgaaacggtcactcgggtttaattttgaaagagccctggctgaggaggaagtccattcagatggttgtggggggcggccttagaattttatttttgctttacagaatgttcaccacaatgaccattattctcattttatatgtgatgaaaatgagaaagatatcattatttcacttctctgcataaaactgaattcccataatttttaggataaaatctttcaccaaatgtggagtgccactagtctactaggcactgaggaaacactagtgaataaaaaaccgtgttcctcacattcaaaattggaattgtggccgacttagccctacatggtctaacccctgcatacctctccaatctggactcacctcttctgggaccttctctttgtcaacaagccctgttctttttctcctccaccctactcccactcttgggggaggctctcgcacaagctgttttctctgcctgcatccttcccttttctttctaccagcatccttccctcaacaccattctcaacatgtcaagtccagtgtcacctactcagaaccattgtaccaatgacccagcttcttcacaacccttttcacagctatcattaagttatagtgtaattatttgatgttgtctcctcccagacccccttggcagctccagaagattagggtcccggtggcacctaagaatttttacaggaaacctctaatttttaaaaagccatataacttaggcaaaggttcaattaagtacaaatctaggaaaaaggttattcttaaaaccaatttctttcccttgaacttaattctaccccttggagttaatcaatgaagtctgcaatctcttccacaaaacagcatgttaaaatatctacaggccatcattccatcctccatatcttctctcccagtatccatccagcccctggagagccatttactgagtacctgctgtgcaccatgctctggccagggatagggcctggatcttgagcccttcctcatgcaactgtctggcttctttttttaattttttaattaaaaaaaatttattttcttatttccccaagaaaaacttttttatttttattttatttatttatttttttttttgagccagggtcttgctcggttgcccacgctgcagtgcagtagtgcaatcatggcttatcacagcctggaactcagccttaaatgatcctttcagcttggcctcccaaagtgctagaattactggcatgagccactgcacctaacccaggctagcttctaagacccacacttggcccagcaaggtggctcatgcctataatcccagcactttgggagatggaggcaggtggatcacctgaggtcaggagttcgagaccagcatgaccaacatggtgaaaccccgtctctactaaaaatgcaaaattaaccaggtgtggtggcacgtgcttgtaatcccagctactcaggagactgaggcaggagactcgcttgaacccaggaggtggaggttgcgatgagccaagattgcatcattgcactccagcctgggcaacaagagtgaaactccatctaaaacaacaacaataacaacaacaacaaaacccacatgtgctccaggtggggaagatgaaaaaagttcccagccaaaagctatattctgcccagtgtctgctcagacagctacagctgcccaaattgcctttctgtatctacctgtctagcaacactgttaaccctgtaagaaccagccccatgtcctgtcttgtacagggctggctgttcctttctccagaccatgttcctcccctccacccctctcccccaacaacacaagcctttggtttctcttcttttaagagccctctgcactatggacggaagttctgggttcatgtttgctctacccacctcctggagcacttcagggacttgtctttgtcatgtctgtgtcccagggctttctaccaaccctagtactcggtagacaaatgatagacatttgttgaatcaagctgtgagttggagatctttgcagaaccatcactgcccctcttaacttggaactccccacccagagtgcctcccctaagatgatgaggtgtcagacttcagtggcctgagttctctgaaagcagagactctgagaaagaagactagtcatcaagacca

SEQ ID NO: 93911 - DNA, 55118 bp, Homo sapiens
gccattttccatacccctatgattgcatccccaaccaaaggggaagaggaggtgatgaaaggtgtagagctgtgtatgcatataactataactgcctaccaaactatctttgaaaaattctagcctccaaattttcagggagattgatgtgagtaataactccatctcctacatgttgtggccgagctctcatcaattaaactcttttttttttttttttgagatggagtttttctctgtcacccaggctggagtgcagtggcgtgatcttggctcactgcaacctccgcctcctggattcaagtgattctcttgcctcagcctcccaagcagctgggattacaggcacccaccactatacccagctaatttttgtatttttagtagagatggggtttccccatgttagccagtctggtcttgaactcctgacctcaggtgatccgcccacctcagcctcccaaagtgctgggattacaggcatgagctgccgtgcctggcctaaactctttctttactgcaatgctgtggtctcagtgaattgattttgtctgtgcagtgagcaggaagaaccggtcaggtgattgcatcactacatcctaaaatccatctatatacagctcctagagttatcttgcagaaacatcttatgaaaaaaaaaaaacccaaaaactcttcattagcttcctattgttacaggaactagctcaaactcctcatcccagccctccagaccctttgttattttccctgacctgtctatctgatcagccaatggccaatggcttaagcaccaaactcttatctagccaggtctgcctcctcatgggccttgtacaattattactcatttcctcttttcatgctgcagtcccagttcctctcagattattcatatcctatgcattcaactcaattatcacattcttttccttcctttggtaccaagatggtggctgttttctgagacttaccaaagccccaatagttgtgtattctcacactgagtattatcttcctatcaggtcatacaatctttgagggtgtggtctgtgaatctatccctcatagcatatagcacagtcctaggtgcaccaaagaacttgtttaatggaaccaaaccagccctaaatgccaactaatttttgtaagagttaaagaaagaggaaagaaacatgaaaagtggctcaacagacaaagacaggtttattttggataatcaaccggagagggtcttctggccgattttggtcaggagtgctctctcttacagactaagagtatttattggttttagggtgagggagcttattacaggcttggaatgttactgtggtggggagaagtttattgcagggttggaatgtctctggttggaggggaggttacttggggctggcatgtctctggttggggaggggtttatcttatggttggaatgtttctggttggagatgtcatttacggtttatggtcatgttgaccttagccattaggctgatgccctttggatttaggtgtttttttgtttgtttgtttgtttttgtttttgttttgagagggactttcgttattgttgcccaggcaggagtgcaatgacgcgatctcagcctactgcaacctctgcctcctgcgttcaagcaattcttggccaggtgcggtggatcatgcctgtgatcctagcactttgggaggccgaggtgagtggatcgcctgaggtcagaagttcaagaccagcctggccagcatggcaaaaccctgtctctactaaaaatacaaaaaattagccaggtgtggtggcaggtccctgtaatcccagctacttgggaggatgaagcaggagaattgcttgaacccaggaggcggaggttgcagtgagctgaattcacaccattgcactccagcctgggcaacaagagtgaaactccatctcaaaaaaaaaaaaaaaaaaaaaaaaaaaggaaaagaaaagaaaaaaagaagaaaaaaaagcaattctcctgtttcagctcctgaatagcggggattacaggcatgcaccaccacgcccagctactttttgtatttttagtagagacggggtttcaccatgttggccaggctggtcttgaactcctgacctcaggtgatactgcccgcctcagcctcccaaagtgctgggattacaggcatgagcctccttacccggccttaggtggtttttgatcaaggagaactttagaattgtggtgcttgtccaagatggcgatgctcctgcttggtaaattttaatatgttatttctgagagcgaatgctgtagcctctcagctatcttttccttgcaccaaaatgagaatgtttgacaaattcctagggatttcactttgttgtgatttggtttgctaataacaaaattaagtaaaaggttatcttggttccagctcttatttgagttaacaatattccttatcatctatgacatatccacttactgactttctrgttgaagsgtctaacctttcctataatacggggtatttctttcccctcttacaaatgtaatgatttcgcttttatagtagaatatgctttaccagattaaataaatataaaggggttaatggctaaataattacattatagctgctttaatctcttttctctctctacccctcagggttttcctccttgaatgacaggcctgctttaaatgaatttgcctggatgctcaaaataggtgggggtgagggaggaaatgccttctctctttcagcagacaagatggaattcagtttaattaatcaaatattaatatttattgagctcgtatgggacacctgattctgtgctaggcacaacacagaaggccaaaacgagaagtgataaaggagcagaagggcttgggaaggggaagaaaggggaagaggaggtgataaaaggtgtagagctgtctagccatataagaggggattaaaagatgagaaagggaaaatagagccaaaggtaaattctctggcctggtctcacttgatagccctgcatgggcctagaaggctgaagcagtggtttgagttcaaattttgcttatgagccatgagagcagttaggatagtggcaatttgagtcaaacatttacctcctcaagggtttaggatggaagtgaaatctctctttaaaaaacaagaaacatacacgtgtgtgtttgtgtgtgtgtgtgtgtgtgtgtgtgtgtgtgtgtgtgttgtgggggccaaagtcattggcccctgaaggttcactaaaatatcactgatatgaggctgattcataggagaaaaggcatacaaatttatttaacatgtacacatgggagccttcatcatggagacccaacctcccaataattaacagaagcttatatatcatcttgaaattacagaaagagaccaggcgtggctcatgcctgtaatcccagcactttgggaggccgaggcgggcagatcacgaggtcaagagatcgagaccatcctggccaacatgttgaaaccccgtctctactaaaaatacaaaaattagctgggcgtggtggtgcaagcctgtagtccagctactagggaggctgaggcaggagaatcgctcgaacccgggaggcagaggttgcagtgagccgagatcgcgccactgcactccagcctgggtgacagagcgagactccatctcaaaaaaaaaaaaagccgggcgtggtggctcacggctgtaatcccaggacttttggaagccgaggcgggtggatcacgaggttgggagatcaagaccatcctggctaacacggtgaaacgccgtcactactaaaaatacaaaaaattagccaggcgtggtggcgggcgcctgtagtcccagctacttgggaggctgaggcaggagaatggcatgaacccgggaggcggagcttgcaacagtgagccgagatcgcgccactgcactccagcctgggtgacagagcgagactccacctcaaaaaaaaaaagtaagaaattacagaaagaatgtggacgaactcagagtatatacaaaaacaggttttagtggcaagataggttatggaagaaaggaagagacttggtttgtgaaggtggccttgtcatgtagaggaagcctccttccgaaagaatagctggtaaatgcttcttttcaaacttttaaagatgtcagactctcaatctctcctggatccaggtaaggcatagaaatgggaagcttggctgtattcaaggaggttctctacagatgcaaatttcccccatctcagtcctctggtcctgaggcagccatttcaaacatatggcaaatacatttattttggggtaaaatatttttattttcttcagaatgtatgaacacacagtatatcaacttattttgaatgataatagctaactttgtgtacttactgtattctaagcactttgtgtgtattaactcatttaatcgttgtcacaaccgtatgaggtaggtaaaattattgtggacattttttttcagatgatgaaactgaagcactgagtaattaaataacttgctcagtggacacagcttatcagtggcagatctgctgggggtggtggcttatgcctgtaatcccagcactttgggaggccgaggcagrcggatcacctgaggtcaggagatcgagaccagcctgaccgacgtggtgaaactccatctctactaaaaatacaaaaattagctgggcgtgatggtgcactcctgtaatcccagctactcgggaggctgaggcaggagaatcgcttgaacctgggaggcggaggttgcggtgagccgagatcacaccattgcactctagcctgggcaacaagagcaaaactctgtctcaaaaaacagaaaaatagaaaataagtggcagatctgggctttgaatcctattctgactgactcaatgtttgctgctatttgaagtattgggccttgtttaatttactactgtactcactaaggctaacacattgccttgcacataataggcatgttatgctttgaataaatattaatacatgaaatgttgactacaaagtgttttccacttgagcacaattactattaagcataaaaattaaatatcattaaatgtacgttcactattttttttttttgaaacggagtttcactctttttgcccaggctggaatgcaatggcatgatctcagctcactgcaacctccaccacctgggttcgagtgactctcctgcctcagcctcctgagcagctgggattacaggcgtgcgccaccacgcctagctaatttttgtatttttagtagagatggggtttcaccatgttggtcaggctggtctcgaacccctgacctcaggtgatccttccgcctcggcctcccaaactgctgggattacaggcgtgagccactgcacccacctcggtaggttcactttgctgtaaattttactctattaaagcaacaatattttacagcacacagatgtgtgtatacttcaagttttcttactcgtggctgggctaatgactcctctaaaaattagaggtattactgaatgtagtccaggaggtagtgaatcaaccaaaaagagacatctgtcctctttttgagttctgtagttgaagaaaaagattatttctgagggtttaggatttaatagtcttgagtgggatccagtgaagaaactataaagtatttttctgatgcagtgtaaaaagagaatgaatgcttgagaaaccccacggcccagaatagatctggcttttaccaaaggatgccatttcacggaaccaccctgtttctcatctcccaatcttccaacccgttagggatctgatgtctgcaattctatcatgagaaaactattccttgagttggaagacttaaactgcaagcacccctgggatggctaacgcagttaacactgcagtgtgaacgtcttcgtgagtctcttatgtagatccaccaatgggacggtgaggaaagagcaggtggtgggcggggccccggggaggggaggagaggagaacttagagaaggaaggcggcgggtgtcagggctatgagtgcttttaaggaaggtctccatagaaggttcccccagcaaagtagggaggggtactccccgagaggagtcgaggtgccggagcctgctgcctcgccgacgctgggaggagccccgtgtcccgccgcgcttgccaagggttggctgcgcgtgcggcgggagtagaggcgccttgcgcaccaggaagtgactgtttccccgccgcagcaaaccaggccatccgctggccttttagtttgccgcctcaggtttgtaagaggatttattggttacgaaggaaggtaaggtggataaatagcccggaaaacctgatttaacccttgctttacagaaaactccctactatgccaaactgtccgcggggcggggaatggaggaggcaggcggggctggagacgggacccgacggtgactgcgcaaggtcgtgtacggcccagcgtgggcctgtgccctaactcctcccactcccttactttctgtccttcccgggccctgcagaccggccaagtttagtggtagcctttcctagtgtctcctctttgttaacccttcctacagacacagtgggcagaacttgcctaaagaagaagggaatggaagggctagtggagtcttgttggggagacaaggacctgactgcctgtgggctgcattcgggacacgacacagcagtcaacccatttgcttgtttggtttagcaaggaatagtgtctggagccggtccagctgaaggaagggtgagcagagagtgcaagcaggacccttgtcggtgggtgaacattttgctccaaaagggatccttggccctgcgcaggtgagacctaccacatagtctctttgatttgaacctctctgagcacaggagagttagcctgccttcctatttgggctactctggactccaggactcttcctgatcaattcctgaggcaggtatagaacagtcgagcacgactgctcacacgcttttttttttttttgctgaggaaaaaactcccaagcatttttattttttatttgtttgagacggagtctagctttgtcacccaggctggagtgcagtggtgcgatctcggctcactgcaacctccgcctcccgggttcaagtgattctcctgcctcagcctctggagtagctaggattacaggcgcctgccaccaygcccagctaatttttgtatttttagtagagactgggtttcactctgttggtcaggctgctctcgaactcctgaccttgtgatccggctgcctcggcctcccaaagtgctgggattacaagcgagagccaccgagcctggcccccaagcatttattttttattttttatttttatttttgagacagagtttcactcttgttgcccaggctggagtgcaatggtgtgatctcgcctcaccgcaacctctgcctcccaggttcaagcgattctcctgcctcagcctcccgastagctgggattacaggcgtgcgccaccacacccggctaattttgtacttttagtatagacagggtttctccatgttggtcaggttggtctcaaactcctgagctcaggtgacctgtcagcctcggcctcccaaagtgctgggattgcaggygtgagccaccgcacctggccccaagcacttatttaaaacaggacaaaatataaaaagaaaatagtctcttctgtgaacaaatgyctcccctgacattaagaaagaaacagaactcaccttgactagtatgagtgtgctgccttgaaaaagaaatttcaccacagaagttactaaatatgacaggctctttacctagaatgatggctggttggcaccttgaaataataaggtcctgttttaaaccatacttgataatttggaagagacctagatggacaaggaccctcctgctggggtatagggcaaatgaactacagtcatggcagagtcaccagtgagaggacccacacactcacaaaaaagtctaaatgtcgttggggtgggaatagctatcttcaaattccccagcttccttgtccctcctctgcaaatcctcaaatgggcctgcagtttccttcctcctgactttcctgctgactggagggacaggacccctctcctggatcagctctactcccttcccctgtagtctgggcttcaaggccactggccttctcagacccaccatgtcattctttatgtctcttgcctcttcattcatttcctttctctggcttttgccatcctccatatcgaatacgtacattctcacaggccacacactttttttttttttttgagaaggagtctcttgcccaggctggagtgcagtggtatgatctcggttcactttaacctctgcccgggttcaagcaattctcctgcctcagcctgctgagtagctgggattataggcgtgcgccaccacacccagctaattttgtatatttttggtagacagggtttcaccgtgttggccaggctggtctcgaactcctaacctcaagtgatccaccctccttggcctcccaaagtgctgagattacaggcctgagccaccccgcctggcttttttttttttttttttttttttttgagacagggtctccctcccgggctggaatgcaatggcacaatcatagctcactgcagccttcaactgctggacttgtgatccttctgtctcagcctcctaagtagctaggactacaggtgtgtgccaccacacctggctaatttttaaaactttttgtagagaccggatctcgctatgttgcccagactggtctcaaactcttggccttaagcaatcctcctgccttggtctcccaaagtgctgggagttacagttgtaagccactgcacccggctgccacacacttttgagagtattaacaggtagtccagcacaggccataacctcactacactccagcaggcactcatgtagagggtcagaaaatttatgtgtctatgtgtgtgtatgttgttttttaaatttcccacaaactgtactcatcctcacagcacttgcatgcattgttacatcttgtcagttttgcaggttggagatgttgaggcatgaagaaaccaagtgatatgctttgaatcagagcctaagaaagagcagtgacacatgttgagcactggctgtcttaagcacagtcctgaacatgtcatatatttgaatgcttttaattctcaccaaaactgtgaaagataggtgttctcagtcctatttgtatagatggtgacactgagattcatagcacttaagtattaatatcttacctaaaaccgcatagctagtgagaagtagagctgggattagaacatggctccagccgaatgtggtggctcatgcctgtaatgccaacactttgggatgctgaggcaggtggatcacttgaggtcaggagttcgagaccagggtggccaacatgatgagacccccgtctctactaaaaatacaaaaattagttgrgtgcaatggggggtgcctgtaatcccagctacgcgggaggctgaggcaggagaatggcttgacacaggcagcggaggttgcggtgagccaagaatgtgccactgcactccagcctgggcgacaaagtaagactgtttttttttttttggtaacaaagaacatggcttcaaagcctgtgttcttaactgtactgtcttgttgcttcttgatgggggtgggtgttgagtggagagtgctatcattaacacctgaactctgggccagcttaagtgtatattctgtaaaaaatttgaaatcccccaaatgtcacatgctatgacagtcactttctttagtactttgtaatcatacaaaatggtgtatgggctaaatattgcagcacctatgtcgtcatcctccatgttgcttattgatcatggaatgttaatttagcaataattttctctgtgtgtgtgtgtgtgtgtgtgtrtgtgtgtgtgtgtgtatgtgtataaatgtaaaattctgaattaggctatgacttaacattgggatgaaatccaaggtagagcttaagggcaaaatacaaatttcacagcaggttaacagaatgtcaggccaagtccattcaagtgtcccaagtacttaaaataggtgcttatggctgggcatggtggctcatgcctataattccagcactttgggaggccgagacaggaggattggttgagtccaggagtttgagaccagcctggaaaacatagcgagaccccatctctgttttttttttttaagatggagtctcgctctgtcgcccagttctgctctgttgcaatcttggcctactgcaatctctgcctcccaggttcaagcagttctcttgcctcagcctcccgagtagtgggattacaggtgcctgccaccatgcccggctaattttagtatttttagtagagacggggtttcaccatgttggctaggctggtctygaactcctgacctcaggtgatccgcctaccttggcctcccaaagtgctgggattacaggtrtgagccaccatgcccggccaaccccatctcatttttaaaacaaacaaaaaccaggtgctttcacagcaatgtagacataacatagagtcctgtgttgcaaagggaggccctctacttgtgttctcaatgtcacccatgttagctcttccagcttttgtctcatagttactcccattgttccttctcccactcccctctttcagtgttgccacctctactcagttaaatactgtctttaaacacgtcatgacagttactagtaatgcttactgaagatattttgccaggtgttggactctgctcagagtttcacaaacatacctgtctaatcttctgctaagtactttttttttttttttttcgagacagggtcttgctttgtcacccaggctggagcatgatcatggctgcctgggcacaagtgatgctaccacctcagcctcccgagtagctgggactacaggcgcatgccaccatgcctggctaatattttaatttttgtagagacggggtctcactgtgttgtccaggctggtctcaaactcctgggctcaagtagtcctcttctcttggcctcccaaagtgctgggattataggcgtgagccacactgtacctggcctaagtacttttttttgctggggggacggagtttcgctcttgttrcccaggctggagtgcaatggcgtgatctcrgctcaccrcaacctccacctccygggttcaagcgattctcctgcctcagcctcctgagtaggtgggattacaggcatgcgccaccacatctggctaattttgtatttytagtagagacagggtttctccatgttggtcaggttggtcttgaactcctgacctcaggtgatcygcctgcctcggcctcccaaagtgctgagattataggtgtgagccactgtgaccagcagcctaggtactttttattaattatcttcaactcttacaaccactatataaggtagataccattgtctccattttacaagtgaaaaaaaggaatgtcagagagaatgattaacttggcaacggccacctaggtagtgagtggtggggccagtggaccacccaggacaggtctggctgtctgactaggatctgtactcctaaaatctcaaagccttcatatgtccccactgcctgccacttcccattgcctcctttcccttctttcttttgtcccagacctaatggatgtgatactatcttcctcagaggtatatgccttggcctccaggcctccaggctctcttgactctccttctgagacaccagcatctcttcttgctctccaaatattacctttctccctgatacagtcattggccttttgctcttgcctttactcaaggtactttaaagaaaattttgttttgattgattgattgatttttttttttttttttttttgagactgagtctcactatatcgcccaggctggagtgcagtggtgtgatctcagctcattgcaacctccacctcccgggttgaagcgattctcatgcctcagcctcccgagtagctgggactacaggtacatgccaccatgcccggctaatttttgtatttttagtagaggcggggtttcaccatgttggccagcctggtctcgaactgctgacctcaagtgatctgccccctcagcttcccaaagtgctgggattacaggtgtgagccactgcgcctggcctgttttttttatttttattttcttaatttttaaaatttttgttatattattaatattattattttttgagatggagtctcactctgtcacctaggctggaatgcagtggtgttatctaggctcactgcaacctctacctactgggttcaagtgattctcctgccttagcctcctgagtagctgggattacaggtgcccaccaccatgcctagctaattttgtttgtttgtttgtttgtttgttttgtatttttagtagagacaagatttcactatgttgctcaggctggtctcgaactcctgacctcaggtgatctgcctgccccagtctcccaaagtgctgggattacaagcgtgagccaccacacccagcctgtttttttgtttattgtttttttttttttttcgagatgaagtttctttcttgttgcccaggctggagtgcaatggtgtgatctcggctcaccgcaacctccgcctcctgagttcaagcgattctcctgcctcagcctcccgagtaactgggattacaggcatgtgccaccatgcgcggctaattttgtatttttagtagagacggggtttctccatgttggttaggctggtcttgaactcccgacctcaggtgattcgcccacctcggcctcccaaagtgctgggattacaggtgtgagccactgcgcccagcccccttttttatttttaagagatgggtctcactatattgctcaggcttgtttcgaactcctgagctcaattgatcctcctgcctcagccactcaaagtgctgggattacagacatgagcaccccaccccccccttttttttttgagacagagtttkgctcttsttgcccaggctggagtgcaatggcacggtctcggctcattgcaacctccacytcccaggttcaagcaattctcrtgcctcagcctcccaagtagctggggttgcaggtacttgccaacatgcctggctaatttttgtatttttgtagggttttttttttttttttttttttgagaccgagtttcactctgtcgcccaggctggagtgcagtggcgtgatctcagctyactrcaacctccgcctcctgggttcaagcaattctcctacctcagcctaccgagtagctgggactacaggtgcatgccaccacgcccagctaatttttgtatttttcgtagagacggggtttctggtctcgaactcctgacctcgtgatccacctgccttggcctcccaaagtgttgrgattacaggcatgagccactgcgcccggtcctaatttttgtatttttagtagagacagggtttcactatgttggccaggctggtctggaactcctgaccttgtgatctgcccgccctggcctcccaaagtgttgggattacaggcatgagccaccgtgcttggcctcaaagccctttttcatcttacagcttgtatttcttatagacactcaatgaaatctgtatccctgccatctctctcgacttatcctactgcttctctacttacgtgctacacatttccatttggatatttccctaccattctaaacacaatatgtctcaaacatgaacttgctttttttttttttttttttctctttttgagacggagtctcgctctgtcactcagtctggagtgcagtggcrcaatcttggctcactgcaacctctgcctcccgggttcaagcgactctcctgcttcagcctcccgagtagctgggactataggtgcctgccgccacgcctggctaattattgtatttttagtagagacggggtttcaccatattggccagtctggtctcgaactcctgaccttgtgatctgcccgctctggcctcccaaagcgttgggattacaggcgtgagctactgcacccagccgaacttgctttttatcagcctccttatttcatttttaattctctacataaagcctccatcatctcactgttaccttcacaataaagtccatgttttattcaggcatgaacattcttttaaatctcactttcacttaacttttcagcctgttgcctctattccttaaggtgaactactgttttagtcagactggtctccctgctgtccttcaaacatctaattcatctctctgccatcctttaagactcagtttctggctgggcgtggcagctcacacctgtaatcccagcactttgggaggcctaggtgggaggatcacttaagcccaggagtttgaggccagtctaggcaagatagcaagaccttgtctctactatgtttgtttgttatttgagatggagtttcactctgacgcccaggctggagtgcagtggcacgattttggctcactgcaacctctgcctcccaggttcaagtgattctcctgcctcagcctcctgagtacctgggactacagacgtgtgccaccatacccggctaatgtttgtatttttagtagagacggggtttcaccatgttggccaggctggtcttgaactcctgacctcgtgatctgcccgcctcaacctcccaaagtgttgggattacaggcgtgagccacctctccccaccttatttatttatttttttttttgagacagagtttctgcttctgttgcccacgctggaatgcaatggcgcaatctcggctgactgcaacctctgcctcccaggttcaaacagttctcctgcctcagcctcccaagtagctgggatcacaggcatgcaccaccacacccagctaattttgtatttttagtggagatggggttttgccatgttggccaggctggtctcgaactcctgacctcaggtgatccacctgcctcggcctccctaactgctaggattacaggtgtgagccactgctcctggctgtctctactataaattaaaagaatggtgtggtagtgcacacctgtagtttcagctacttgcatggctcaggtggaaggattgcttgagcctagaaagtcaaggctgcagtgagccatgatcatgccactgcaccccagcctgggcgacagaatgagactgtcttaaaaaacaaagactcagcgccatccctccctgctctgggaagccttttctgagcactcatcaggaaccaagcatactgtgttatttcctaatgtcttcctgtgtcagcatttaatctccttaattagattgtaacytttgtaacccctctggtgtctagtgtgkcatgatgtcttgcacatagtaagcacttactaaatattagctgcttgattggctgttggttaggaaggtggaatagggaaagagatttgtcacagaaatatatccagagatttgaactctttcctggaggacagagactatattttcctcatctctttattttgggaaccgaaacataccttgcatacagtaattcagttctgctcaacaggcttgcttttactgtctgctgtgtgccagcattctgctaggcgcttcagttccataagggtttataagtggatgaatgggtttgatagttgtgcttctatttcccaacctctgtatgtgtacctttcatgcaggtggatttcagtgtgttctttggatggcaggccttaagagaagagtcccactgcacagcctcagatacttcatctccatggtgggtctcttctccaaaccaggactgcttccctggtatgccagaaatccaccaggatggtcacagctctttctgggcacagtatgtaagggagatttcacccgtgtgatagccacgaaatgtcagaaaggacaaaaaagtcagaagaaaccaagccatcttggaccactagatggttcctggcaggaaaggtaaaggccaggctgatgtcctctctccttagcaggtctcaatctgtacatctgctgaaattctgtattcctagtgtaactaatgtagcattacaaggatttgaggggccacctgaggtaggatacccagggcaaatttgaggacgtctgaagaatattggtggaaatgctttggggttgcagaaaccgttctctttgtctttgagtgtgtttttatcagaaagaagatactaatctgggaccttgtctttaataagtccaggacaggtttgctgaaaaccaggaacccagaatgatattagatggattagagatgagtaggcccattgcagccatataagcacaaatataccycatttatgcaacaaatgtattttctacatcaaattatattttaaaagcattaggaaggtaagctatttaaagaaacccaacagtgaagccttttgtaatatgattaattacctcctgataaatctggatttttcttatattaggtttgcctcatctgttctgctttgttaagtagacaacatcaaaatgggctcttctcccagactccatctccctagagagcatgagagttaggtcttctgaaagtacttatgcatagtaggcactcagtacatatttatataattaaagaattgcctgaattattttattcaaggctggctgatgttgtgacaccactctggaggttgagctatgaagaacagctcaaggtaggtgcccagcctaagtctttacccctcctttccaggagaatggtgctggactcgtaggaagcttgattgggcagttatttatttatttatttttaattttaagtttttttgagatggagtctcgctctgtcgcccaggctgcagttcagtggcgcagtctcggctcactacaacctccacctcccaggttcaagcaattctcctgcctcagccttctgagtggctgagattacaagcgtgcgccaccatgcccagctaatttttctatttttagtagagataggccatgttggccaggctgctcttgaactcctgacctcaggtgatctgcccacctcggcctcccaragtgctgggattacaggtgtgagccaccgcgccgggccttgactggacagttctacgcagaatcccaagcagcttcttaaactcattatgctattgactccaaaattggaactttaggccaattatatcttcctcactctagacccatagatccaaatgtctgtttcctctcttccttgcgtttttgttatacttatagctctgtgtatgtgagtagcagtgctcttgctgtttcacatgtagctgtgctttccaacatggtagccagtagccatatgtggcaatttaaatttgaatacagtcaattctactgcttaattctaaataagctctactgcttatttagaaaagagaaatttgttctaactaattgacatattagggaaaatttgagcataatgmaaatttcatgtttacttagaagtaattttgtccataagaaacgctagatgaaaggagaccatactcagctgaaccgagctatttaagaacatgtaaaatgaatgcatgcacgcacctcaaacatctaccagctccctcagttcccccagtgtgtttgttatgagccatacccatccacatctggtgttagaactttccatctgactcacatagccctctttttatgacttcatgataactccaagctgcaattcttttttttttttttttaaatagagtctggctctgttgcccaggctggagtgcagtggtgtgatctcagctcactgcaacctctgtctcccgggttcaagtgattctcctgcctcagcctccccagtagctgggactacaggtacatgccaccatgccaggctaatttttatatttttagtagagacagggtttcaccatgttggccaggctggtcttgaactcccgacctcaggtgatctgtctgccttggcctccccaagtgctggtattacaggtgtgagtcactgcacccggcccaagctgcagttcttctgatacccacttccataagtaaacttcaggtcattgtcagggtaaagtgttatccttatcgtagtattcatgtttcttttcttttcttttttttttttagatagcgtctcactctgttgcctggctggaatgcagaggtgtgattatggctcactgcaacctctgcctccagggctcaagggatcctctcacctcagcctccctagtagttgggactataggcgtgtaccactatgcctggctaatttttttgtatttgttgtagagacagagttttgccatgttgcccaggctggtcttgaactcctggacgcaagcgatccgcctgcttcagactcccaaaatgttgggattgtaggcgtgagccaccgtgcctagcttactattcatatttcttaaccacttgccatgtacaaaacagtgctgctgtttttattaggttcttaatcttttctgtgggtgttattgataaagttttggaatgttgtatgcctaatcctgtttttcccatgagccttgagatctttttgtgagtgattttgcttagtgtgatataggaacacttacgtcatgttatagcagggctgactctgtaaattaattaaaatttagattaaaaatttagggccgggcgtggtggctcacgcctgtaatcccagcactttggaaggctgaggcgggcagatcatgaggtcaggagatccgagaccatcctggctaacatggtgaaaccccayctctactaaaaayacaaaaaaattagccaggtgtggtggcatgcgcctgtaatcccagctactcggggggctgaggcaggagaatcgcttgaacccaggaggcggaggttgcaggtgagcagagatctcgccactgcactccagcctgggtgacagagtgagactccgtctcaaaaaaaaacaaaaaaataaaaaaacaaaaagtttaggccaggcatggtggctcacccctgtaatcctagcactttgggaggctgaggcaggtggatcgcttaagcccaggagtttgagaccagcctgggcaacataacgaaaccccatctctactaaaaatacaaaaaataagccaggtttggtggcgtgtgcttgtagtcccagctacttgggaggctgaagtggaaggatcacctgagcttgggaaatcaaggctgcagtgagccaagatcttactactgcactccagattgggtgacgagagtgagaccctctctctaaaaaaaattaaaaaagtatttagttcttcattcccactgaccacatttcaagtgctcagtaaccacatatagctagtggccactgtatacgtagaacacagggcaaacagaacatttccattgtggaaagctctgctgggcagaactgacatataccttgagtgttcagtctgaaaggtcagataaaatgatgagcttacacaagagctcattcttgacctttcctcattacctttttaggtctgtttttgttccttcattctgggttcctcatctgttgagaccatgagccaagaatctgtgggacactcttcttttgtcctgtttgtttaccattctttgcggtgaagctacaaaagtatttcatttcttttttttttttttttttttttttgagacggagtttcgctcttgttggccaggctggagtagtgcaatggtgtgatctcggctcaccacaacctccacctcctgggttcaagcgaatctcctgcctcagcctcccgagtagctgggattacaggcatgcacaaycacgcccctctaatttttgtattttcaatagagacaggatttcttcatgttggtcaggctggtctcgaactcctaacctcaggtgatccacgcacctcggcctcccaaagtgctgggattacaggcgtgagccaccgtgcccagccagtatttcgtttcatagcttatattcttttgcaggtgaaatttgcagctcagaagaaaattttacaaagactagagtcttacatccaaatgctcaatggagtcagtgtgacaacggctgtacccaaatctgagaggctctcttgtcttctccatcctattataccctctgtaagcccccacctccctattccttatctattaaggccccttaatgctaataacatcagctgatatttactgggtacttgctagggaccaggccctatgctaaattattatcatgcatcattgtcacattttactgtttataataacctggaggggtagatactatcattttatagatgaagaccttgaggcccagagagatttagtaatttgcccaggacacacatctagaaagggccagagctgagattcacgctcaggtctatctgatagagactccattgtatcaaccactccactattacctccttagaaaggttccaaactttggaaacctttctccctgccatccccacacaatttgcccatgtaacattggaaacctttctaatgtggcctcagaagagtggaatttaatttatggcaggggttagcagactacagcttttaggccaattctgtcttgctgcctgattttgtaaataaagttttattggaacacagccaagctcacttgtttatgtattgtctatggctgcttttgcactatgatggcagagttgagtagttgcaacagggaccatatggcctgcaaagccctaaattatttactctttggctcttgacataagtagtttgttgactcctgctttatggcaagattggaactccccttctatggactgtcttgatcttcttagccacagactttcacatatgccataccctccaagcaaaccttatttgtcctcatccagagaacattcctgctttccctttattgttatcttccttggtttcatttgacctctcatccccctcctgtccttctgccctctccagcctgtcatcaatggttaccgaaataagtccaccttctctgtgaaccgaggtccagatggcaatccaaagactgtggggttctacctgggaacttggagaggtcagttgaaggttgtataaaccaaagactgaagaggaatgaaagggtgcagagaagtgtcagtagaagtggaaaatacrgtggccttaaagaagaagattaaattggaagtctttgatgcagaacgtgatcacaaggttgattacggatactgctaatgggtagtcattgtaacacagtgatagaaaatgcaaccctcgccctttcttcctctaaaagccatatatgcctgatacctagtaaacacttagtaaatgctggcgttgttgctgctgctgtctcatcatcattgttgtcatcatcattttatgctgctttctgcagtgggagcaatctccttgttagagttgtcttcctatttcacatccccatatctctgaaaattatttctgtggtaaatctaccttaaaagaattggtaggggaggtgtgtatcggtgaggggaatcacagtggcatatttctgaaacttactttcagttatcccttcccagattccattcctgagctttttttttttttttttttttgagatggagtctcgcactgtcacccaggctggagtgcagtrgtgtgatctcggctcactgcaacctccgcctcccgagttcaagtgattctcctgtctgagcctctgagtagctgggattacaggtgtgcaccaccacacccagctaatttttgtatttttggtagagacggggtttcgctatgttggccaggctggtcttgaactcctgacctcaggtgatccactcgccttagcctccccaagtgctgggattacaggcatgagccactgtgcttggcccattcctgagctttctgtttgcccattttcaataaatccacttgaaataccatcatttgatattagtcacacagtttaatatccatatgccttaaactacagttcgttagggcgtgcacttggcttttttccctcctgtgtgctgaattaaatgactgtgacgtcagtgttctattattcagtaatagaaaaataaaacccattacattttatttccctcttaaaatctgaacagaaaacagacgtcatatagtgcatttgtggcgtgagagaaaatattgagtagcttcataaataattagctgcttaatggctagaccaggaaataattaggttttctctgaaaagtggccatgagattgtatttgcttcttcatatctacatatgccactttgacgatagaaatttgagttgccaggcattttcttttaaataatcttttaagaataaaaccatgcaaattatttttctttccatagatgggaacgttgtctgtgtgcagtctaatcatctgaaaaacatccctgagaaacacagtcaagtggcgcaggtaaaatggaacaagagctgsttgagaatggcctggagcattgtagtctacaacagcaacatccctgacattttgataatagagccaattctagtgctagagggaaggaggggctctgtactgaaagcataccttctaactatggagaaaacattgctaggttttcatttcagaaagagtggagaggggaagagagaactgtgtccattattgtaagtatcaggcatctaaggactttttcatagtagggatgtattaggaagaagtgctgatgagggtactatagcaagtgtcaggtgtctgaagtatttggaaggctagtgttttcagcagaacagaattgaggaatatgaggtgaagtggtgataagatagtacatcatgagcttggcctctgatacgtttttttctttctttcttttctttctttcttggatgaggtcttgccatgttgtgcaggctggtctcgaattcctggcctcaagcaattctgccaccttctgtatcccagagtatgctgggattataggcatgagctaccgtgcctgacctctgagacacttattttttattttttattttttgagacagtctcattctgtcgcccaggctggagtgcagaggcatgatctcagctcactgcaacctccatctcctgggtttgagcaattctcatgcctcagcctcccaagtagctgggactacaggcccatgccaccacacccagctactttttgaatttttagtagagatgggttttcaccatgttggccagtctggtcttkaactcctgacctcaagkgatccacccacctcggcctcccaaagtgctgggattacaggtgtgagccactgcgcctggtctttttctagttctttatgtcaaattactgtgtcccttgaaataattccactctgtagttaagccactaactggatacttgatacacaggttctttttttttccattttgctttcaaattttacagattttttaaaatttaaattttgttttatactttaaaaaaatatttactaggttccaaaatcaagtctacaaaataaaggtatattcagggaggtctagctttcacctctgacccctctacccagttccctccctgccatgggtaaaatttttttttttatttttgctgatttcagaaaatgtaggccaggcatggtggctcatgcctgtaatcccagcactttgggaggttaaggcgggtggatcacttgaggtcaggagttcgagaccagcctggccaatatggctaaaccccatctctactaaaagtacaaaaattagccgagcgtagtggcgcacgcctatagtcctggctactcaggaggctgaggtatgagaatcgctagaacctgggaggcagaggttgcagtgaactgagatcgcaccattgcactccatcctgggtgacagagcgagaccatgtctcaaaaaaaaaaaaaaatgtaggccaggcacggtggctcacgcctgtaatctcagcactttgggaggccgaggcgggcagatcacctgaggtcaggagttcaagaccagcctgaccaacatggagaaaccctgtctctactaaaaatacaaaattagctggatgtggtggtgcatgcctgtaatcccagctacttgggaggttgaggcaggagaatcccttgaacccaggaggcggaggttgcggtgagccaagatcatgccastgtactccagcctgggcaacaagagtgaaactctgtctcaaaaaaaaaaaaaaaaggaaatgttaatagatatttgtgtcttccccgctttcatagttaaaaggcagcctactgtatacattgttctgcatcttgattttttttcacagaataatatacttgacttttttatagttgcatagtcctacatattaatagtataatgtattttgcatctttttgtttttattggcatgaataattacctcatttttccatttgctttgttttctttcttctctttctttctttctttatttttttgtgtatggagtctcgctctgtcgcccgggctgtagtgcagtggcgagatcttggatcactgcagcctccacccaccaggttccagcaattctcctgcctcagcctcctgggtagctgggattacaggcacacaccaccacgcctggcccatttttgtatttttagtagagacgaggtttcaccatgttagccaggctggtctcgaacttctgacctcaggtgatccgcccgcctcgccctcccaaagtgctgggattacaggtgtgagccaccgcacccagcctccttcattttctgtaaaccaattgctaatttcttttctttcttttttttttttttgacttggagttttgctcttgtcgcccaggctggattacaatggcgcagtcttggctcactgcaatctccacctcctgggttcaagcaattctcctgcctcagcctcccaagtagctgggattataggggcccgccaccactcccagctaatttttgtaattttagtagagatggggtttcaccatgttggccaggctggtcttgaactcctgacctcaggtgattcgtccaccttggcctcccaaagtgttgggattacaggtgtgagccaccgtgcctggccgccaatttcttcccaaatgctttataagatctgtcagatattcatcaatattttccatatctcaaaagcttcagttgaagtttttccctgaagacctttttcctggagtctgccatcctaggcccagcctgtcttctgcatggctgttatcctggggcttcttttgctggtctctagtcttttttttttttttttttgagacggagtttcagtctttttgcccaggctggagtgtaatggtgcgatcttggctcactgcaacctccaccktccaggttcaagtgattctcctgcctcagcctctcgagtagctgggattacaggcaccagccaccacgcccagctaattttttttatattttattttatttatttatttatttttttgagatggagtctcgctctgtygcccaggctggagtgcagtggcgtgaacttggctcactgctacctctgcctcccgggttcaagcaattctcctgcctcagcttcctgaatagctggaattacaggcacatgccaccacgcctagctaattttttgtatttttagtagagacrgggtttcactgtgttagccaggatggtctcgatctcctgacctcgtgattcgyccacctcagcctcccaaagtgctgggattacaggtgtgagccaccgcacccagcccctcttcctgaatttttttttgagaggggtctcactctgttgcccaggctggagtgcaatggcgtgatctcagctcactgcaacctctgcctcctgtgttgaagtgattctcctgcctcagcctcccgagtagctcagattacaggcacctgccaccacgcttggctaatttttgtatttttagcagagatggggtttcaccaggttggcatgagtggtctagaactcctgacctcaaatgatctacccaccttggcctcccaaagtgctgggattataggcacccccggtcccctctccctcattttctatgtgctctctattcttcctattagatttggggaccttatggattgcttctgttatcttccgttcatttctctctcctgtttttcatctctttgcctttttgttctttttgtgaaattttattgacctacataccaacagctttattgaatttgtctctatcattgtgtctttaattttcaaaaggtttttcttgttctctaattgctcctttcatgtagcattctgttcttttttagtaatgtaacattaacttatctttctatttgcttttttttttttttcctacgacagagttttgctcctgttgcccaggctagagtgcaatggtgcaatcttggctcacygcaacctccrcctcccgagytcaagcaattctcctgcctcagcctcccgagtagytgagattacaggcacatgccaccacgcccagctaatttttgtgtttttaatagagatggggttttgccatgttggccagactggtctcgaactgttgacctcaggtgatctgccgacctttgcctcccaaagtgttagcattacaggcgtgagccaccatgcccagcctctatttgctttttttcctgtttgaagtgtctgctttcttctggatttttttcctgtgtatttgttttgggcattgtcttttataatggaggtgttaaccaaatagctggtaatacttggctggctgttcatatttaagagtgaggccttaggaccggtgtggtggctcatgcctgtaatcctagcagtttgggagtgtgaggtgggtggatcacttgagtttaagagttcaagaccagcctggacaacatggcaaaaccctgtctttactaaaaatacaaaaaaatttagatgggggtggtggcactcacctgtagtcccagctccttgcagggctgagacagggggattgcttgaacccagcagttcgaggctgcagtgagctgagatgatgccactgcactccaaactgggcgatagagcaagaccctgtgtcaaaaaaaaaaaaatagtgaggctttgaccagttaatagttcatcttgagtgggtttactgattcttggatttactgctggtgattgcagacaagtcttccatgtctctgtctcttgagttattttctctgaggttattcagttcctataaaaaattatatccaaatctcctgcctggctgctggccttctggaatgaggtatagaaaggggcccagatctcacaccattaagaatgcagacttatgcttggtgtggtggctcacgcctgtaatcccagcactttgggagcccaaggcgggcggatcacaaggtcaggagtttgagactagcctgaccaacatggtgaaaccctatctctactaaaactacaaaaattagccaggcacagtggcaggcacctatagtcccagattctcaggaggctgaggcagaatcgcttgaacccgggaggcggaggttgcaatgagccgagttcgcgccactgcactccagcctgggtaaaagagcgagactccatctgaaaaaaaaaaaaaagaatgcagatctatataggcttttcctgcttccatctttctgccaccatcaatgtgtccggtatctccaagttctgaactttgatgggttcagtttctcctgagaaaaacatcttcagtctcctggtagaggaagatggaagtttttggtaggatgaagacatttgccagtttttgtttgtttgtttgtttgagacaaagtctcactctgtcgcccaggctggatggagtgtagtggtgtgatcttggctcactgcaacctccacatcctgggttcaagcagttctcatgccttagcctcccaagtagctgggactataggcacgtgccactgtgcctagctaacttttgtatttttagtagggacggggtttcaccatgttggccaggctggtctcraactcctracctcaaatgatctacccgcctcagcctcccaaagtgatgggattacaagtgtgagccactgcacctggccaacatttgccagttttgcatctagactttttagccaaaccctgagtttagtcatgcatcttaccccatctcagcttcctgcagtattttgcacctttaggtgtgagccttaccaggattgtgtagagcagataagccttttgacttatcaggtccccctctgtggtcactccagatgtggcttccttcaccttgctaagtcacttgtcacttcactctgctgtccatcttctgagattttactgagtttgcttttctgttgtcttctctcccattatctttgttctttcatttatttattcaacaagtacttttgcacccctataagttcaaggcactattctagatgcttaggatacagtaatgaagaaaataagttcccttgtgtaatttaaattttagttgtgggggagacagattttttaaaaaataagtaaatcatatgatatgttgaaaggtgataagtgccatgggaaaaaatagagtaaggaggataaaaagttgtgggggctggaggaagtatgggttgtaatttaatttaatttaatttaattttaattattacttatttatgagaaagaatcttgctctgttctttctgagcagaaatgaatgaaatgaaatgaaagatcctacagtgcatggatcagccccctacaataaagcattttctgcccccaaatgtcagtagtgctgatgttgagaaaccctggaataaggacttaaaggaagtgaaggtgttagccatgcaaaggtctgagggaaaaacattttaggcaaaagaaagagctattgcaaagaccccaagatgagmgtgtggctggctttttggaggaattgacagtagacccaggcaaataagaggaagaatagtaggagatgaggtgagagttaatggtagtgactttggcttttattctgtgtattagtctgttctcacattgctataaagaacttcctgagactgggtaatttatgaagaaaagaggtttaattgactcacagttccacatgcctgggaagcctcaggacacactatcatggtggagggtgaagcaagcacattttactatggtgaagcaggagagagagagaagaaggggaatgtgccacacacttaacaaacaaccatatcctgtgagaactccatcaccagaacagcaaggggaggtccacccccataactcaatcacctcccaccaggccactcccccaacatgtggggattacaatttgagataagatttgggtggggacatagagccaaaccacatcattctgaatgaaatggggaaccatcagaggttttgatggggtgagggaggaatgtcatgatatgatttaatgatcaatctggctgttgtgttgagaatggattattggtgggggcgtggttggatagaagcagggagacaaattgagagaagctgtgcagcagtaatccaggtgagagatgatgtagatcgatcagtggtaacagtggagatggatatacattgagggtagaacaacaggatttcctgatggattgagtgagaggtataagagacagagagaagtggctgggcgcagtggctcacrcctgtaattccagcactttgggaggctgaggtgggcagatcacctgaggtcaggagttggagactagcctggccaacatagtgaaaccccatctctactaaaaataaaaaaattagccggatgtggtggtgggcacctgtaatcccagctactggggaggctgaggcaggggaatcgcttgaatccaggaggtggaggttgctgtgagcctaaaccgcgccactgcactccagcctgggtggcaagagcgacactccgtctcaaaaaaaaaaaaaaaaaaaaaaagagcaagaagtaaaaaatggctctaacaaggacattttttggaggtaatgaatgtgtttagtacccttggctggtgggggttggtatcccaagtatatgtatatgtccaggctcatcaaaatgtatacataaaaacaggtgcaaattttatatgtcagttataccttaatataaaaaaaaagccccaggtgttttgtgtagagcaagtggaaggatgaagttactgtcaactgagactggaaagactggtagagcagatttgggttggaggagatgagtagttcagttttggtcatgttgtatttgaggtgcctattgaacatctgaatgggtatgttaagtagttggatatattcgactggggttcaagagagagaaatccaggagttgttagcatgtagatgtcatttaaaattatgaggctggcaagagatcaccaagggagtgagagtagatagaaaagtgaagaggaacagggaccaatccctggggcactctcattttaagaggtttggaagaagaggaagaaccagtaaaggagactgaaggaacggtcagtgaggttgtaagaaacaggagtccgtggctcacgcctgtaatcccagcactttgggaggccaaggtgggcggatcacaaggtcaggagatcaagaccagcctgaccaatatggttaaaccctgtctctactaaaaaaaaaaaaaaaaatgcaaaaattagctgggcttgttggcgtgcgcctgtagtcccagctactcagaaggctgaggcattagaatcgcttgaacccgggaggcggaggttgcagtgaaccgagatcgcgccactgcactccaacctggcgacagagtgagactccatctcaaaaaaaaaaaaaagaaagaaactggagtaaggtttccctgggagccagaggaagaaagtaaacagagaaggagtggcttatcacctgtgcccaatgcttgccgataggtcaaggaagtgaggacttagagtggaccattggatttcataacaaggaggttgggggtgaccttaatgtgtactgttttygcggagtagtggtgacttgattcagatgggtgagtagaaggagaagaatgggaggcagtgaataggttcagttcttgtgattagttttacgacaaagaggagcagagttggggaatatagggtcaagaagattccttttttattctgcttaaaatgggagagtaaaagcaatctgatagtatattgatgggaatgatccagtactgagcgaaggcaatgatggtgcaggagagagaagggagaattgttggaaacaatgaacctaaataagcttatgcctttttaattcctttgtttcattttagtaggattttcacttagtaggatttttaggtggaatattctgttattttaggtggaatattctgttattttaaccagaagttccctttaatcttaatacttacttaagcattcccatataagaacaggagtttcagtttccatcttacagtgaagaaaccaagaccctaggtcatacagtggagaagctgcatttcatatttacccattatcttttaggtcaagctcagtttttcaattaccatccttccagaacctatatgactttttttttttttttttttgagacggagtyttgctctgtcacccaggctggagtgctgtggtgtgatctcggctcactgcaacttctgcctcctgggttccagcgattctcctgctcagcctcctaagtagctgagattacaggtgtgtgccaccacgcctggctaatttttgtacttttagtagagatggagttttaccatgttgcccgggctggtctcaaactcctgacctcaggtgatccacccacctgccttggcctcccagaatactgggattataggcgagagacactgcaccaggctttatatgatatttgaatcttgcttccaaaaagcatttctttctaaccagccagtaaacaacagttgaactagtcagaatttctttcttccttcctctctttttttctttctttccttccttccttcctccctccctccctcccttccttcctccctcccttctgtccttctctctctttctgtctctctttctttccctccctccctttcttcttctttctttctttcttttctttctcttttgatggagtctcactctcgcctaggctggagtgcagtggcacaatctcagctcactacaacctccaggttcaagcgattcttctgcctcagcctcccaagtagctgggattacaggtgcccgccaccatgtctggcaaaattttgtatttttagtagagacggggttttgccatgttggtcaggctggtcttgaacccctgacctcaartgatctgcccacctcggcctctcaaagtgctggaattacaggtgggagggatcacgcccagtggaactaggctttctttaaatcaccaaccttaaaatttgaaaactatgttgagtaaaaatcaaggacatcttatatgaaattatagcaaaagtgatcaagtacaaccttaattgatcttacctctcaggtagcactgtttttttgtataattcccccctttactacataatttgtggtttgtttgagaacccagtggacccagaacacatgcattatgagaacaaaaggacctagtaaatcagatggtgtttcctgttatggcagcaattggctttaaggatttttgagatcacaacaactaaatcaggattgcatttgacttgtatataccaggaggaaatggaggatctgactaagccataatatagttggtaccaggttatatgaaaaaatatagaaatgatgtgcttatatcaggacattaaaagtaagagtggaatcatagcagcttagtaatacattaggaattcacagaaagggaagattattttccataaataaactgaagttctaaataagaatacctttcctgttcagtcattcataaaatttttcaataatatttattgaacacatatgtcagactaaggaaacaactctagctccatggagcttacagttcaagatataattgatagcatcctctgtaaagttacagggcagggatcatgattcttttttttttttccgagacacaggttgcccaggttggagtgcagtggtaagatctcggctcactgcagccttgaccacctgggctcaggcgatcctcccaccccaccttcttgagtagctggggctacaggcgtgtgtcaccatgcctggctaattttgttgttgttgttgctgtttttttgagatagagtctcactctgttgcccaggctggagtgcagtggtgcgatcttggctcactgcaacccgcctcctgggttcaagcaattctcctgcctcagcctcccaagtagctgagattacaggtgcctgccctgatgcccggctaaattttgtatttttagtagagacggggttgccatgttggcccagctggtctcgaactcctgacctcaaagtgatccacccgccttggcctcccaaagtgctgggaatataggcttgagccactgcacccggcctaattttttttattttttgtagacaggccatgttgcccaggtggtcttgaactcctggacataagcaatcctcccacgttggcctcccaaagtgctaggattacaggtttgagccactgtgcccagtcaatcatgtttcttatatcactgtatttgtctgcaagggctgccattacaaaatacggcagactgagtggcttaacagaagtttatttcctccttgtctggaagctagcaagtctaagatcagagtctccactgatttggtttctgctgagacctccctcctcggcttgcatagacaccttcttgctgtgtccacacatggtctttttctttgtgcacccaaccttggtgtctctgtgtgtccacattttctcttataaggacagcaggcatggtgcggtggctcacggctgtaatcccagcactttaggaggccgaggcaggaggatcacctgaagtcaggagttygtgaccagcctggccaacatggtgaaacctcgtgtctactaaaaatacaaaaattagccaggcttggtggtgggcatctgtgatcccagctactcaggaggctgaggcaggagaattgcttgaacccgggtggcggaggttgcagtgagccgagatcatgccactgcactccagcctaggtgacagagtgagactccgtctgaaaaataaaaaataaaaaaaggacatcagtgagattggattaaggcctgccttaactgcctcattttaagtaaatcacctctttaaaggccctgtctcaaagtatagacacattttgagtactggtggttaaggcttcaacataggaatttttgggggacacaatgtaacacaaacaatcacctagcatgagtaaacagctgtgaaacttgctagttttgcttgtgtaataattcggttctcttcctagtactatgaagtattccttcgacagtctccattggagccctgccttgtrtttcatgaaggtggatactggcgtgagctcacagtccgcaccaatagccaagggcacacaatggctatcatcactttccatccccagaaattaagtcaggtgagcctcacaagatgttaagcaaccttaacttttactactactaactataactgtaattggttttttggaagtttcagggcatatagcagaaacagtacatccacagaatatttgtgtcaattggggagaggggttagggatgaggagaagatggcaaggatactatttaaccatactgctcgcataatcaaaccacagagactgtggctaggctgccaagttaattaccatgtgagaactcccaagtaatttcacaagaactttgcccatggtagtagttgctcttccaaatccaaatgccaattcaatagagactgcagtgtcagaatttcataacccaaatagtgctttacatttgtcatgcacttggtgctttcaaacatacctgtgttaaaacattcgtatacttatgtgatcatctcaacaaacttgtaaagtaggcaggaggaaagatattgtcaccctcattttacacctgaggaaatggaggcatagaaatacccaaggttaaagaatcagtaaatagcaaagctaggatttgaacccaggtcctttgatgcctgatgtttttaaccctattgttcctacatggtttattgcaatatatcctggtatcaagctaatacttaggctttctgtagttatgtaagaattttattttttatattttgagacagtgtctcactctgttgcccagattggagtgcagtggtgcaatcaaagctcactgtagcctcaaactgctgggctcaagcaatcttcccacctcagcctctcaagtaactgggactacaggcatacgtcaccacacctggctaatttttttgattttttttttttttttttgagacagagtctcgcttcttcacccaggctggagtgcaatggcatgatctcagttcactgcaacctccgcctcccgggttcaagcaattctcctgactcascctcccaagtagctgggattacaggcacgtgccagcaygcccggctaatttttgtatttttagtagagatggggtttcaccatgttggccaggctggtctggaactcctgacctcaactgatctgcctgtcttggccttccaaagtgctgggattacaggtgtgaaccgccgctcccggactttttgatttcttgtagagacaggatgttgctatgttgcctaggcttgtcttacactcctgggctcaagcagtcctcctacctcagcctctcaaagtgctgggattataggcatgaactatcatgtctggcctgctttatgttaagtgttatttataataagatttgtgaaatgtcttcacatctgactactgcagggctgattactatagagcttagagagaaaatttgtcagagatgagtctttgcttaactgctaattttatggtctgggcaggaggagctccatgttcagaaggagattgtaaaggaatttttcatcagaggtcctggagcagcctgtggcttgacctcactttacttccaggaaaggtaaacctgggacagccaaataggctgatggcttgccagactcttggtttatggattgctgatgcagggttgctgattgatggtggaggatattggctaaatggttctggtccttgtacaccagctgggtcttggaacacaggccagaatgtagatgtgagagtgtccacatggactttcatcccctgagggggaaacccttgcagagctctcagggccacggcaaggactgtgtctcctagctgagatgctggggcctccctgtctacccaaccactagggatgtgatggtctgccatttcaagatgcttttttttgttttgctttttttttttctttgagaccgagtctcgctctgttacccaggctggagggcagtagcacaatcttggctcactgcaacctctgcctcccgagttcaagtgactctcctacctcagcctcctgagtagcttggattacaggcatgtgccaccacrcctggctaatttttgtattttcagtagagatgagatttcaccaygttggccaggctggtctcgaactcctgaccttaggtgatctgccygcctcggcctcccaaagtgctgggattacaggcgtgagccaccgctcacagctcaagatgctttcttcttttattcctttccagtaccatgacccgttgcagccatcagcagtctccctatcagcttctgtttggggaaccctacatctttgaagaacttctgagcttgaagatccgcatctctccagatgcctttttccagattaacacagctggtgcagagatgctgtatcggactgtgrgggagctgactggagtgaactctgacaccatccttcttgacatctgctgtggaactggcaagtggaagcccagggcagaatctgcatgctgctcagctcccaaggcccttgtagcttgcggaggtggtcggggagaggtagtggtagtggtgcaggtataaccttgtcggtctaaaaccctacaactgcagccaagtgtggttgcttatgcctgttatcccaacactttgtgaagcaaggcaggaggattggttgagcccaggagttggagactagcctgggcaacatagtgagaccytgtctctacmaaaaatttaaaaattagctgggcatagtggcgtgaacctgtagtcttagctactcagggggctgagagaggaggattgctttagcccgggaggtcgaggctgcagtgaactgtgattgtgccattgcactccagcctaggctacagagtgagaccctgtttaaaacaaacaaacaaactaaactaaactaaacaaaaaacaaacaaactaccacacctaaaccctaaaatgccttcttcttcttctcgtttacttcttcaggtgtgattggcctctctctggctcagcatacatctcgggtccttgggattgaattgttggagcaggcagtggaggatgcaagatggactgcagccttcaatggtacacagcttacagtctgtgtagaaattaagggatgcagttgtttctgtgctatggaaagagttgtgtgggaaaaggcaactactgtatccctgacccacagggaggaagggagggaattctggaggggtcagaatggttttctgaaatagatcctcatggttttctggaataggtaccaatatctaacttttttcctatccagaagaggaacctaagggaagatacatgtctagctgataggaaacaaagttgcaaaactttggacagaatagaagaagaatctccttggcattagactcacgaggccttatagcataatacaataggtgtcaaacctatattttcagcaacaaaaccttttcttcaaacacagtcttctgtcaaactgcaatatagaaaatagatcatcttgccctcactacttcacctacagaaagctcctgaggcatttggtgaaaatgtctgatatagcaggaagagcacttgaccaaaagtcaaggttctcatcttggtataggtccttgcatgctatgtgagttgtgaagttgtaaaatagccgggcatggtggctcatgcctgtaattccagcactttgggaggctgaggtgggtggatcacgaggtcaggagttcaagaccagcctggccaagatggtraaaccccatctctactaaaaatacaaaattagccggtcgtggtggcaggcgcctgtaatccaagctactcgggaggctgaggcagagaaytgcttgaacccgggaggtggaggttgcagtgtgccgagatcgcaccactgcattctggtctgggtgacagagtgagactctgtcgcaaaagaaaaaaaaaaaagtgtaaacactagttgctcaagctgaaaggcttactgagatattccaagggaaagtactttggaaaaaatgaagtgggtctgtccaaaagcacttctttccttgttacttggagtgatgctagatccaaagggaagatggcagagcccttggctcctgtgcgtttctgtgaagctgaagctttcccttactgctgggcttgagttatgtcctgtgggcctgtcttccataggcatcaccaactctgaatttcatactggtcaagcagagaagattttgccagggctgctaaagtcaaaggaagatggacagtcaattgttgctgtggtgaacccagcccgtgccggactgcgtaaggatgaacagctattttgatgttcccagtattgtccatcaactttggttcttcttttccacaccatgctacgggtgctcccagtgggctggctctgaacctgtttcccctctatttctaatcaatcctgagttctggtcagttggaagtttgtgataacagagaccatggtagttaattatactaatagcaaggtgtttcttccttcagattacaaggtgattcaagccattcgaaacttcagggccatccacacgctagtttttgtttcctgcaagctccatggtgaatccactaggaatgtcattgagtaagtcttgacttctgtttaaaattttttgttctgattatcaaagccattcatgcttattgtacacacaattggaaagtgatttgagctttcaagtcattagaagtgtaaagaaactgaaacaaaaaaaataccacctttaagactcaattacagggctgggtcagggatgaggcaagtcaggtacttagtttgggtgcaaaatttaagaatgtgtcagccgggtgcggtggctcacgccagtaatcctagcactttgggaggccgaggtgggtggattgcctgagctcaggagttcaagaccaccctggggaacacagtgaaaccccatgtctactaaaaaaatatagaagattagctgggcatggtggcgtgcgcctgtaatcccagctactcgggtggttgagacaggagaatcgcttgaacccgggaggcagaggttgcagtgagccaagagccaagatcgcgccattgcactccagcctgggcgacagagagagactccgtctcagaaaaaaaaaaaaaaaagtgttaaaaatctcagcaatcaagatattttttgtttgtttctattccactacagctttttttaatggctaaatttttagtgcaatattttcttttcttttgagacagagtctcactctgtcacccaggttgagcacagtggcacaatcacggctcactgaagtcttgacctcctggggctcatgagatcctcctgcctcagcctcccaagtagctgagactacaggtgcacaccaccacacctggctaatttttaattttttttgtagagacaaggtctcactatgttgcccaggcttgtctcaaactcctgggtgcaggtgatcctcctgcatcggcctaccaaagtgcctggctaatttttttgatttttttatagagacgaagtctcactatgttgcccaggctggtcttgagctcctgtgctcaagtgatcctcctgccttggcctcccaaagtgctgagattacaggcatgagccaccatgtctggcccaatattttcaaatatcaaaattaatccaaaataattcatgatgaacaaaatattacatttttttaaaaaggtgggaaaggtgggatctgcccttgtgcttgttgaaccccgcctcagtgagccttacctgaattctggctttggttccaataaaaccttataaaagcaagtggctagcctgtaggctgcagttttccaatttgatattctaaaatattgcatcaaaacattcaattactgagttttttggcaccctattaaattttgcacccaatgcaagtgcctttcacttcactctagttctgaccctggtcagctattttgatttttgaaatctttatattttgtaatctttttctctctcactttttactataagcaatataatttatttgtagcattgaaacaacagacaggtataaagtacagattatatatttgaatgaaacaaatgagaattaaaaattatgtaatcattatatgtcaatgtataaaaaacgaagtgatttgagctttcaagtcatgagctagaaaaagaacaataaacccaaaggaaactgaaggaagaactcaataatgattttaaaaatccataaattaatgacttacaaaacaaaaaaacctgtagatttgatgagaaagcgagaaggtgttattggaagaaaaaaattaaataaataagcctaatcaacaatattaaggggcaaaacacaaaaatatagtcttaaatgagaaagagagcataactacagataggaagaaattttttttttcctgagacggagtcttgctctgtcgcccaagctggagtgcagtggtgtgatcatggctcactgcaacctccgcctcccgagttcaagcaattctcctacctcagcctcccgagtagctggaattacaggcacgtgccacatgcctggctaatttttgtattcttagtagagacagggtttcaccatgttggccaggctggtcttgaacttttgacctcgtgacccgcccaccttggcctcccaaagtgctgggattataggcatgagccaccgtacccggcccgataggaagaaattttttaaaattaaaagaaaatatttctgggcacagtggcccaggcctgtaatcccagcactttgggaagaggtggtgggcagatcacctgagtaatcccagctgctcgggaggctgaggcaggagaactgcttgaacccaggaggtggaggttgcagtgagctgagactgcgccattgcactccagcctggacaacargagtgaaactccgtctcaaaaaaaaaaaaaaaaaaaaaaccacgaaaattagctgggcgtagtggcacatgcctgtaatcccagctacttggcatgagaatcgcttgaatccaggaggtcaaggctgcagtaaactgaaatcacgccactgtactccagcctgggmgacagagtgagaccctgtctcaaaaaaaaaaaaatcaaaatttaaaaagatgttttgtgctacaaataccattgagaaaggtgaaagacaagccacagaataggagaaactatttgcaaatcattcataagggactggtattcagaagccagacacaaaagaccacatattatatcattccatttataggaactatctagaacaggcaaatctgtagacaaagaaagtagataggttgttgccttggtctgggggtggggctttggagattaaatggggcttgattgctaacgggtgtttggtatcttcttcagctaatgaaatgttctgaaattgattgtagtgatagatgcataactctgtgaatatactaaaaaccagtgaactgtatgaatgggtgagctgtatggtgtgtgaattgtttttttgttttgttttgtttttttgagactgaatctcactccgtcacccaggttggagtgcagtggcatgatcttggctcactgcaacctccacctccctggttcaagcaattctcctacctcagcctcccatgtagctgggattacaggcacctgccaccacgcctggctaatttttgtgtttttagtagagacagggtttcrccatgttggccaggctggtctcaaactcctgacgtcagatgatctgcccaccttggcctcccatagtgttgggattacaggcgtgagccactgtgcccggcatggtatgcaaattatctcaataagactattaaaaaaatcattaatttatgcatgatgaaaagcactgtaagcaaagacaggagacagcatacaaactggaaaataatttgcagttcacatcacaaagacttttttccttaatctaagaaactcctagaaattggtaagctgagactgcaccactgtactccagcagccaatagaaaaatgaaccgaggatatgaaaaggcaatattataaaggtatttacaaaatatgagaggacgctgtctctctcataatgatagaaatgcaaattagaagtaccctgaggtacttctttttatacctcagattgacaaaagtacaaaagcttgataatgcattattggtaataatatgggaaaataattctaaaaaatgagttgtgtaaattgagtactaaccctgtgtaagttggtactatccctatggatggaaacttagtaatatagattaaaattacaaatgtatatataccctttcacatggtaattccattcctgaggttttatcctgtagatactctcacacacataaaatgacatatctacaaagttactcattgcaatatttaacaggaaaagttgaaatactcccaaagtccattagtggggaactggttaaatcaactatgccacatccattcaatgaaacactacactgctataaaaaatgcagatgttctctatgttctgataataagagatctctaaggtatttttttaaaataatagctttattgagatacaactcatatatcatacaattcaactttttttttttctaaagagatgaggttttgctgtgttgctcaggctggccttgaacccttaggatcaagcagtcctcctgtgtcaacctcctagtagctgggactatgggcatgtatcactttccccrcgtacttcacccacttaaagtgtagaatttggctgggtgcagtggctcacacctgtaatcccagcactttgggaggctgaggcgggcagattccttgagcccaggagtttgagaacagcctgggcaacatggtgaaaccctgtctctagtaaaaatacaaaaattagctgggtgtagtaatgtgcctatagtcccaggtacttgggaggctgagataggcggatcgcttgagcctggtggggtcaaggctgcatgcagtgagctgtgatcactcaacttcactccagcctgggcaatagagggaaatcctgtttcaattaaaaaaaaaagtcagtatgtgcatatggtagaaaaaattcaaataaaccagacacagtggctcatgcttataatcccagctactcaggagggtgagttgggaagatcacttgagtctagtagttcaaggctgcagtgagctatgattgtgccactgcactccagccttagtgatagagtaagaccccatctctaaaacagtaaaaaaaagagagagaaagaaaattcaaataatacaaaagaatatagggtaaaaatgagtttcttactcctgacccctagtctttcagatgtcaccactctgagcagtttcttgtgtggactaccagagatattctgtgacactacaagcatgagtgcatgtgtgtgcacacgtacgtgtgtacatactagctctccttttttatcaaacaagtagaagcatactataagcactattctatttgatgcttttttttgggggggatggagtcttgctctgttgcccaggctggagtacagtggtgcaatcacagttccctgcagccttgacctcctgggctcaagcaatccttccacctcagcctcctaagtagctgggactataggcgtgagtcaccacaccaggctaatttttaaaattttgtagagtcagggtcttactatgttattccagctggtcttaaactctggggctcaagctatcctcccacctcaacctcccaaagtgttgggcttataggcatgagccattgtgcctggccagctttttattatgaatgggatcttttcatgacattttcttttctttttttttttttttttttgagacggagtctcatcttgctggagtgcagtggcatggtctcggctcactacagcctccacctcccaggttcaagcgattctcctgcctcagcctcctgagtagctggtattacaggtatgcaccaccacgcccagccaatttttgtatttttagtacagacagggtttcaccatgttggccaggctggtcttgaactcctgacctcaggtgatccaaccgccttggcctcccaaagtattaggattacaggtgtgagccaccgcacccagccttcatgacattttctcattagttattgccaatctggtatacagctaccttactctattattagttttattcattttttagttgattctcacattgttgtggtagctgaccatatgatcaccatgtaaaaataattctgtccctctccttctaatactcattttttccttttgcttattatattgcataagaaaatgttccattgtagatgtgatagtgaatatttttgtcatgtatttgattataatgggataatgctatttaaactacagtcttgtgtcgcataataacatttcagtcaacaatggactgaatatatgatgttggtgccataagattataatggagctgaccgggcgcggtggctcacgcctgtaatcccagcacttcgggaggctgaggtaggcggatcacttgaggtcaggagtttgagaccrgcctggccaacgtggtaaaagcccgtctctactaaaatagaaaaattagctgggtgtggtggtggtgtgtgcctgtaatcccagctatttgggagactgaggcaggaaaatcgcttgaatccaggaggcggaggttgcagtgagacaagactgtgccactgcactccagcctgggtgayagagygagactcygtctcaaaaaaaaaaaaataataaatttccaatttcatccatgtccctacaaaggacatgaactcatcattttttatggctgcgtagtattccatggtgtatatgtgccacattttcttaatccagtctatcattgttggacatttgggttggttccaagtctttgctattgtgaataatgccgcaataaacatacgtgtgcatgtgtctttatagcagcatgatttatcatcattctcagtaaactatcgcaagaacaaaaaaccaaacaccgcatattctcactcataggtgggaaytgaacaatgagaacacatggacacaggaaggggaccatcacactctggggactgttgtgggttggggggaggggggagggatakcattgggagatatacctaatgctagatgatgagttagtgggggcagcgcaccagcatggcacatgtatacatatgtaactaacctgcacattgtgcacatgtaccctaaaacttaaagtataataataataaatgaaaaaaaaattataatggagctgaaaaattcctatggcctagtgacatcatagctgttgtaacatttcagcacatgggttacttacatgtttgtggtcatgctggtgtaaacaaacttactgtgctgtcagtaggtttgtttacaccagcatcaccacttataaaattaagtacatatagttatctatagtacataatactggataataaaatgactgtgttactggtttatatactttctatactatacttgtattattttagcagatactccttctacttatgttttaaaagttaactgtaaaacagcctcaggcagatccttcaggaggtattccagaagaaggcattgttatcataggagatgacagctccatgtatgttattgcccctgaagaccttctagtgggacaagatttggaggtgcaaaacagtgatattgatgatcctgtcccaggctagagtatagtggtgtgatctcagctcactgcaacctttatctcctgggctcaagacatcctcccgcctcagcctcctgagtagctggcactacaggtgcgagccaccatgcccggctagtttttgtgttttttgtagagacagggttttgtcatgtggccccggctggtctcgaacttctgagctcaagcaatcctctcacctcagcctcccaaagtgctgggatttcaggcatgagccaccatgcccggaccttattttatttattttttattttttggtaacgacagagtctcgctatgctgcccaggttggtattgaactcctggtttcaagtgattctctggcctcagcccccagagtagctagaagtacaggcatgtactaccacacccaactaattttaaaatcagttaaaaattaaaattagaattttgtagagatggggtctcactatgctgtccaggttgaccagtttttctactatatttttacagtactttttaatgtttagatatataaatacttaccactgtgttacagttgtctacagtattcagtacagtaacatgctgtacagatttgtagctgaggagaaataggctatagcatagagcctagatgtgtagtaggctctgtcatctagatatttgtaagtatgctctattatgttcacacagtgaagaaattgcctaacaatgcaattttcagaatgtacccccatcgttaagtgatgcatgactgtattgaatattacccaggcaaacaaatactcttctactttgctggttgggatataaattggtacaaccctttttagaacagtttggtggttatgtatcttaaggccttataaacatacaggctcttcagctccatttaccaaatatgtattgaacccttattctgtgccacatactgggaacccagagatgaatattaagcagtgtttacttcatttctacccttaaaaagattaaaattcagtaaggaagatggtgaagaaaaacgattatattaaataagataaatgctgtataagagaaacacagggggcctgtgggaacacagtggaagggcctctattttaggcaattgtattcctgtgggttcytccttttattcctgggaactgatgctrtgttctgtttctacaggctgtgctgtcctccagaccctgctaagaagctcttaggcgagccctttgtcctgcagcaagctgtacctgtggatttgttccctcacaccccacattgtgagctggtgctcctctttactcgataagcagcctcctagaagacwgcaggctatttgttaaggctgaagtttcagaaactttcaggtttggcatattgctacattgcagaccctgggagcattacagtggaaaccaatctttggtttgtgaataggaagaatctattaggcctctggtctgaggcagattttttttttgagatagagtctcactcttgcccaggctggagtgtcgtggcgtgatctcagctcactgcracctccgcctcccgggttcragtgattctcgtgcctcagcttccccagtagctaggattaaaggtgcgtgccaccatgcccggctaatttttgtatttttggtagagacagggtttcaccatgttggccaggctggtctcaaactcctgacctcaagtgatccacccgcctcggcctctcaaagtgctgggattataggcgtgagccaccacaccccgccgcggctgacttaaccttagatttcagattccctttcaatcatgcccgtttgcttgggtttgaccactccccactcctggatctggactgtttcttcctgttgctgtcagccttggttctagtttatagtcttgtctcctccgtttctgcttatggtgtggacaaatgaccttttttaagcagctggtaataattttacattgactggagcctgtgcatttgctcagagatgctacaatttttagatatttctaagacttctggattcttgaggtagttaaggattaaaaccagaaacagtcgaggttttttaaaagcagggtaagccatgaagtgaatacagggtgactgagtgatcatcagatgagattaattcttttgggttttcttggttttaaggcatctcgaatgccccttgaaaatgtagttttccctggtggtgggcacctgtaatcccagctactcgggaggctgaggcaggataattgcttgaacctgggaggtggaggttgcagtgagctgarwttgtgccactgcactccagcctgggtgacagagtgagacaccatctcaaaaaaaaaaaaaaaaagaaaatgtagttatccctaggagcaatagcaccaattaactctcacccgtggaggaagaattggttattggagagaccctaagggaaaggagattttcagagagactgaatacctataattgtgctgtgtagtgtggaggcaaaaagctccaaaatctagtataacataataaactggatattgaaaactgactgtatttaacattctctagtccatgatttcatcaactctggagttgttcttgggtacttgcccaacaatttagattatgttttgataatctaaaggcctaaggatgtgtaacttagtaagtgttgtctgattcacaaagtgatatcaggttaactggtatttttaattcttctcaatcaaacattctagagaagcctccttcttagaaaaatatggctgttaaagctactatataatgttttctattctttttttagatggtgggtcaggtatagccacaagaggagacacaggagaggctcaggaaaacaaagtctattatgcttacaggtcctagagacaggagacatattatgccacataggactacatgggaaagacaccagggtgggcaggaggcagaagacagaagaggggaaggtttaggccactgccgttacttgagtttctttgggaaaggcaatgcagggctgagtgaacagtttaggattggctactttgaataaggtataggggtgctccctagttgtctggtacctggccatggggtgattaggacactggaatgttgtctcttggggtgtccatgccagatagagggaatatagctctgaattggttagtttgtatatcaaagaaatcttccagctgaacccttgctatctataagaattatctagcccaaggaggagcagccagaaagatttattttatttttatttttttgagatggatcctcactctgtcacccaggatggagtacagtggcgtgatctcagctcactgcaacctctccgcctcccggttcaagcgattcccctgcctcagcctcctgagtagctgggattacaggcgcctgccaccacacccagctaatttttgtatttttagtagagatggggtttcaccatgttggccagactggtctcgaactcttgacctcaggtgatccacctgcctcggcctccgaaagtgttggtttatggtagttgcataaattttttcctttccttatttttaaattttatgtgatgggttatattatttttataatgaaattttcaaaaaagcaatttttttccatttattccctgtatcagcaaatggcaataccatctatatcaatcacttaagccagaaaacagagttccttttcattcctgtatccaactacctataaggtaacttcctcttggatatcttctagattcttcaaactcaatatatctaatgttgaatgctttccatctttcccttaaacatgttcttcctcctctattctcagtcttaatgaatataacagtttactcagtcacccaagccagagtctgggaatgatttttgagtccttctcctgtactattggcctcatccaatttttcacaaagtcgccatccctgcaggcttccatcatctctctccaggttattgctgcaatagtcatcttcacaactgttgctgcttgtattcactcttgccccagttcattctagcaccatggcacacacctgaaataccagctagtggggaggctgaggctggaggattgcttgaacccaggagttcaagaccagcctggacaatatagcaagaccctcttaagaaaaaatgcaaatctcatgtttctccattacttaaaatctgtcattggcttcctgttgcttttattttattttatttagttagtaattttgagacacagtctcattctgtcacccaggctggagtgcagtggtgcaatctcagctcactgcaacctctgcctcctgggttcaagcaattctcgtgcctcagcctcccaagtagctgggataacaggcgtgtgccatcatgcctggctcattttttttctttttgtatttttagtagaggcagggtttcatcttgttgaccaggctggtctcgaaccgctgacctcaaatgatccacccaccttggcctcccaaagtgctgggattacaggcatgagccactgcacccagccaacttcctattgcttttaaaataaagtccaacattattgatgaagctcaaaagccacttcataatctgaagaactccatttctctagatatattggattcctttccctgaaaaggagaaagttcttcccttttggtcctatttacattctgtttcctcagcttggaatattcttttccctaactcttctggtttactctatttacctttctgtttttaacttaaatattcctccttcaaggaatatttaatgaataaatacaggattggctatggaaaatcaacttcctcataattttgttacttgtttatagttatgccctcagagatattgcaggtttggttccagattgccacaacaaagtgaatatctcaataaagcaagtaatgtgaattttatggtttcccagtgcatataaacattgcttatactatagtctattaagtgtgcaatatcattatatctaaaaaaccagtgtatgtaccttaattaaaatgtactttattgctttaaaaatgctaaaaatcatctgagtctttagtgagtcataatttttttttttaagacagagtcttgctttgttacccaggctgtagtgcagtagcgccatcatggctcactgccaccttgaactccggggctcaagggatcctcctatcgcagcctcccaagtagctgggactacacgtgtttgctaccatgcctggctattttttaatttttttgtagtgataagatctcaccatcttgctaaggctggtctcaaactcctggactcaagcaatcctcccaccttagcctcccaaagtgctgagattacaggcatgagccactgcgcccggccaactcttcatctttagatccctcatctgtctgtataaggtatacagatacatgtataccttatacatctatcttctaagcataaggacatttttctacataaccattatattatgagttcaactaagaaaattagcagtacctcactaatcttcactaatgtcatctaatgtagttcagtgcttcttgaggtgtggtctggagactgcctgatgtttcacaaaaagataaggagtttataccaaagtgtgtatcatagtaccacattctttttctttttctttttctttttgacatggagtctcactctgtcacccaggctggagtgcagcagcacgatctcggctcactgcaacttccgcctctccgcctcctgggttcaagtcgtttctctcgcctcagccttctgagaggctgggattacaggtgtgtgctaccacacccggctgatttttgtatttttagtagagacggggtttcaccatgttggccaggctggtcttgaactcctgacctcaggtgatccacccgcctcggcctcccagagtgctgagattacaggtgtgagccaccgcacctggcccacattctttttctttttttcttttctctctttctttttttttttgagtgggaatcttgctctgtcacccaggctggagtgcagtggcacaatcttggctcactacaacctctgcctcctgggctcaagcaattctcgtgcctcggcctcccgcttagctgggattataggcatgcgccatcatgcctggctaatttttttttgtatttttagtagagatggggtttcaccatgttagccaggctggtcttgaactactgacctcaagtgatctgcccgcctcggcctcccagagtgccagagtaccacattctttatcaaaaaagtctttttcaaaaaaaaaaaaaaaaaaggcagctgaattacacagtgtactgacttagcgacattgttcatttacatctgtggactggcagggtagcactgctttatattcaatttccccaactgtccccaaaatgttttttatggccaattcacatgttacatttggtggttttgtctgtgtctctttagtatctcttttttttgggagatggtcttgctctgtcacagcccaggctggagtgcagtgacacgatctcagctcactgcaacctccacctcctgagttcaagtgattctcctgcctcagcctcccgagtagctgggattacaggtgtgtgccaccacaccyggctaatttttgtatttttagtagagatggggtttcaccatgtcggctaggctggtcttgaactcctgacctcaagtgatgcacccaccttggcctcccagaatgctgggattacaggcatgagcctccgtgtatggcctctttagtctctcttaatctagaatgatctcctcactttttctttttacccaaggcactgactttttagaaaccaggtctgttccacattatggatttgtctgattttaaggtgaccaactgtcttggtttgcctaggactctcctagtttgaacactgatcttacatcctgagaaacccctcagtcctgggtaaaccaggatgttttgtttacgtgtgttcatgtttaactttttcttgacctaaatttcttataaacttgaagttaggtctagtggcttgattagactcacattaaaacatttttgatggccgggcacggttgcccacatctgtaatcccagcactttaggaggccgaggcgggcagatcacctgagatcgggagtttgagaccagcctgaccaacatggagaaaccccatctctactaaaaatacaaaattagctgggcatggtggtgcacgcctatgatctcagctacttgggaggctgaggcaggagaattgcttgaacccgggaggtggagattgcagtgagctgagattgtgccattgcactctagcctgggcaacaagagcaaaactccatctcaaaaaaaaacaaaaacaaaaacgaaacaaaacacatttttgacaagaatacttaagtggtctgtgggcagtggctcaggtggaggcaggaggatcacttaagcccaggagttgaagaccagacccagcctgggtaacgtagagaaccaaatcttgagaaccaaaatatggttttttttttctgtgtgatagggttttatatcagttttaaacatttttttgagggtttgttgttgttgttgttgttgttgttgttttcccaaaaacagtgtcatgaaggaaagttttaaaatctttttctccaacttgggcaatatggcaaaaccctatctccacaaaaaataaaaaaattatccaggcacagtggtgcacacgtgtagttccagctacttttggaggctgaggcagaagaattgcttgagcctgggaggtggaggctgcagtgagccatggttttaccactgtatttcagcctgcatgacagagcaagaccctgtctcaaaaaaatccaaaatttaacaattagctggacgtggtggtgcatgtctgtagtcccaggtacttaggaggctgaggtgggaggattgcttcagcccaggaggttgaggctgcagtgagccatgatggtgccactgcactccagcctgggtgacacagcaagatcctgtctcaaaaaacaaaacaacacaaaacaaaaacaaaaacacccccaaaacttaaagtgatggtatgtacttcatgttgcatcccattaggaggtacattatttcagttgctcacttgtagtaaaggtgatggttaggttgatggccctcagaactctccatgtaattttcctctttgtaattaataagaaatctgtgggatgttggctgggtgcagtggctcatgcctgtaatcccagcactctgggaggctgaggcaggtggattacctgatgtcaggagttcaagaccagcctggaccaacatggtgaaaccttatctctactaaaaatacaaaaattagctgggcgtggtggcacacacctgtaatcccagctacttgggaggctgaggcaggagaatcgcttgaacccaggaggcggcggttgcagtgagctgagattgtgccattgtactccatcctgggcaacaagagcgaaactccatctcagaaaaaaaaaaaaaaagctattggatgtcactctaatgccatgtgactatcctgtttcccaatagcctcttccctaaagattttagcatccgttgattactgtttcctgactcagtcatttaatattttttaattttttaatttattttggtcagatgcagtggctcacacctgtaatcccagcactttgggaggctgaagctggaggatttcttgagtacaggagtttgagaacagccctggggaatatggtgagaccatgtctctaccaaaaaaaaaaaaaaaagcttggcatggtggcacgcacttctattttcaactacttgggggtctggggtaggagattagcttgagcctgagaggtagaggctgcagt

SEQ ID NO: 93912 - DNA, 12642 bp, Homo sapiens
  misc_feature (1)...(12642): n = A,T,C or G
ctggggaagcctcaggaaacttacaattgtggtggaaggcgagagagaggcaaagccacgtttttacatggtggcaggcgagggaagggggaagagccccttttaaaaccatagggtctggctgggcattttggcttacacctgtaaccctagcactttgggaggccgaggagggtggaacacctgaggtcaggagttcgagacaagcctgaccaacatggtgaaaccctgtctctactaaaaataaaaaaattagccacacatggtggcatgcacctgtagtcccagatacttgggaggctgtggcagaagaattgcttgaaactgggagacggaagttgcagtgagccaagatcacaccaaggcactccagccaaataaaccaataaccaaaaacaaacaaacaaacaaaaaaccatcagatctcatgagaactcactattatgagaacagcatgggggaaactgtcccctgatccaatcacctccccccaggtctctcccctgacacatggggattacaatttgagatgagatttgggtggggacacaaagccaaaccatatcaatacatatacatatatatgtcataatttaaaataactttagattcaaaaaatagttgcagagatagagttcctgtgtaacaacggttctgaacctggggcaatttgtgccctttccccaccccagaacatttggaactatacagaggtacttactgttgggttcactatttggccaggtagggggctatggtgaaagggatgtactgctggcatgtgcaggccagggatgctggtaaacttcctacaaagcataggatggttccctcagcaatgaggtggccccaaatgttgaggttgtgaaagcctgctctggccccttcacccagttcccctaatgctattattatacctaaccaggatgcatccattacaataggcgattagatctccttctccttagtcttcccaactctgtgtttctcagtctttccttgtttttcatgaccttggtgcttctgaagagggttgactgggtattttgtaaaagttctcaacgggatattatctgctgttttctcataatttagccagaacacagtgattattggagaagaaaatgaggtgaagtgcccttctcagcatatggtgtcagggtccctgatatgcacatgacatcactgttaagttcaccttgatcccttggatcacgtggtgcctgtcaagtttccctttccaaactgtaactgtcagaagggaatctctaaacccttatacttaggggaggagacctaagcttcacttctggagggaggagtgtcaagcaatttatggacttgtgttatcacacactcactattatattttaatacaactgacagctcagatgtgtcttgtggaaagcagctttggggttaacgcccacaaaaagctacgtcaaatgagcaagacagcatttcaaagaactaattattgtgtaaactctaaaactatacaaagaataaaatttctaaaagtgaaataattcacaagaagaaagtaatatgaaaaaaataagaaagtaatatgaagcccaaataaatgaatgaataattaccagcccttgctgaataactatagatggttgttagaaaatttttggcaagaagcaggcaagtggagtgtgaaaataaatgtcaaagatttagaagtctttcttgcctcagcatccagaaatgttgaggggttgttttggagctatatccatgactggagagtgctatggtatttagagggtggggattatttatgtggaccccatctggagtgacccacaaccttttttcgccctcaggcaactcggttacctcctatcgccgtatcgaggtcaaaccaattcgcgcatcgtcgtcaactcgttttagtctcatcacgtgtcgctattgaaccatgccccctcattacccataacctgccacggtacgacactagcgttacatatgacccccctgtataagttccctactggtattttccccaaacgccaccacaggtctagcattgttttctccccacaaataccccttcccatgtcgataataaaacttattaatcgccctaaaaagctaacacgaccgcccgcaagagtcatgactgtcaaattccgatctaacaacagacaaacccccatcatacttcgaagattacaagaacacaaannnnnnnnnnnnnnnnnnnncgctccctctacctcacatatcgcccaatcgctccgtatacacaccccacctctccctccctctccccacccctatacatcactatacacttatatatatccctccctctctacatatctccttcccctcaccatatatagatatatatatatatatatatatatatatatagacacacatatagatatatatatatatatatatatatatatatatatatatatatctatatatatatatatatatatatatatatatatatatatatatatatatatatatatatatatctaaatatatatatatatatatatatatatatatatatatatatatatatatatatatatatatatatatatatatatctatatatatatatatatatatatctatatatatatatatatatatatatatatatatatatatatatatatatatatatatatatatatatatatatatatatatatatatatatatatatatcttacataacaaggagtaccccacccaaaatgccaaaagtgtcaccattgatgcacacagaacccaagccccttcttgtacctcattcacattgcaatgccttgtcaatcacagagatgggggagtggaaaatttcagactaaaagctagatttttagagcttcagtccaggactttttgtgtgtaaccaaaactgtctccattgaaaatgtaaggtttaatattttcagcaacaatttaaatcttatgggaatctttatttctaagtagataaagtatcttcattttatttgtgtggtactctattaaagtatgagttgccaccaaagaaaacactgaaatatttgatgaacttgcatacatagtaagagtgtcattccatggtaattgggacaaggagagtatgtggggccccagttgggttgagagtttaatgcaaccctccctatttttctttatagcacttgccttcctgccctccaccagcatgcagtgtatgcatttacttacttgtttatcgtctgtctccaaccccttagacagcaagctccatgagaagggaatttgctttagtttatggctatattctatgactctctaaaggggaataccatgtgattcatgtttgaacagtatttaaagaggctttagataaaaataacaatatgggtaaggtatccaaattacctcctacctggtttctggcctcctctatcatgccagaaataatcttatattttttatataatttatatgatgaaatctttatattaaacttaatatagaatatattacatattaagatttcaaaatacctcaattttatgaatattttaattcatatataatgaacaattgcyatataagtatataaataaaatataaatatgaattaaattataagcactatattatgtaataaaatatattatttgaataaatggcattgtgctacacaaaatacttccaatctttttcatttgaaagtacttttgagatttatcctttttttaaaaaaaaagtagctcttagctcagtggttgccatcagcgggtgactttgtccttcaggggatatttggcaactcctggagccgtttttgtttgtttggttgttgttttttttcttgagacggagtctcactctgtcacccaggctggagtgcagtggcacaatttcagctgactgcaacctccgcctcccgggttcaagtgattttcgtgcctcagcctcttgagtagctgggattacaggcatgtgccaccacacccggctaatttttgtatttttagtagagacagggtttcaccatgttacccaggctggtctccaagtcctggcctcaagtgatccacctgccttggcctcacaaattgcggggattataggcctggagccatttttgattgtcacaactgctggtagtcctaagggtatctggtagacagatgccaggtttgctcttaaacatcctacaatacacagagtattctcacacagagttatctagcctggttctactgatgttgagaaaccctgcgctatttctttcctgttttttttttattttatatttttttttatttgagtcttgttctgccacccaggctggagtacagtggcgtgatctcagctcactgcaacctctgccgccgagactcaagcaattctcctatctcagcctcctgagaagctgggactacaggcgcgcaacaccaagacccggctaatttttgtattttttgtggagacaggatttcgccatgttgtccaagctggtctcaaacttctaaactcaaagtgacctgcctgcctcagcttcccaaagggctgggattacagtcgtgagccactgctcctggcttctttcctttaatctgtggaacagtattccctcgacagcatatactatatttactttagtcccgtactgataaacatttgggttgttccaattctctgctatggtgacgagtgccgcaaagaacatcctcaccagtgtctgtgtatgtgtgccacagggtttctggtagctgcgttttctgttctgggaatcacttccaaatgccattccagagtggctggactccttgcttccacagcgtcacctgggattccaattccatgcgtctttaccagcccttggtattatttaacttttaaattgttgccaatttgaaacgtttaaaatagtagctcatttgtaacaattttgcatttcctgattgctagtaagaccagaccacaggaatcattcacaccccaagcattctagaaaactggtgaaaatgttttctgtccnnnnnnnnnnnnnnnnnnnnnnnnnnnnnnnnnnnnnnnnnnnnnnnnnnnnnnnnnnnnnnnnnnnnnnnnnnnnnnnnnnnnnnnnnnnnnnnnnnnnnnnnnnnnnnnnnnnnnnnnnnnnnnnnnnnnnnnnnnnnnnnnnnnnnnnnnnnnnnnnnnnnnnnnnnnnnnnnnnnnnnnnnnnnnnnnnnnnnnnnnnnnnnnnnnnnnnnnnnnnnnnnnnnnnnnnnnnnnnnnnnnnnnnnnnnnnnnnnnnnnnnnnnnnnnnnnnnnnnnnnnnnnnnnnnnnnnnnnnnnnnnnnnnnnnnnnnnnnnnnnnnnnnnnnnnnnnnnnnnnnnnnnnnnnnnnnnnnnnnnnnnnnnnnnnnnnnnnnnnnnnnccctccccccccccaccaagaaagaaccatctggcccaagtagtagtgccaagctggagaaaccatggtgtcgtctttgaaagaaagaatatgacaatctctatgataataaagacacctattattattaacaacaaatattttattgtggaaactggggagaagcatgcctcctgtccccagggagaaggcaggagcgaatgggcaagggcaagggaagggctttaagggagaggagaggtgggcctggggctcgctgagtggtcggctggagcagtgggaagtgccccggtggggccggtggctggtgtgggggtagaaccgcggtcagtagggtgaaggtgctgagggctggaggctcaggaggtggtggcaggggcctgactcttggagccgggcagcaggctgggtgtgctcagaggctcatggcccacctggcgaagctccttccaggtgcaggcaagcctgaggcgtcagggcagcaggcggccgccaggaaggattcagacaactctgcctgggagtgagggctctgctcagcggcctagacctgggcacaacggaacaggccactccgtttctcatcacagacctgaaggcagatggcctgggcgtcgggcttcctctgctctctggcggggcgattttcacggtcaccaggctgcggacaggctgtgggggtggcgggcggtccaaagccaccgcttcacgtaggccaggggagccttsgagaaatcaggcctgatgttgctcagcagcggcagcctgttgggaaagcacctccaggcctcggggaccatctctctcaggacgcggatgcgggcggggaccatctctctctggatgcagatgcgggtgtagtcccagctgggaggagtggtgcggaggggccggatgcggacccagtgyttcctgtggaagtaggtgaccttgcagttctcctggacctgggagctgaggaagggcctggactgcagaacccagtgcttttgggcggggcgcagctttctggcaagcggcttgggccttccagtagacactgggctgccagaagtttccgaaatctgcggtcaaggccagagatcaaatgtcagggctcagtgactagcgacggttagcatcaaaatgttggaaagtgcacaaggcgccgtgtgccaggtacggtctgtccaccaactgttgcatggggcaggaggccacggccaggccacagctttgcsgcgygcagctgcagaaggggcaagtggcgccccatgctgtctggaggaccaaggaggctcaagcctcagtccttcccactcatggtcccagacacttagctctgggcagaggggcctggcagctgtctctgcttttgtacctgacctttaaaggcagaacatagaagaatttctgccaggtcctgaaaactgcagatacctgttgacagaagggtgctctctttgatcagtgtgaaaatgatcacaatacacttggaggctcttttaaggaaaaacaaatcatttgctcatattcgtctaggatgactgttaatatcactttttgcaattttgctcttaagaaaacggtgaaagccatcaggatttatgttttagtacctgtaatgctgattttatgttgaccctcataattttcagtgttcatacagccatatatacataatcttctctaaacactaatgccatttctgtcctttcatttctattggtaatcctggagtagagtgaggcacattttccactaatagctgaaaagatctaacttcaaaaacaaagaatccaaaggctgcttagtaactgtagtgcctaagtttagagtctgttcaaggtggtgtgaaaagttttttggggggggggcatttccctcaaaagcacgtggagaaggaacctattgaccctctggaatgccagaatcgggaagagacaaaaaagtcgcaaccaattgaagattgggcaatagatttggcccagactgaggcagatgggtgaatagtaaagacaataaatagagcttaatgaggaagcaccaaatgctttttgaggtcagagggggccaagtgttttgcaatgcagggttggggtcagccagtagttgcaggggaatgagatccctaacactctcctctcaccaatgaattcctttggttttttgcctgattccttatttatggaatcatctctgggtatatgattttcaaaacctagagatattcctatggtataattcagtataattttcttctaaagacagttctcataatgagtggaatgactttttattcatatctaagacatctcaagataatggcatcagagtaggtatagactttttttttttttttttttttgagatggagtttcgctcttgttgcccaggctgtagtgcaatggcgtgatcttggcccactgcaacctccgcctcccgggttcaagcaattctcctgcctcagcctcccaagtagctgggattacaggcgcccaccaccacgcccagctaattttttgtatttttagtagagacggggtttcaccatgttggccaggctggtcttgaactcctgacatcaggtgatccgcctgcctcagcctcccaaagtgctgcggttacaggaatgagccaccgcacccggcctagacttcttataatatatttttctttccaatatctatagaatttcccatatcctttttgcaatataagccagtggttgttattctgtttgtggctaaagactctctaacaaaccacaattttgtcccggtgaggtacaggcagtcataagcgaatcatcactaaatatgccttctactggttaatcaaggtgttgattagttaaaagccattctcatagacttgagaagatgtctgtttcttcttctcatacaacaagaggtacagcatttcattggttagttgatattagggattagtgtctatcagtggtgttcaacaaggggtgagtttgcaattgacagtggagaatgtctggagacatttttggttgtcatgacctggggaggtggtactataggcactcagtgagtcgaggccagggatgcaattaaacatcctgcaatgcacaggacagtctccacaaccaagaatgatctgccctcaatgtcagtggtgctgaggttgagacctttcatccagcttcctctaatgttatataatcacgatgcattcatcaaactaagaaattaacattgggttgatactgttaagtgaactccagactttagattgcccaagtgtcctttgtcttctccagaacctactcctccttggtctcctccactctggagtttttctgccttgtttttcatgaccttgatgcttttgaagacggctggtgatgtattttgtagaagtcctttttcagtttggttttgtcttttctcatgatttagatgagggaatacaaattttggaggaggaatgccatagaggtgactggtatttaggttgtttgcaaacaatggtgcaaagaataactatgtatatgtattattgtttaggtctgcagtttatgtgtaggataaattgctgtttggtaaactgcactctgatagctactacaatagtaccaacttagcattgtatcttcctttgatattgtaattaactattagtaaaacaacatactttttagcctattatatctttattcatgtgtcattaccacctaccagtaacacatgaggctgcccatgctccacacttgtaccagcactgtgagcaatacaattttggggtttctgctaatctgatatgtgaaaatttgtatttcagtgtagtttcatcttgtttcgtcactttttataagcaaggctgaaaattttttcacatggtattgggtttcttgtttccttaactgtaagctgtctgtttataccatttgctgttgattatctaaaaactgatttctagaaactctttgtatattagggcaattaactctctgttttgttcactatgatgtctcaaacacctagaagagtagctggcatatagtaggcattgaataaatagtagctgaatgagggaacagagttgcaaatgttttccctgtttgtcatttatcttttgtttacggtgattttcatcagaaaggattttaaaatttttgtatgtagtctaattgctagttgttttcttgattacttctgggttttgatttatagttagaaaagcttcctccacttggatgtatgaaagaattttcctatgcttatcctcgtacttctatggcatttttttacctttaaagttttgttccatccagaatatatttttgtcaggattgaacgatgggtccaactttttctcctaaatgcctgctcagttgtcccccaatgccatttactggatttatcttttcctgcattgagctgagatcctatctttaccataaagtaaattctcatgtatttggacatatttctgaactattttcttccttgatttatcttcctattcatgtgctagtatcatactatttaattattgtggctttaaagccttatgggtctaatcattccttattttcctcctttagaatttttccagctattcatgcttatctgcttttccacatgaactctagaagtactatatctagttttaaaattctgttggtatttttattaaaaccatattaaatttatggaatcaacttaaggagaactgacatcaaaggtgtctttataatatcttcctatgtaaaaacagggtatgaattttataaagtcaagtcttctgtgtccctcagaaatgttttatagctttcttaacattttatgttgtttattaacattattttagtttctattataagtaggtttccttcttctgttatgtcttttaactaactgtgagttatatatgccaacggaattgatttctataaattgacatggtactccactaattgctgaattatctttgtaggagtttttagtgtttctctaatgttctttatgttttttggcctaactttattggctcctgccagaggttaattcaattaaatttaatatttagtatgctaataaccatggagttaatgatatcctttccacattaaacatactatttatttttgagctgagataaatctacttcatccagttagggaattcttcatttctgttttattaaaaaaatttttaaagggatggtgggttttgtctaacgtattttaggaaatccatggaaatgatcatatagatttgttgatgggatgaaatccattaattgtaagtatatcattcttagtactgaaccatctgtggattactggaataaaccctacctggacaaagtatatatttcttctaatgcactgctagattctatttctactattttatttagcttttttttctgttgttacatattttttagagatattggcctattgttatattttgggggtaggatggtctaatctttgataggttttggtatcactgttatcctggctgcatgaaaaagaggctggaagcttttagtcaataaaaacccaatatgaacaagtaaacgcagttattattacagtttagtttatgaattaaacaggattttgtgtgctgatgtagtaaccaccacttagacttagtttctaagagaaaaataaatcccaagtttcaaacaactgacttacatgaaaatttctggatgaatattgtcggagtctgtctttatcctgagattctatagcaaaactcccttaaggattttaaagggttttgaatacacccatttccagccttcgtttttttatttaaaagggtcttaattttcatagagaatctacacaatgcatgtataataaaaacatatgtcactgtcaaatatagatgtaaaaagcttatgttcttctatgttttaactcttctctctagctaatttgaaatatctctaaattcatgtccaaactgagataagacgttggtacacttcaataaaaatgtataagcattacaagatgttaaaactgatgccacagtctgagcccagccttgttttaaaaggggagacgaggatttccttagatgaaaattgtggagagaacgtacctgatcatcatcaacctctactggctgcttcttaatgataaaggtgatggactcaagacagggctggaccagggagatactggacctacttgggtccagtaatctagacaggtgggcaccaggcaggaagtgccaaacgacccaaattccataacagcgtcctggccaagagactgggtcactgagtcattatttagtagtgaaaaccactcaggaattggacgccgaggtgacggttctcagggagtatctggagatcagcagtggtccagaggagctccaggcccttctgggcagctacctgaagaattgctgcttaggatggaatcatgcccagcctttgtttctaaaattaactgtgtattttttatattctccagtgggaaaacagccaaaaccatttgatctctcaattctagtgaggttccagcaggtagtctcctctgagtattgctgggaggtattagacagtggccagtgcataaagaaggaggcttcacttcttcaagggagactgagaattttccttttaaaatgcaatgcagaaaaacaaccccattaaaaaagggacaaaggacatgaacagacatttctcaggacatacaagtagccaacaaacatgaaaaatgctcatcatcagtaatcatcagaaaagtacaaatcaaaaccgcaacgagataccatcttaaaacagtcagaatggctattattaaaaagtcaaaaaacaacagatgttggtgaggctgtggcaaaaagggaatgcatatacactgttggtgggaatgtaaattagttcagccactatggaaagtagtttgtagatttctcaaataactaaaaacagagctaccatttaatgcagcaataccattactggatataaacccaaaggaaaataaatcattttgccaaaaagacacatgcactcatatgttcactgtcacactattcacaatagcaaagacacagaatcaacctaggtgcccatcagcggcggactggataaagaaaatgtaatatatacactatggaatactacacagccataaaaaatgaaataatgtcctttgcagcaacatggatgcagctggaagccatcatcctaagcgaattaatgcaggaacagaaaaccaaatgctgcatgttcttgagagaactaaaca

SEQ ID NO: 93913 - DNA, 12993 bp, Homo sapiens
agagagtaattttatgtaatagcaccgcagaattgattcacattgtttttccatgtttacagcttttttggggtgtgtatatattgcattcaattcattaaaaaaattcttctttgcagacataaataatggaattcatgcctgtgataagcaaaaaaataaaaataaaaatttttaaattatggaaataagagaaaagcaaatgcaatcaagggttgtgaaatgcctaggactgaaatctagaaatctgtttattaataacgtagccttttgttgtcatttttagaaatactagagactattttcacctctcagattgtcccttcttgcactcagcatacttgagcaagaaagactgtgttctccagactctatgatggatcacaggcagccagttattaataagatcaatttgaactgccaggcagagatgaaacatcagcacaagctaattaaaaggttacatttcaattcaaatatctaagtaagaataatagtcattaccacaatatcaatagactttaaaactggctatgtttaccaatatcctcaggataaatgtacacatacatggaccaaaaaagacactttccctttaatataaaaataaattacttagggataatttgtcctaagcccatagatcagtggttcaggatagagcaaggtattacatttatgagaccagttcttcagcttttaaattctaattgagccagttatttttctctttattttgtacaaatttattgaacaataaattttaaaatctaggctctaaacaaattttataaaatcatttttcaactaggtgtctacttttctgcctcataaaagtcctgtggcagaagtggaagaagccaaggaaaaagaaatgaggaattaagtcagagaagtgatggtgtaaatgagagataattagggccttgaaaggccctgcaaggagactcagaagtcaactctaagtcagagagaaaactgctggaggattttgaacagagaagtaattttaattttttggcattttaatggggtcactctgcctgctgggttgagcatagactgtatttaaggtaagggttacatcacagaggccagttaggaaactatcactctaagccagattgaaagttcaaggtaggttggaccagatggggacaggagctggtgagagatggttcatttgtggacactgctgaaggaagaggcaaagcaatgtgtctggaaatgaggtatgaaaagaaaatggaaatcagaacgattccaaggtattcggcctgagcaaatggaggatatttgctgttgacagagctggggtaacctttgcggggccaggtcatgggatgaatgctcctgcattcatgggatgaacagaggttgtttactgggtaaaaacatacagttagacagaaggaataagttataatgtttaatagtacagcatgatgtctatacttaacagtaattgcatatttcaaaatacctagaagagagaatttggaatgctcccaacacggagaattgatcagtgtttgaggtgatggatatcccaattaccccgacttgatcattatatattgtatgcatgaatcaaaatatcacatgtacaccataaatatgtataattattatgtatcaaaaataatgtagataactaaaatgaggactaagagctgaccaacaagtattacgatatggaatttccttggtgacttttgataagagcagcttcccagagtagtaagaagaatagtctaactgcagtgtgttcaagagagaatgagtcagcaaaattcagattgtgggaaattccacaggcaaaggaaataaattgcaaggaaactaacgcagagagaagatccatattaaacaagattaaaagagacaaatcaattataacaaatggactttatgtggactcacaagcaaccacaagacatacccacaaaaatctggattcaaataaaccataaaaaacaaactataaaactgtgagaagttttaccctggatacttggtaatattagggttattttattttttaggagagattattttataattatgtttgttcattaagagtatttcatgtattttagatatacttacaaaattatttacagatagaattatatgatgcctaggatttgcttcaaaataacaccatagtggatggaaattgggtgggaagaagaaatattaatataaggatgagataagattgccatatgttgagaattgttgaagttgagtaatggtacctagtggtactgttctctatcctttttatatgtttgaacttttttataataaaaatttttaaattgtggtgtgggggatcagagagagaagaaaaaaataggaccctgagtataggcaactttttcagagttttgctatatagtagagattcgtgtgcagtaatcagaggggaagtagagtcaagcgttgtttttaagagttaagaatactgattttgtttgctgctgcttggccttccaagaagaacttagtcctgacaaatgatttaattctttactaatgagaatttaagttatagtggtgacctcaagagaggtcaaaaattgttctaagaaatcagtacacaaatatccaatttcagttgacctcacaggatgcttaaggatcatccacattataacatttctaacagtcttattcttttccaatataactacaaccattactcacatctacatatccatcaaaaacacacattcagaaactctctacgtaataacattgaatgaaaattctgtttcaaagttatagtctgctaatataactcactagcaaagtattagcacatgacagctagtaaatttggattaaatataaccaatgcccaaatcaaaaaatgaagaagcaaggaaaattgtcatacgctgtatgtagctattccttaaaatcaaactatcaactcattggcttattagtagaattaattcttaaacgttttccttaatcactactgcactcacttttttttcaacattgctggctaacaagtactcagttgttgcaacaactacccgtaaataaatagcgagcaggtgaatatctgtttctatggtttctatttacagtagagagagattgtttgacacttgctactttccttttataatagaaatttaagtattaccttctccctattcttatccttcttttcctccatcctgtaatgctatctattttctttctcttcatctggctctctttctcaatcaccattacctctaagttccattaaaagtgatttaatttcagttttccattctaggaaaaatgtctggacagaaaaggaacaagcagtgggagagctgcctgcactttttttaaaaataagtttcagcaaatatactttgcttcttaaactagatcagcaacttaagaagaaatgacagagtttccttctttgcttagacaaagcctctttctatgacaaatcttcgagtaacagggatagttccctccacctccatctttcagcagtgtctgatatctgtttgataagataagcttcaggaatgcagtgagccaattacttgggttgccctcagcaaatatacttacttactgctggatcaaactaaaacattcattacttatacccctatttctatacatggtacaaaattacagcaaacaaaagttggtaaaatataatgttacattgataacagaaaacatgagtttgaaaaataatttgggatcatttttctcataataccctctgtacaaaattgaatcacccaagtgtgctcaatgacctgtcagtgtacaatgatgcaatagaaatggtaaaacaaaatcctttatatcatcccaaaactgttgagcaaagattcctgagagatagtcttcccttgcttttgagaaaattagcttctgggaagtgactttcaaagtcaaacaaggtggtaatattcttttgaaaaggaaaaaaataatactttattcattaaataagtaaaataacgttacaacatagatatcaatgtacttaactgtaaattaaatgtacagatatgttgagcaaattaaatgagcactgtcctatgtcaacattggaactgtgcagaaacatatgaaccttctctaatccaagttcaattatgtattcctttaactcctcaaaaagcaatttcatattctacatgtgagcatgccaagagaaaaaaagttacttttagtattattaacatagtatttctttgaatattaagtcagcaaataacacatatttcatgtttgtcctaatggagaatgtcaggcacacccaaatgtatcactgctttctttgtagactttctgaatcactcagccaagcaaagctgttaacttactctaataccctacagaagcctttggttttaccacctttaaaatgcctgtacagccaatttcccattagcaaatataaaagattttttatattactattaagttgctttaacaaatttaattttaggtccctgaagtctcttacttggttccactgcctgtacaacaggtgttcgtatttttgtgcattgctttctttttacattaagaaagataaacaacaccaaagtgtaatagataatttggttgatataaagaaagtagaatgagggaagaaatgggcttaattcactttcaatgacaatgattagaatttcattttctacactacagacccaatggtaaaggagcaaaagctccagggactttaaaaatataattaaaataatataagcacagaatcatgaactttctggcatgcccatatttgtctgacttatttccatactgagcacaatatccacatccagccttccctcagctactgcatactattatctgtctactcgtaaatcccttcttattctctatcgtttctcacacattctcactttacttgttttccttaaacattagcttatttcttttatttttgcctttgggatcatttgtttaataaacatcttcttttctaatgtttattaaaaattcacctgccttttttacccacattttaaactaatgtgtctcctctttttcttttgattgttttctctacacctcatatttctcctctactgcacctgggtctcattcaggtagagtgaagaaaggcccaactgaagacactttcctgccttgctttgcagatttggaggaaaacagaatgaatcctacacatgtgtacaaacccgcaaatgaggggaaagcacagggagcttgtgtcaaattctccagcaaagatgtgcacagttagaattgaaaagcaacgggataaacaaggtaagaggcaggggagacagcaccaatcagcatgagagccacagaagcaaaatgggagccaggtaaggaagtagctagaggaggtttctggccaacattcattaattacaattctgtcaaacagcctgtcatgtttggtttacaatgagtcttccaaccaagctcagaaaggcaatttaaaaatgtattttttaattagtatatagattaagatataaaaaattttttctttataatttaaggttctaaaatgtaaaacatgtcaagactgatcattattattcatgtattagagtaggctaaaatagcagatgcctataaaactccacatatgttctatagaataacaatttaaaagaattcaaaaaaagagagtgtgagaaggaagaaaataagccagacttaaagacaaatatggttattatgaataagcattagctggactctgagcttcctagtggctaaaaataaagaaaaccatgatgtgtaataaatttttagtatctgctgtgaggaagcaattcaacttttcaagagaaatgaaccttaagcttttgcccatactaatctcacaacacaggttcttacattttttttaacatgataccttttagaatatcataaaacctataatccccaacctagaaaatcactgaaggctgacgctgaccttcagcacctcagctccagcgccatggcgacctccaggaagttcgttggggggaactggaagatgaaccgacggaagaagagcctgggggagctcatccgcactctgaaggcggccaaggtgccggccaacactgaggtggtttgcactctccccactgcctatatcgactttgccccagaagctagagcccaagattgctgtggctgcgcagaactgctacaaagtaactaacggggcctttacytgggagatcagccctggcatgatcaaagactgcaaagccaatcgagggtcctggggcactcagagagtaggcatgtctttggggagtcagataagctgattgggcagaaagtggcccatgctctggcaaagggactcagagtaatcgcttgcactggggagaagctagctgaaagggaagtggcatcactgagaagtttgttttcgagaagaaagaggtcatcgcagataacgtgaaggactggagcaaggtcgtcctggcctgcgagcctgtgtgggccattggtaccagcaagactgcaacaccccagaaggcccaggaagtacacgagaagttctgagaatggtgtccaacatctctgatgtggtggctcagagcacccgtatccatttatggaggctctgtgatgggggcaacctgcaaggagctggccagccagcctgaagtggatggcttcctcrtgggtgatgcttccctcaagccctaattcgtggacatcatcaatgccaaacaatgagccccatccatcttccctacccttcctgccaagccagggactaagcagcccagaagcccagtaactgcccctcccctgcacatgtttctgatggtgtcatctgccccctcttgcggcctcatccaaactgtaccttcctttactgtttatatcttcaccctgtaatggttgggaccaggccactcccttctccacttagtataatcgttggaactagacgtcaccaaggtggcttctccttggctgagaggtggaaggggcaggatttgctgctgggtcccctaggccctaatgagggaaggagagaaaccatcctcttccttcttacaccctgaggccaagatcctcccctcggaagccatgagtgctgccctctcccacggtgcccgcgcctgtgtgtgctgtgtatgtgaaccacccacgtgtgagggaataaacacctggcactaaaaaaaaaaaaaaaaaggaaaaagaaaatcaaagaaattttatagacattttcaaagattcatgaactgtttcaagcctatccttggaacctctagaagtccatgatctacatattaaggattcttgtcattagaatgcacatgggggaagtcttaaaagtcatagtgaataatgacagcagaaactgcaaaatctgttttaatgtctttcttatttaagagcataatattaagggataatttagtgaaaataattgtgtaaagaagggaaagtcatatgtaaatgactttatgtaaagaaggtaaaactacatatgtgtaatcacaatgtctatatttgaccttatggccagcatactagctacctttatttttcatggcataaataacttctaataatttcttctaataatatcctatggaagtataaaatctataatactcaaataagtaaatctaatagcaatccatttataattctcttactatattttatagtttactaacatacatttgcaaacaatatattatttggttttccttatttgtgggctttataaaaatagaattatgttacatgtagtctcttgaaacttttttcacccaatattatgctaccaaattgcacccgttattatacatcactcaattcattattttaatcttgcatattttattcaataaataagccataaattattcctcacccattaatagatatttgaattgattccagcatttgctattagaaatttaggtggtatcaacatcttctgggaaaaaagatttactctgacaatggaaacgggaagaattcataggctcattactagtaatagtctaagtcttgggctagctggttatatggatgttcattaattattatgctttagaacctacctgaaagttacatatattattttgtatttataaaatatattttaagataaaattgataaactagaatattttataatactaaaaattttggataatggagattcatgctttaaaagatggtagaaatttccttaagcaccaaaattttcaaaagtgaaaaattatctattgggattctttggtctccactaattactatgtaataattttgttttctatcattttcccgggacctactaaatcaatagcatgtctttccattttcctcaactatcgcttccctgagttagactttgataaaagatagcacagagttcaaagtgattcatcatcaaaaccagtacctgtctgttttgctataaactattgcataacacaaatgcaaggtattgagttgcttttttattgtttttatctgaaatgtcactgtattctctggattataacagcctaaggctaaacagaggaatactctataaccactgtataccagaaaagaaaaccagggcttcttaattcattccctatctgtcttctaggaaagtgcaaagaggatcatgtgttgttcttgtgtataaaagattccttgaagcatcttggattaagtcgtgtgcaagatggctgaataggaacagctccggtctgcagctcccagcaagatcaacacagaaggtgggtgatttctgcatttccaactgaggtacccggatcatctcattgggactgtttagacagttggtgcagcccacagagggcaagcagaagaatgaggcgtcgcctcacccaggaagctcaaggggtcagggaactccttaccctagccaagggaagccgtaagggactatgccgtgaggaacggtgcactccagcccagatactactcttttcccacagtctcagaaacccacagacgaggagattcccttgggtgccaatgccaccagggccctgggtttgaagcacaaaactgggcagccgtttgggcagacaccaagctagctgtaggagtctttttcataccccagtggtgcctggatcaccagcgagacagaaccgttcactcacctggaaagggggctgaaagccagggatcccagtggtctagctcagcagatcgcacccccacggagcccagcaagctaagatccactgacatgaaattcttactgccagcacagcagtctgaagtctacctgggacactagagcttggtcagggaaggggcatccaccattactgaggcttgagtaggcggtttttccctcacagtgtaaacaaagccaccaggaagttcgaactaggcagagcccaccacagcactgcaaagccgctgtagccagatggcctctgtagcttcctcctctctgggcagggcatctctgaaacaaaggcagcagccccaatcaggggcttatagataaaattcccatctccctaggacagaacacctgggggaaggggcaggtatgggcacagcttcagcagacttatacattcctgcctgccagcaaagggaggcccactagactagcagcagatctctctgcaaaaaccccacatgccagaatagagtgggggacaatattcaacattcctaaagaaaataattttcaacccaaaattttatatccagacaaactaagcttcacaagcaaaggagcaataaaatcctttacagacaagcaaatgctgagagattttgtcatcaccaggcctgccttacaagagctcctgaaggaagtactaaatatggacaggaaaaacgggtttcagacactgcaaaaacataccaaattgtaaagaccatcgacactgtgaagaaactacatcaactaatgggcaaaataaccagctagcatcataatgacaggattaaattcacacacaacaatattaaccttaaatgtaaatgggctaaatgctgcaactaaaagacacagactggcaaattagataaagagtaaagactcattgatgtgctgtattcaggagatccatctcacgtgcaaagacacatacaggctcaaaacaaaggaatgggggaatatttaccaagtaaatggaaagcaaaaaaaaaagcagggttgcaatcctagtctctgataagacagactttaaaccaataaaaatcaaaaaagacaaagaagggcattacataatggtaaagggatcaatgcaacaagaaaagctaacaattctaaatatgtatgcacccaatataagagcacccagattcataaagcaagttcttagagacctacaaacagacttagactctcacacaataatagtgggagactttaacacccactgttaatattagacagaccaaaatgagacagaaaattaataagggtattcaggacttgaactcatctcttgaccaagcggacctaataaacatctacacaactctccaccctgaatcaatagatgtacattcttctcagcaccacattgcacttattctaaaagtgatcacataattggaagtaaaacactccttaacaaatgcaaaagaatggaaatcataacaaacagtctatcagaccacagtgcaatcaaattagaactcaggattaagaaacttactcaaaacctcacaactacatggaaactgaacaacctgctcctgaatgactactgagtaaataatgaaattaaggcagaaataaataagttctttgaaaccaacgagaacaaagacataacataccagaatctctgggacacagctaacccagagtttagagggaaatttatagcactaaatgcccacagaaggaagcgggaaagatctaaaattgacaccctaacattgcaattaaaagtattagagacgcaagagcaaacaaattcaaaagctagcagaagacaagaaataactgagatccaagtagaactgaaggagatagagacatgaaaaacccttcaaaaaatcaatgaatccaggaagtggtttattgaaaagattaacaaaatagatagaccgctagacagactaataaagaagaaaagagagaagaatcaattagacatgaaaagtgataaaggggatatcaccactgatcccacagaagtacaaaatgccctcagagaatactataaacacctctacacaaataaactagaaaatccagaagaaatggataaattcctggaaacatacaccctcccaagtcgaaaccagaaagaagttgaatgcctgaatagaccaataacaagttccgaaattgtggcagtaattaacagccttccaaccaaagaaaacccaggaccagacggattcacagctgaattctaccagaggtacaaagagaagctggtaccattccttctgaaactattccaaacaatagaaaaagaggcactgctccctaactcattttatgaggccagcatcatcctgtgaccaaactctggcagagacacaataaaaaaagaaaatttcaggccaatatccctgattaacatcaatgcgaaaatcctcaataaaatactggcaaactgaatccagcaacatataaaaagttatccaccataatcaagtcggtttcatccttcggatgcaaggcttactcaacatatgcaaaacaataagcataatccatcacataaacagaaccaatgacaaaaactacatgattatctcaatatatgcagaaaagtccttcaataaaattcaacaccccttcatgctaaaaaatcacaataaattaggtattgatgaaatgtatctcaaaataataagagcgatttatgacaaacccacagccaatatcatactgaacgggcaaaagctggaagcattccctttgaaaattggcacaagacaaggatgatctctctcaccaatcctattcaacatggtattgaaagttctggccaaggcaatcaggcaagagaaagaaataaagagtattcaaataggaagagaggaagtcaaattgtctctgtttgcagatgacatgattgtgtatttagaaaaccccactgtctcagcccaaaatttccttaagctgataagcaacttcagcaaagtgtcaatacaaaatcaatgtgcaaaattcacaagcattcctatacaccaataacagacaaacagagagccaaatcatgagtgaactctcattcacaattgctacaaagagaataaaatacctaggaatacaacttacaagggatgtgaaggacctcttcaaggagaactacaaaccactgctcaaggaaataagagaggacacaaacaaatggaaaaacattccatgcttatggatagaaagaatcaatatcgtgaaaatgccatactgcccaaagtaatttatagattcaatgctatccccatcaagctaccactgactttcttctcagaattagaaaaaaactaatttaaatttcatatggaaccaaaaaagagcccacatagccaagacaatcctaagcaaaaagaacaaagctggaggcatcatgccacctgacttcaaactatactacaaggcaacagtaaccaaaacagcatggtactgctaccaaaacagatatatagaccaatggaacagaacagaggcctcagaaataatgccacacatctacaaacatctgatctttaacaaacctgacaaaaacaagaaatggggaaaggattccctattgaataaatggtgttgggaaaactggctagccatatgcagaaaactgaaactggaccccttccttacaacttatacaaaaattaactcaagatgcattaaagacttaaacgtaagacctaaaatcataaaaaccctagaagacaacctactcaataccattcaggacataggcatgggcaaagacttcaagactaaaagaaaacctaggcaatatcattcaggacataggcatgggcaaagacttcatg

SEQ ID NO: 93914 - DNA, 15417 bp, Homo sapiens
tatacctacgtttcaaaccgtttcagtgacctcctccagacacctgctggacctcccgtgttccctttgtatcctaatggcttcactctgattccaaggatgaatgaagtcttagtcacagtcatttttgcctccctccctctattatgtgattaaaaacataaaatttaccaccgtaaccatttttaagtgtaaagtttaacagtgttaagtatatccacactgggccaggcatggcggctcatgcctgtaatcccagcactttgggaggccgaggcaggtggaacacctgaggtcaaaagttcgataccagcctggccaacatgatgaaaccccgtctctactaaaaatacaaaaattagccaggaatggtggcgggaacctgtaatcccagctacttgggaggctgaggcaggagaattgcttgaacccaggaggcagaggttgcagtgagcctagattgcaccactgcactctagcctagggaacaagaacgaaactccatctcaaaaaaagtagtatattcacactgttatgaaaaagatctaacattttcatcttgcaaatatgaaattcattaagtaactaccctttccctcatcatcccactcttttttaacccctaatgtgaattatttcataaaccctgttaattctttctcagtaatgccataaaaatcataagatttaatggtataagagatctgaaaggtcacctgacacagcttctataatatgtattcgtaacctcaaaaattttcacaataaatggttatctggctgtagtttacacacatcaacagatggcaagacagtcatatcatccttgaacactgataaggtttggctctgtgtccccatccaaatctcatcttgtaactcccataattcccatgtgttgtgggagggacctggtgggagatgattgaattatgtgggcaggtctttctcatgctgttctcatgatagtgaatgagtctcacgagatctgacggttttaaaaatgggagtttccttgcacaagctctgtttgcctgctgccatccatgtaggatgtgacttgcttctccttacattccaccatgattgtgaggcctccccagccatgtggaactgttaagtccaataaacctttcttttgtaaattgccgagtctcagatatgtctttatcagcagtgtgaaaatgaaccagtacagtaaattggtaccagtaaagtggggtgctgcagaaaagatacccagaaatgcggaagcgactttggaactgagtaacaggcagaggttggaacagtttggagagctcagaagaagatgacagaaaaatgtgagaaagtttagaagtccctagagatttgttgaatggctttgacaaaaatgctgataatgatatggacaatgaaatccacgccgagatggtgtcatatggagatgagaaacttgttgggaaatgaagcaaaggtgactcttgttatgttttagcaaagagactggcggcattttgtccctgccctagagaactgtggaactttgaacttgagagagatgatttagggtatctagtggaagaaatttctaagcaaagcattcaagaggtgacttgggtactgttaaaggcattcagtttcgaaagggaaacagagcataaaagtttggaaaatttgcagcctgacaatacaatagaaaagaaaatcccattttctcaggcaaaattcaagacagctgcagaaatttgcataagttacaaggaactgactgttaatcaccaagacaatggggaaaatgtctccagggcatgtcagagacctttgcagcagccccttccatcacaggcccagaggcctaggaggaaaaagtggtttcataggctgagcccagggtccctgtgctgtgtgcagcctaaggacacggtgccctgtgtcccagccactccagccgtggctgaaaggggccaacatagagctcaggccgtggcctccaagggtgcaagcctcaagccttggcagcttccacgtggtgttgagcctgtgagtacacagaagtcaagaattgaggtttggtaacctccacctcgatttcagatgtatgaaaatgcctgtatgcccaggcagaagtttgctgcaggggcggggtcctcatggggaacctctgctagggcagtgcagaagagaaatgtggggtcagagtccccacacagaatccctactggggtactgcctagtggagctgtgagaagagggccaccatcctccagaacccagaatggtatcactgatagcctgcaccatgtgcctggaaaagccatagacactcaacaccagcccctgaaggcagccaggaggtaggagctgcccaagactgtgggaacctacatcttgcatcagtgtcacctggatgtgagacatgcagtcaaaggagatcattctggagctttaagatttgactgccccactggatttcagacttgcatggggccagtagcccctttgttttggccaatttctcccatttggaatggctgtatttacccaatgcttgtatccccattgtatctaagaagtaactaacttgcctttgattttacaggctcataggcgaaagggacttgacttgtctgggatgagactttggactgtgcacctctgagttaatgctgaaataagttaagactttgggggactgttgggaaggcataattggttttgaaatgtgaggatatgagatttgggaggggccagaggtggaatgatatagtttggttctgtgtctccacaaaatctcatcttgcagctcccataattcccatgtgttgtgggagggacccagtggaagacaactgaattatggggatgggtctttcccatgctgttctcgtgatagtgaataggtatcatgagatctgatggttttaaaaatgggagcttaccttgtacaagctctctttgcctgctgccatccacataagatatgacttgctcctccttgcctttcaccatgattgtgaggtctccccagccatgtggaactgttaagtccaataaacctctttcttttgtaaattgcccagtctcggatatgtctttatcagcagcatggaaatggactaatacaaacacttactattagaagttcttctgtacgttgctctaaaatctttttcactcttattttgcaacactgataattctgccaccacaataaactgaacaagattaatctgtctcttatgaaattcctcaaaatcttacagagagcattatattttcccaaattatccttcaatggtctgtacagtcctatgtccttcaaccactgcttgcacaacatgatttggggtcttcatcatcaccctgactataaattcagggctctagtgcatcagtctttctcaaaacactgaaccgaaaaataaactcaatttcacagctatggtctgatctggacagaacagaacaggataatcaccttacacctttctggacacgaatacataattggttcccactgaatataccatcaactaaaagcctaacatctttgcatcagtttggttaatataagcctaacacaacacagccaaagtgaaaaattcttccgtttcagtgaatgaattctttttcatcctactgtatctcagtaaggtacagtaaaaatcaacagttactgcacacttgctgtaaatatgcacacactaaaatgtacctacaaagaatttacctaaaatgtaatgctcaaaggcaggtcatctcagagtttaatctgtttcctctacttatactcagagttagttcccatatctatgatcttgcttcattcacctcccctctgtgttcattgccctagttctaacgctattaccaacctcaattattgcttccaaacctatcacccacatactgacaggtcattttgtttatggatcatagcttgtgacattagtaatttaccttcagtagttcaccactggccactgaataaagcccaacatagttatactgacatttaatcatcagttgcttatctctaaacaaataccataactgcaatagggcacaattccaagtagtaaagactatgccatcaatatgctatatacgttaaacacataaactacacacacataatatataatatacatatgaatccttccatatatgtatgtggaatatacattccattccttctataatgaacatatatgctcattactctctaaagcaattgaacttttctgtttccctctaggaaataaaataagctaatcatgaaatgaaagacagtccctagaatttgccataccaggtcaagagagagcatcagggctgggcacggtggctcacgcctgtaatcctagcactttgggaggctgaggcgggtggatcacgaggtcaggagatcgagaccatcctggctaacacagtgaacccctatctctactaaaaatacaaaaaattagccaggcgaggtggcaggcacctgtagtcccagctactagggaggctgaggcaggagaatggcgtgaacccgggaggcagtgctcacagtgagccgagatcgcaccactgcactccagcctgggtgacagagcgagactccatctcaataaaaaatgaaaaaaaaaaaaagagagagagagagagcatcaggttaggaccctcatcccaaataagtgtaataaaatcaacaatataagtctcaagtgttatttgttctgttttgtatcctgtaataaggtacaaagtaccctttgtatttgatttctaaacaccaagcacctttttgaacaaaattaaaatgccatgatgggtctccacaattcctctatactcaatgcaaagtcccatttgaatagtgagggcaaaagtatgaataacaatagtctctgagatccacaagcagctcatccctaacagacaaagtgtttttgggaaaacagaaatatctctggtcttcattttcctaattaataaaatgaaagtgttagactagataactgctaagatttcctataacattaatactctgtgattctttgactttcaacactattaatctttaggagaaaaaaaccatgtatgtctccagaagttctattaacataaggcagttttaatgaaacctgaaaacagttaactcatgtaagctagaaaaaattcctgtcaacaaggcatagcagagactgcatgtagtttactaaggaataaagaggaccataatgaatgcatgaatatacaaataattaactcttttaagaagcatcatttgagttggcatgacttcagctaaaaagtgctgtgtatcaagtgctttcacagttctccaaaggaagaatcttctgtatcagtaaattaacactgcaatagacccttgaataatcagcatctattctttggcatgcatatcccatggctaaggctagcaatacgattattaaaaccactcactcaacacaatttctttcaagagggtggcattcaaatcatgagcttattctaaccgatgtttattccaagcagtgattcctagcctaaattacagaaaggtgggcaaatgattgaagaaattttctgtagaagaaactgttataaaaactggtcttacagagaataatgcatattccaaatatacttaattagggtgtgagtttattgttactggactataaagttagattataagcaagggttaaattgtactgagcctattatctatcacccacaacagtgtgggcaatgccaggcacataaagaggatagctttgaaatgactgactactgggtctaggctgaacggccaagagttggctggaagaacaagggccaaagagcacagatttatgaagaaatacaagagaatgagaaggcacacatctagtccgaaccaaggtagggaccccagagttctaaataccagaaaggtccaacagaccctggaactgcagtctaaggtgatgaatgggtttgtggggggaagatgatagtcacagggagctatgaaggagtctcacgtgagccaacagtatagattctgaaggcgtttatggcaggagaaacaaaatacgcagggaaagataatctcagtgttaaagacagatgtatgcctggaggccaagacagaaaatgagctgcagagagaacgcagtagcctgctagccagccagtaaagaagtgaggctagttcagcggactcgcgcggcctcgctctttggactcgtcaccctcccctccccctcccgccgccgtcacccaggaaaccggccgcaawcgcsggcggacctgaagctggtttcatggcagcctcaaagaaggcagttttggggccattggtgggggcrgtggaccaaggcaccagttcsacgcgctttttggttttcaattcaaraacagctgaactacttagtcatcatcaagtrgaaataaaacaagagttcccaagagaaggatgggtggaacaggaccctaaggaaattctacattctgtctatgagtgtatagagaaaacatgtgagaaacttggacagctcaatattggtatttccaacataaaagctattggtgtcagcaaccagagggaaaccaccgtagtctgggacaagataactggagagcctctctacaatgctgtggtgtggcttgatctaagaacmcagtctaccgttgagagtcttagtaaaagaattccaggaaataataactttgtcaagtccaagacaggccttccacttagcacttacttcagtgcagtgaaacttcgytggctcctcgacaatgtgagaaaagttcaaaaggccgttgaagaaaaacgagctctttttgggactattgattcatggcttatttggagtttgacaggaggmgtcaatggaggtgtccactgtacagatgtaacaaatgcaagtaggactatgcttttcaacattcattctttggaatgggataaacaactctgygaattttttggaattccaatggaaattcttccacatgttcggagttcttctgagatctatggcctaatgaaagcgggggccttggaaggtgtrccaatatctgggtgttyaggggaccagtctgctgcaytggtgggacaaatgtgcttccagattggacaagccaaaaatacgtatggaacaggatgtttcttactatgtratacaggccataagtgtgtattttctgatcatggccttctcaccacagtggcttacaaacttggcagagacaaaccggtatattacgctttggaaggttctgtagctatagctggtgctgttattcgctggctaagagacaatcttggaattataaagacctcagaagaaattgaaaaacttgctaaagaagtaggtacttcttatggctgctacttcgtcccagcattttcggggttatatgcaccttattgggagcccagcgcaagagggataatctgtggactcactcaattcacgaataaatgccatattgcttttgctgcattaraagctgtttgtttccaaactcgagagattttggatgccaygaatcgagactgtggaattccactcagtcatttgcaggttgatggaggaatgaccagcaacaaaattcttatgcagctacaagcagacattctgtatattccagtagtgaagcccttgatgcccgaaaccactgcactgggtgctgccatggcggcaggggctgcagaaggagtcgacgtatggagtcttgaacctgaggatttgtccgccgtcacgatggagcggtttgaacctcagattaatgctgaggaaagtgaaattcgttattctacatggaagaaagctgtgatgaagtcaatgggttgggttacaactcaatctccagaaggtggtgaccctagtgtcttctgtagtctgcccttgggcttttttatagtgagtagcatggcaatgttaatcggagcaaggtacatctcaggtattccataaaacctaccaactcatggattcccaagatgcgagctttttacataatgaaagaacaacccagcaattgtctcttaatgcgatgacactattcatagactttgattttatttataagccacttgctgcgtgaccctccaagtagacctgtggcttaaaataaagaaaatgcagcaaaaagaatgctatagaaatatttggtgtgtgtgtgtgtgtgtgtgtgtgtgtgtgtgtgtgtttttaacatccacagttaaggttgggccagctacctttggggstgacccccyccattgccataacatcctgctccattccctctaagatgtacgaagaattcagatcctcaccattggaatcttccatcaaacatactcaaacactactggaacaggacttgagtctttgcatgacatatacttgattaaaaggttattactaacctgttaaaaatgagcagctcttcgcttttaacagataccccaaaagtcttcttttctacatagtagaagacggaaacacctttactgaatgtttgaatagaaatatctactaaattattaaaatagacatttagtgttctcatagcttggatatttttctgaaaagtatttgccaaaactgaaatccttccaatattttccatggtcccattaattataatgactttctgtctagatcttataggaaaggatactttcttttttcttccatctttcctttttatattttttactttgtatgtataacatatatgcctatatattttatacactgagggtagcccatttataaattaagagcacattatattcagaaggttctaacagggctggtcttaagtgaaccactatgtatatmaatatgttggaaaacagctgtatacatttttgggcaatggttatgcataatatctaccagaatttttttcttaaacagccaacatttaaaatttatgttttatgtccataaaagaaaatatrctttattgtgacttcaactatatttcttatcccttacatttttatttaattgtcttagcctaaaaaaagaagaaactgtggaatactacagtaaatactgttttcaaacacaagcaataattcaaatagttttcttttgaattaattttagacatattttggatcctattgaggggataagaggatgtcaaaaaagttaaatacctaagtagaaaaaaatatagaaataaagccaggaatctctttcagttcaaatgttatcaattgtgaataagaaattgctatctgggatgacaaaattatctctgcttagtatcttattataactgaaaaaaggtttatcattataaatgccttccaaggaaaccaagaatttctcaaaatatttaatgtcacatattataagaagtcacctaatctagcttcttaacgtcaatctttaaaaatatcttaaaattactttgttttgtaataaacagtgaaaaaaaaaaaagttaggctgatggcagtgagagcaatggtctggaagtggtacccttctacctaggttcccagtgggctgtggggagtgatcccttcgagaagtctgctcacgacatacaggtttgggggaaacacaaagtttcatttatgacaaagacagaggggacacacatgaaaatacttgcgcatataaaaaagtttgatcattttataggcctagtggaaaggacagaagctggacagtgaggggtgcctgaacaggcctgggtaaagtagttactaccgccggggcctgggatatataaactaataacagagttaagagccaaagaatggaaaataaaatgaaagcatatcagtaactggaggacttcttttttgttgttgttattgttgagatggagtctctctgttgcccaggctacagtgcagtggtgtgatctcagctcattgcaacctctgcctcctgagttaatgttattcgcctgcctcagcctcccaaatagctgggactacaggcacatgccaccatgcctggctcttttttttttttggtatttttagtagagacctggttttaccatgttggccaggctggtctcaaactccaggcctcaagcaatctgcccatctcagcctcccaaagtgctgggattgcaggtgtgggccaccatgcccagctctgaaggaattctccacaggtagtcctgttactgaggaatgctgagtgcttaccaagcccagaatttcagctacagctctagcttgaaaatggtagtcaggctgggtgtggtagctcatgcctgtaatcccgactctgggaagccaaggcaggaggactgcttaaggccaggagttcgagcacagcctgggcaacacagcaagagcccgtctctattttaaaaaagaaaaagaaaatgataccacaaacttccccaaagatcagttagaactagtactaagtagtttctcaaattttcagtatgggaagtggtgaggtataggaatgactaaaaatctgaaacaatttttgtccccttaaatgtgcttggctatcaataagaaatactgaataaaattcatayttcaagttataattaaaatccaatttccaaagagtcttttgctagaactattaaaatgcatctaaaccaatgagttcaatttttatctcctctatatttttggcctgcaaaaaatgctaaaaataaaggtgctaatgatttgagaaatggttaaaatatagataccacccaacaaacatgagaagagtccacaaaccagcactctctgaataagttagtacacttggggttaactgagaaaaatttcatttttagacatgatacaaaaaataatttcatacagctttttaagctaaaataaaataaaataaaataaaataaaataaaataaaataaatctttcaggagtgtaacgaaggctgaccatagtccagaacaccatgcctcagcacataggccatttaacctgggcggtctggtcacactgagctgtcactccacgccttggagaagcagggtggtcagtgcgacaggctgtcactgccagtgccacgctgctgaagccacgagagcatctcggggtgagcagcgtggattccacatcctcccctgctctcactctctaacctacccatttggttgctcacatttttactttccctaaagatactgatgttattaaaaataagcaggagttcatggaagagatctccatggaacactgttaattttttcattatacctgtacaatttaatttaattataatgtattctagaaagcttgtttccaatgggcaagagaaagaaatgaagcagttcttacgtccagaatctccagtgagttttcaaaggatagagagtgctcttccatttttttttttttttttgagacgtagtctcactctgtcacccaggctggagtgcagtggagagatctctgctcactgcaagctccgcctcccgggttcaggccattcacctgcctcagcctcccaaatagctgggactacaggctcctgcaaccacgcctggctaattgtttgtatttttagtagagacagggtttcaccatgttagccaggatggtctcgatctcatgacctcatgatctgcctgcctcggcctcccaaagtgctgggattacaggcatgagccactgcgcccagcccgagagtgctcttcttatgtgcagtcacaccatggaccagacaataccccgaggtcctgcaggctttctctccttatccatccttttttccctcagcttctttctcctcccttctgctttacatgtatatatgtatgtatgtattgagtcatctattgctatttatttcttcccttccttcttttctttcctacctagaaaagcctgtcacaagtcctactgcctatgatagggaaaagaaaaagaaaaagaaaaagaaaaagaaaaatattaactttactgccactgtgtcctgtcaccctcttggagttcttcacaagctatgtgatttgacttgaaagtaatttgaaggtttgggtaaattttctggacaaatagagtgctttaaagacaaatcacctaaacaacaattatttgtttatggtagaaaaggagctatagacatcttactgcatggactccttatctccccacttcctatttgcttaaaatgtcaagaacaatcagatagtttcactatgaggaacaattgcgtattagtctgttttcatgctgctgataaagacatatgcaagactaggcaatttacaaaaggaagaggtttaatggacttatagttccacatggctggggaggccttacaatgatggtggaaggcaaggaggagcaagtcatgtcttacacggatggcagcaggcaaagagagagagcttgtgcagggaaactcccatttttaaaaccatcagatcttgtgagacttactatcacaagaacagcaaaggaaagacctgccccccatgattcaactacttcccactgggtccttcccaccacacatgggaattcaagatgagatctgggtggggacatagccaaaccatatcaaactgttttatagtattattctggattattttggaaagtttattacaactagttatcaatacaccaaagatatggaaataacttcattatacaagcatggtctttgtaatggcatttgtttaaaatataaggatgaaatacataggtaaagcatgacaattgcttcaagataatacaagaggatgtataaaattcctcaagctgtagacatgatttgtgtacttttctatacgtacattagacttcagtaaaatgtttgcatataaaaaaaagggaaggggagtaacgaaggttataattaaaacaaaattgtccctgagttgacaactgttgaagttggatcatgagtactattctattcttgtacatgcttgcaatttttcataatgaaagatgttttaaaatgttacctaaaacctaagaaactcaagcaaatacaagattcagaagcatggtataaaagcagtacatcctttaaagctagattcagatgcaaaatatagtgcattaaaaatgaagaatcaatgcttctttataattttactgaaagtgaataatttttcatgaaaaattcttggcataattacaaaggaggattctacaaactaagaaacagaagtgttctaattctggtggaaaattttttatattttgtagtatactagaataaatttaagattttaaataagagaaagatttttaaaaatctaatgatctcctaaaaacacagtaaatgagttgcttctgatataagcaaaactaagagttctagtacatcatatgaactatgtttggatatcctgtgcattaatcctactttattcattctctccccaggcactgaccctcctctccccattagcagtcagtaacatttatcaagcactatagagaaaactggcagcccagaaaagataaaaggttaaacagtgattgtttcatgcagcaaaaaatatctaaaaatatgaaatctttcttggttttcctaatagaagtcacttataacaggtgcattaagtctagcagttaatggaatctgaatttagaagtaatattttctacttagttgaacagaattgcttgcattggaatacaccaataaattcatatttgtctttggtttttcataaaatgcttcattctattcaaaagtgctgcatgaatagtgttacacactacaggcattccccaacttacagaagggttgtgttctaaaagctcatctgtaaatcggcttcctagaactcagatcacattttttcactgaaataattttctaaagggcagttaggccatcaggccacccaatagaaatcaataaggtctaaatttattggacctactgtgatttagtgaagcactctggtttttgttttttcaactaaccactttgaaccattatttatttggtaaatgaaatacggattctaggactactactctccaatgctctgtgcaggcagagacacacatatatatacacacatgcattctcccttacccacatctatgtaccaaaagcttccttactcatcagagtaagcacactgaagcagtttagacaaaaggctcttgcatttgaaagctggggaagttacagttctagagcctattaaaggagcagtgaacacagaagcttccacaggaactattcctattgagtctcatagatgcaaagcagagtcttgcaggcagttggtggattgtaacttctaccagatttatctcccagaaatatagtttaaaaacaaattagcaacttctgtaagtcccagacagagtaatcaggcaaaagaaagaaataaagggcatccaaattggaaaagagaaagtcaaactatctctgtttgctgatgatatgatcttatacctagaaagccctaaagactcctccaaaaggcgcctagctttgataaatgaattcagtaaagcctcaggttacaaaatcaatgtacataaatcagtagcactgctacacacgaacaatgaccaagctgagaatcaaattaagaactcaatcccttttataatagctacaaaataaaataaaatacttaggaatatatttaaccaaggaggtgaagaactctacaaggagaactacaaaacactgcttaaagaaatcatagatgatacaaacaaatggaaatacatcccatgttcacagactagaagaatcaacaccatgaaaatgaccatactgtccaaagcaatctacagagtcaatgcaattcctatcaaaatgccatcactcttcacagaattataaaaaaaaaatcctaaaatgcatatggaattttttttaaaaagcccaaatagccaatgtaatcctaagcaaaaagaacaaatctagaggcatgacattacctgacttcaaattatactaatataagggtatcataaccagaacagcatggcactggcatataagtagatatgtagacctatggaacagaatagagaacccagaaataaagtaaatatttagaaacgactgatctccaacaaagcatacaaaaacataaactggggagaacaaaagacagcagacagcttctgcagacttaaacgtccctgtttgacatctctgaagagagcagtggttctctcagcatggcgttcgagctccgagaagggacagactgcctcctcaagtgggtccctgaccccagtgtagcatgactgggagacacctcccagtaggggatgacagacacctcaaacaggtggtgcccctctgggatgaagcttccagagggaggatcaggcagcaatatctgctgttctgcagcctctgctggtgatacccaggcaaacagggtctgaagtggacctccagcaaactccaacagacctgcagctgaggggcctgttagaaggaaaactaacaaacagaaaggaatggcatcagcatcaacaaaaaggac

SEQ ID NO: 93915 - DNA, 21089 bp, Homo sapiens
  misc_feature (1)...(21089): n = A,T,C or G
tactctgctttcccaaatgtcagaggaagcagagtggtttacagtcctgaaccttaaggatgcctttttctgcatccctgtacatcctgactctcaattcttgtttgcctttgaagatccttcaaacccaatgtctcaactcacctggactgttttacctcaagggttcagagatagcccccatctatttggccaggcactagcccaagatttgagccagttctcatacctggacactcttgtcttttggtatgcggatgatttacttttagctgcccgttcagaaaccttgtgccatcaagccacccaagtggtctttttataaattttttatttatttatttttgagacagagtctcactctgtcgcccaggctggagtgcagtggcatgatctcggctgactgcaggctctgtctcctgggttcacaccattcttctgcctcagcctcccaagtggctgggactgcaggcgcccgccaccacacctggctaatttttttgtatttttggtagaaacggggtttcactgtgttggccaggatggtctcaatctcctgaccttgtgatctgcccgcctcagcctctcagggtgctgggattgcaggcatgagccactgcgcccagccccacccaagtgttcttaaatttccttgccacctgtggctacaaggtttccaaaccaaaggctcagctcagctaacagcaggttaaattcttaggtctaaaattatccaaaggcaccagggtcctcagtgagaaatgcattcagcctacactggcttatcctcatcccaaaaccctaaagcaactaagagggttccttggcataacaggcttctgccaaacatggattcccaggtacagtgaaatagccaggccattatacacactaattaagaaaactcggaaagccaatacccatttagtaagatggacacctgaagcagaagtggctttccgggccctaaagaaggctctaacccaagtcccagtgttaagcatgccaacagggcaagacttttctttatatgtcacagaaaaagcaggaatagctctaggagtccttacacaggtccgaggggccagcttgtaacctgtggcatacctgagtaaggaaattgatgtagtggcaaagggttggcctcattatttatgggtagtggcagcagtagcagtctcagtatctgaagcagttaaaatgacacagggaagagatcttactgtgtggacatctcgtgatgtgaatggcatactcattgctaaagaagacttgtggctgtcagacaaccgtttgcttaaatatcaggctttattacttgaaggaccagtgctgcaactgcacacctgtgcaactcttaatccagccacatttcttccagaaaatgaagaaaaatagaacataactgtcaacaagtaattgctcaaacctacaccactcgaggggaccttctagaggttcccttgactgattccgacctcaaattgtatactgatggaagtttctttgtagaaaaaggactttaaaaagcgtattatgcagtggtcagtgataatggaatacttgaaagtaatcccctcactccaggaactagtgctcagctggcagaaataatagccctcactcaggcgctagaattaggagaaaggaaaagggtaaatatatatacagactctaaatatgcttacctagtcctccatgcccatgcagcaatatggagagaaagggaattcttaacttctgaaggaacacctatcaaacatcaggaagccattaggagattattattggctgcacagaaatctaaagaggtggcaatcttacactactggggtcatcagaaaggaaagaaaagggaaatagaagggaaccgccaagtggatattgaagccaaaagagccacaaggcaggaccctccataagaaatgcttatagaaggacccctagtatggggtaatcccctccagaaaaccaagccccagtactcagcaagagaaagagaatggggaacctcacaaggacatagtttcctcccctcaggatggctagccactgaagaagggaaaatacttttgtctgcagctaacccatggaaattatttaaacccttcaccaaacctttcacttaggcattgatagcacccatcagatggccaaattattatttactggaccaggccttttcaaaactatcaagcagatagtcagggcctgtgaagtgtgccaaagaaataatcccctgcactgcaggccatacaaatcccctgcactgccaggacacacatttcaatccctgtatctttaacctccttgttaagtttgtctcttccagaatcgaagctgtaaaactacaaatcattcttcaaatggagccccagttgcagtccatgactaagatctaccgtggattcctggaccggcctgctagtccatgctcggatgttgataacatcaaaggcacccctccaaagaaaatctcaatggcatgatgcctactatgccccaattcagcaggaagcaattagagcgatcatcagccaacctccccaacagcacttgggttttcctgttgagagggtgtgactgagagacaggactagctggatttcctaggccgaataagaattcctaagcctagctgggaaggtgaccgcacccacctttaaacacagggcttgcaacttagctcacacccgaccagtcagctagtaaagagagctcactaaaatgctaattaggttaaaacaggaggtaaagaaatagccaatcatctatcacctgagagcacagagggagggacaatgatcgggatataaaacctagacatttgagccggcagcgacaaccccctttgggtcacctcccattttatgggagctctgtttcagtctattaaatcttgcaactgcaaaaaaaaaaaaagttaaatgaacaacatcttcaagaaatataagattgtgtaaagcaaccagatccgcaatgcatggccattcctgagggagaagaaaaagtaagaaatttggaaaacatatttgacggaataattcaggaaacatttcctgattttgttagagttgtagatatcccgataccagaaattctgagaacacctgtgagatattacagaagattaatatcatcaaggcttataattatttgattatccaagttcaatgtgaaaaaacaaatcttaaaagcagctccattgatgggcatttgggttggttccaagtctttgctattgtgaatagtgctgcaataaacatacgtgtgcatgtgtctttatagcagcacgatttataatcctttgggtatatacccagtaatgggacggctgggtcaaatggtatttctagttctagatccttttgatagactggattaagaacatatggcacatatacaccatggaatactatgcagccataaaaaagatgagttcatgtcctttgtagggacatggataaagctggaaaccattattctcagcaaactattgcaaagagaaaaccaaacaccgcatgttctcactcataggtgggaattgaacaatgagaacacatggacacaggaaggggaacatcacacatcggggcctgttgtggggtggggggaagggggagggatagcattaggagatatacctaatgtaaatgacgagttaatgggtgcagcaccccaacaaggcacatgtgtacatatgtaacaaacctgcacattgtgcacatgtaccctcgaacttaaagtataataataaataaaaaaagaaaaaaaaagcagctacagagaatcatcaaattacctatgatggaaatcccactagtcaaacagtggacttctcagcggaaacctaccaagccagtagagattgagagcctgtttttagcctctgtgaagaaaaaaaaaatgccagtaaagaattttatatcctgccaattaagctttataaatgaaaaaacgtaaagtacttcccagataagcaaatgctaagggaattcatcattgaaccagccctacaagaaatgctcatagaagtactaaatatggaaacaaaaaaatgacactgacatcataaaagcacatgtcacatgtgcacatgagcaaaactcacagatcttatctggcaattacatgattgagactacaaagcatatagctaacatcagtgtgacagaaacagaacctcatgtatcagtactaacattgaatgtaaatggcctaaatactgcacttaaaagatataggctggcatattggatgaaaaagcaagacccaactaactgctgcctaagacacccacctaatggttacagacaaaaagcaaaagggggaagaagatgtatcacgcaaatggaacagaaaactgagctactctttaaacaaaagtaaacaaaaaacaaagaagggcattatataatgagaaatataactatcctaaatatatatgcacccaacactggaagaccaaattcataaaacaaatatgactagacctaagaaaatagaaagcaatacaaaaatagtgggaaacgtaaataactcactgacaatactagacagatcacgaaggcaggaaatcaataaactctggacttaaattggacccagaccaaatgaaccgcatagatatttacacaacatttgacaatgttatgtaaatgacagaatatacattttcttatctgcatatagaacattctcccaaattaactacatgcttggccatatagcaaggctcaatacacttgaaaaaataataattatatcaagtatctaattggaccacagtgggataaatgtagaaatcgatatgaagaggaactctcaaaacaacacaaatacatgggaactaaataacttgctcctgcatgacttttgggtaaacaatgaaattaaggcagaaataaaataatatttttgaaacacaaaaatggggacacaacataccaaaactcctgggatgcaacaatagcagtattaagaggaaaaatcatggcattaaatgccttcatccaaaagagagaaaaatccccaactaacaacctaatgctccacttcaaggaagtagaaaaacaagaaaaaaaaaaaaaaaacactaaacctaaagctagcagaataaaagaaataactaacaccaaagcagcactaaatgaaattaagattaaaataattatacaatcattaaaatgaaaagtttgttctttgaaaggatagacaaaattgatagaccaccaactagattaattgagaagacagctgactcaaataaacacaatcagaaatgatagtgttgacattacaaccaatatcacagaaacagaaaagatcatcagagactattatgaacacaaactagaaaacctagaaaacatggatacttcctggacacatacaacctcccaagattgaaccagaaagaaatggaaatcctaaacagaccaataacaagtaatgaatttgaatctgtaatacaaaatatccaacaaaaatggcccaggaccagattgattcacagctggattttaccagacatacaaaaaacttgtcccaatcttacttaaattatgccaaaaaatcaaggaagaacaattcctctctaactcattctatgaaagcagtatcacctgatacaaatattatgcaaggaaagaataaaaaaaccttacaagctaacatacctggtgcatactgatgcataaatccacaataaaatattagcaaatttaaacaaacagtacatcaagccatgtgggtttgataccagagattcaaggatggttcaacatatgcaaatcaataatgtaattaaccacataaacagaataaaaaacaaacactacatgatcatctcaattgatgaagaaaaacgacttgataaaatccaacatttcttcacaaccaactaggcatttaatatacatacctcaaattaataaaagccatctatgacaaacccatagccaacatcatactgaatgaggataaggttaaagcattcctcctaagaactgaacaggatattggtggtgtccatcgtgggcagcagactaataaaggccatggcaccagcagaaatcctgaacaggaaggagatctccgcacaaataagggcgagactgaagaatcaagtcactcagttgaaggacaagtacctggtttcacaccaggcctggcaatattacaggttggcaacagagatgattccaatctttatataatgtgaagctgaaggctgctgaagagattgggatgaaagccactgacattaagttaccaagaacaaccacagaatctgaggtgatcaagtacatcatatctttgaatgaagactctactgtacacrggttcgtagtgcagctatctctagactcagacaatacactgaaggagtgatcaatgctattgcacctgaaaaggatgtggatggattgactagcatcagtgctgggaaacttgctagaggtgacctaaatgactgtttcattccttgtatgcctaaaggatgcttggaactcatgaaagagacaggggtgcagattgccagaaggcatgctgtggtggttgggtgcagtaaaatagtcagggccctgatgygtgacttgcttctgtggaacaatgccacagtgaccacctgccactccaagactgccaatctggatgaggaggtaaataaaggcgacatcctggtggttgcaactggtyggcctgaaatggttaaaggggaatggatcaaacctagcaatagtcatcaactgtggaatcaattatgtcccagatgataaaaaaaacaaatgggagaaaagttgtgggtgatgtggcatacgacgaggcccgttcctggtggcttagggctcatgacggttgcaatgctcatgcagagcactgtagagagtgccaagcrtttcctggagaaatttaagccaggaaagtggatgattcagtataacaaccttaacctcaagacacctgttccaagtgacattgatatatcacgatcttgtaaaccgaagcccattggtaagctggcttgagtaattggtctgctgtctgaagaggtagaattatatggtgaaacaaaggccaaagttctgctgtcagcactagaacgcctgaagcaccagcctgttgggaaatatcaggtggtgactggaataactccaacacccctgggagaagggaaaagcacgactacaatcgggctggtgcaagcccttcttgcccatctttaccagaacttttttatgtgtgtgcgacagccttctcagggccccacctttggaataaaaggtggtgttgcaggaggcggctactcccaggtcattcctatggaagagtttaatcttcacctcacaggtgacatccatgccatcactgtatctaataaccttgttgctgcggctattgatgctcagatatttcatgaactgacccagacagacaaggctacctttactcatttggtgccatcagtaaatggagtgagaaagttctctgatatccacatacaaaggttaaacagactaggcattgacaagactgactctaccacactgacagatgaagagataaacagatttgcaagattggacattgatccagaaaccatagcttggcaaagagtgttgaataccaatgatagattcctgaggaagatcacgattggacaggctccaacgaagaaaagtcacacacagacggtccactttgatatctctgtggccagtgaaattatggctgtcctggctctcaccacttctctagaagacaggagagagagactgggcaaaatggtggtggcatccagtaagaaaggagaccccgtcagtgctgaagatctgggggtgagtggtgcattgatagtgcttatgaaggacacaatcaagcccaatctcatgcagagattggagggcactccagtgtttgtccatgcaggcccatttgccawcatcgcacacggcaattcctctatcattgcagaccggatcacactctagcttgttggcccagaagggtttgtagtgacggaggcgggatttggagcagacattggaatagaaaagtttcttaacatcaaatcccagtattccggtctccaccctcacgtggtggtgcttgttgccactgtcagcrctctaaagatgcacaggggtggccctatggtcactgctggaatgcctcttcccaaggcttacatagaggagaacctggagctggttgaaaaagkcttcagtaacttgaagaaacaaactgaaaatgccagaatgtttggaattccagtagtagtggccgtgaatgcattcaagayagatacagagactgagctggacctcatcggctgcctttccagagaacagagggcttttgatgccgtgaagtgcactcactggcagaagggggcaagggtaccttagccctggctcaggctgtccagagagcaggacaagcacccagcagcttccaactcctttatgacctcaagctcccagttgaggataaaatcaggatcattgcacagaagatctatggagcagacaacattgaattactcctcaaagctcaacacaaagctgaagtctacacaaagcagggctttgggaatctccccatctgcatggccaaaacacacttgtccttgtctcacaacccagagcgaaaaggtgtccctacaggattcattctgcccattcgcaacatccatgccarcatcggggctggttttctgtaccctttagtaggaacgatgagcacaatggactccccacccagccctgtttttatgatactgatttggaccctgaaacagaacaggtgaatggatcattctaaacagatcatcatccatcttcaagaagctactttgaaaatctggccagtgtctattcaggcccactgggagttaggaagtataaggcagccaagagtcagcccctgcccagaagatctgaaactaatagtaggagttttcccggatgtcattttcagccttaattctcatcgtgtataaattaacataaatcatgcacatgtctatttacgttagtgacgttccacagaataaaaggaaatagttttgccaaaaacaaaaaacaaacaaacaaaaaaaacaagaactgaaaaaagacaaggatctccastctcaccactcctattcaacatagtactggcagttctagccagaggaaagggatccaaatttaaaaagaagtagtcatgttatctctgcttgctgatgacatacctagaaaacctagactttacataaaattcctatatttgataaacaattttggtaaagtttcaggataccaaatcaatgtaaataaagtcagtagcatttcgatacaccaatagcattaaacctaagaaacaaataaaaaattccatcccatttacactagccatttacaaaaataaaatactagaaatatgtttaaccaaggaggttaaagatcactataaggagaaatacaaaacactgatataataaatcatagatgccagaaayagaaaaagatcttatgctcatggactggaagtatcactagttaaaacgaccatactgccaagagcaatctacagactaaacataactcctatcattacaaagataatttttcacagaattagaaaaaaaatcctagaatacatataaaacaaaaaaagagcctgaagagccaaataaatttttcataaaaagaaaaaagaggccccacattatctgacttcaaaatatactaaaaaactatagtaacaaagactgtatggtaatggtaaaaaaatggagacatagaatggaaccaaatagagaaycaagaaataaagccacatacctataaaaaactgaactttgacaaagttgacaaaaataaacagtgaagaaaggatatgaaatattgctttactgaatagcaataaagagttctggcaaaattggctagccatattcagaataatgaaactggacccctctctctcaccatatacaaaaatgaactcaagtttcatttatgacttaaatgtaagacctcaaacaagaaaaatcctaagaaaaaaaaatagaaaaaacttctgacattgagggaaataatttatgactaagacctcaaaagcaaatgcaacgaaaacaaaagtacacaaatggaacataaactattttagcttctgtacagcaaaggaaataatcaacagagcaaaaagacaaactacagaagagaagaaaatatttgcaaattatgcctctgaaaatggtctaatatccacagtctacaagaaaccaaaacaaatcaacaaaaaaaaccccattaaaaagtgagcaaaaaacatgaatagacatttcttaaaataagacatgcaattagctacaaaaaaaaattatgaaaaggtgctcaacatcactagtcatcagagaaatgtaaattaaaaccacaatgagataccatcttacaccagtcagaatggctattttttaaggtaaaaaataacagttgttggcgagaatgcagaaaaaaaggaatgcttatacactgttggcatattgtaaagtagtaaaatttctgtggaaaacagtatggaggtttctcaaagaaccaaaataaagctaccattcagcactgcatttccactcctgactatctaaccaaaagaaaaaaattattatatcaaaaagacacctaaacttgtgtgttgtgtttattgcaacactatttacaatagcagtcatggaataaacctaagtttttatcaatggttgactggataaagaaatgtgatatataaacaccacagaatactatacggccataaaaaatgaaagcatgccctttgcaaccacgtggatttagcttgaggccattatcctaagttaaacaactcagaaacagaaagtctgtttctcacttataagtggaaactaaacaatggatacacttggacaagtaggcagaaataattgacactggcaactcaaaaatatggaagggtgggaggtagatgagggctgaaaaattacctgtgggataaaatgttcactgtttgcatgactggtacactagaagcccaaacttcaccattacacaatatatccatttaacaacatgcacaagtaccctttcaatctaaaataataaaaaataaagtacaataaatataagacttgactgtgaaattcctagaggaaaatagagagaaaaagctccgtgacattggtcttggcaattgttttttgcatgtatctccgaaagcacaggctaataaagcaaaaatagacaaattggtttagagcaaactaaaaagtattttcacacaaagaaaacaatataaaatacaaaggcaacctactgaatgggataaaacatttgtaaaacatatatttgatataggattaatattcaaaatatacaaggaattcatagaacttatcagaaacaaataacttaaytgaaaaattggcaaacaacctgaatagacatttcttcaaaggagacatgcaactggcccctaggtatatgaaaaaaaaaaatcaacaacactaatcatcaggtgaatgcacaccaaagccaagatgagatgtcacctcccacccaatagcatagctattatttttttttaaaggtaagtgttggtgaggacagggagaaaagggaaaccttgtacactgtggtagaaatgtaaatttgtacagccattcaaaacattaaaaatagaactaccatatgatccagcaatgctacgtctagtaatatatttgaagtaattcaaatcaggatctctaagaagtaactgcaatcccatgttctctgcagtattatatataattgctaagatattaaaacatcctaagtgtgtgttgatggatggataaagaaaatgctgtatatacatgcactggaatattattcagccttaaaagtatagaaaattttgcaattttcaacaatatagatggacctgaagggcattatgttaagtgaaataaaccagacacagaaaaacaaatgttttataatatcatttatttatgtaatctaaaaaagtcaaattcctagaagtagagagtagaatcgtagttgccaggaattggggtggggtaaggggatgaaataaagctatattggtcagagggtacaaactttcatttgtattagtcattatatattatatatgtatatatatatatgtgtgtgtgtgtgtaggtgtgtgtgtgtgtgcgtgtgtatgtgtgtgtgtaagggtactaaaattagggtactccannnnnnnnnnnnnnnnnnnnnnnnnnnnnnnnnnnnnnnnnnngagtaccataacaaacccactttggaagacaatctcaagatttctaacaaagcaaagtatattgtgttccttggtactacctaattgaatagaaaacatgtctatggaaaaggtgcacataaatgattataacagcttttgttcaaagataacaatattttgaaacaaccaagatgtcctttactaggtaaataggtaaaaaatggtggcacatccttaaaatgaaatattattcagagataaaaagagttaccaagccacgaaaagacatggagggaacttaaatgcgtatttcaatgtgaaagaagcaagtataaaacggttacataatttagattctaaatatatgatattaggggaaaggcaaaagtataaagacagtaaaaaatctgtggtttccagtaggagtggagagaatgtatgaataaataagtgatgcacagaagttttttgagtggtaaaaactactattctgtatgatattgtaatgatagttacatggcattatgcatttgtcaaatgctgtaaaactgtacaatataaacactaatgtaaactatggagtttagttaataatatatcaatattgtttcatcagtcatgaaacatgtaccctactagtgaaagaaagaggggctacccatggacactgtactatctgctcaatcttttggtaaatatataactgttctaaaaataaaatctgctaataaaaaaatccaacagcacacaaggccttggcatatttttctacaaaataggtaaaagtaaggtgttgctaggaaatatagaaatgataaaaagacctggattataaaatatcccccacaaagtttgatgtcctaactcctttccttttattctgacttagaaagaattacagaccaacatcagttagcaactattgagtttctgctacaaaatcaaaaaagctccctctttatattgaacctgaaagtggataaagttcaaattgctatataaagttattaactttagagaaatatttaaatgtattatgccatattaaaattctggaatactaaatccttaatatttttattctcctgagtcaaaagttttcatttcttcttggctatttattctgacaggagaaccttaacatcattttctcaacttccataataaaagttgctaatttgattttaattgctataaaatatagccatcctgtcctaaaacatggtatttttctgacaatagcttgggaatggtggaggtggcacacatccttaccccacctccaatgatgtaataatgtctttctctatttacctcctccctcctcagatacacacatcactcattctcatgttcctccacttcctccttttcagaaaatatacagaaacaaagatacataaattaatttatgcaatgacagattatagaacagcaggcctgttggtgtttcagaaatgcatttatcactgtgatggaattttggagtgtgcctaggaactttataaaatggaatgatatttgtaatcccagtgacagggattatataggctatgggatctatccaccaacaactcaagctataaaactaagtttctttttttattcaaaactcattttaggactcttagtaaagttctgtaatttttctctggtaggttctacaaccttatttttagagtctgtaggcattttgtaggattttctgtttgtcttctctgttttcctcattctactttttatctggttattgctgatatgttagctatggtttttctcattttcatcgtacatcctattttaggttgaactcatttattctaagagttttaaaatagcactccttgagttttacaagaatatactcatatcttaatctataaataattattgatttgtcttttttcatagtcatacctcttatttctaatttatccttggcatactttctataaataataatggtgatggttagcatgcttatctaactttatattttaaagagattgccctggatttcatgcatataatataaaaagaacatagtatggcaaaaaataatttttaatcagaaacagacatctgaattttataaaatgctttctggaaaaatatttaggttataaaatttctcttatggaaccaacttgtaaagcatacaacagtagtatagatccttgtattccatacaccaatcttcactagagcctgttctaaacttatccaatatgaaatgaaactcctaaatgaattcacatgtatttcaatctgtctcttttttagcatgtgactattttaaactattatttcaaactaaactattctgtgatagctctccctgctacctgatgccaacaggtgatgaggtctgcaacactgtcacttctgacactgcagagaaagtttcaataacagtgagactcttgattagtatcaacagtgaaaaaacccatttaggaaaattggcttttcatacacatgaatttcaggccagcaaaaatatggttttaataccgtaaagggaagggtttggggtcagaatattaaattggctagagaatttggtaatgaagagtctgtacattaagttattagaatttttgctaaagctacagaacaggaagggaggtaattctactgtgagagcaaattacattggactaaaagttcaatgtaagtaatttacttccattcacttacttttttcctcctgctcctggcttcataattttgcatttatcctccagctcgccaggaaagtaccaatttgctttgccactagcattctatggtttatcaacccaagcaacgaaggtatagtaccttaatttttctatagtttttcctttaattacttataagtcttaacatttcttgtgtttttattgttcacttatataacttcttttataatttacctttctcctttacctatgtccctggtggtatttctcttataataggttatagcctgttaataatcctctatcatttttattggcagtattttctatgatttctttcatttagatattattaattcagatatgtgaagctatcttaatacacgtaaaaattaatataggaagaaattctgtttctgggcttataacttatgaagatctcacttttcttttatcctcattaagcattacaaaaagaaatttaaaaatccactgagtttttatatgaattacattttccctatagatttaaaaataacgtataattttataacatgactttcaaatctagtaacacagtaatgtatccacttatgctatttttttttttttttaacggagtctcactctgtcgcccaggctggagtgcagtggtgcgatcttcactcactgcaagctccgcctcccgggttgacgccattctcctgcctcagcctcccgagtagctgggactacaggcgcccgccaccgcgcccggctaattttttgtattttgtttagtagagacgggatttcaccgtgttagccaggatggcctggatgtcctgacctatggtttgaatagatcgcctccaaaattcaggtgttgctaatgcattattattaagaggggggccctaaagaagtgattaggccatgagggctgccctagttaatgccattacagccatttttacaaaggctttatgcagccttagcagctgtctcttccacccttctgccatgtttctcccctctggagaaggcagtaagatggccctcaccagacactgaacctgccagaaccttgatcttggactttcctgtcttcaggtgtgtgagaaataaatttttattctttataagttattgagtcacaggcattttttcatggtggcagaaaacaaagatagaatataaaagccatcttttaccacaatcaagtttcttctagttttacatgtcttttttttttttttttattatactttaagtcttagggtacatgtgcacaacatgcaggtttgttacatatgtatacatgtgccatgttggtgtgctgcacccattaactcatcattcacattaggtatatctcctaatgctatccttccccactcccccmaccccacaacaggccctggtgtgtgatgttccccttcctgtgtccaagtattctcattgtacaattcccacctatgagtgaaaacatgcggtatttggttttctgtccttgtgatagtttgctgagaataatggtttccagcttcatccatgtccctacaaatgacatgaactcatcattttttctggctgcatagtattccatggtgtatatgtgccacattttcttaatccagtctatcattgttggacatttgggttggttccaagtctttgctattgtgaatagcatgtgtctttatgggtatatacccactaatgggatggctgggtcaaatggtatttctagttctagatccctgaggaatccccacactaacttccacaatggttgaactagtttacagtctcaccaacagtgtaaaagtgttcctatttctccacatcctctccagcacctgttgtttcctgactttttaatgattgccattctaactggtgtgagatggtatctcattgtggttttgatttgcatttctctgatggccagtgatgatgagtattttttcatgtgtcttttggctgcataaatgtcttcttttgagaagtgtctgttcatatcctttgcccactttttgatggggttgtttgtttttttcttgtaaatttgtttgagttcattgtagattctggatgttagctctttgtcagatgagtagattgcaaaaattttctcccattctgtaggttgcctgttcactctgatggtagtttcttttgctgtgcagaagctcttgagtttaattagatcccatttgtcaattttggcttttgttgccattgcttttggtgttttagacatgaagttcttgcccatgcctatgtcctgaatggtattgcctaggttttcttctagggtttttatggttttaggtctaacatttaagtctttaatccatcttgaattaatttttgtataaggtgtaaggaagggatccagtttcagctttctacatatggctagccagttttcccagcaccatttgttaaatagggaattgtttccccatttcttgtttttgtcaggcttgtcaaagatcagatagctgtagatgtgtggcattatttctgagggctctgttctgttccattgggctatatctctgttttggtaccagtaccatgctgttttggttactgtagtcttccagtatagtttgaagtcaggtagcatgatgcctccagctttgttcttttggtttaggattgacttggcaatgtgggctcttttttggttccatatgaacttcaaagtagctttttccaattctgtgaagaaagtcattggtagcttgatagggatggcattgaatctataaattaccttgggcagtatgaccattttcatgatattgatttttcctatccatgagcatggaatgttcttccagttgtttgtatcctcttttatttcattgagcagtaatttgtagttctccttgaagaggtccttcacatcccttgcaagttggattcccaggtattttattctctttgaagcaattgtgaatgggagttcactcatgatttggttctctgtttctgttactggtgtataagaatgcttgtgatttttgcacattgattttgtatcctgagtctttgctgaagttgcttctcagcttaaggagattttgggctgagaagatggagttttctagatatacaatcatgtcatcagcaaacagggacaatttgacttcctcttttctagttgaaaaccctttatttccttctgctgcctgatttccctgaccagaacttccaacactatgttgcataggagtggtgagagacagcatcgctgtcttgtgccagttttcaaagggaatgcttccagtttttgccattcagtatgatattggctgtgggtttgtcatagatagctcttattattttgagctacgtcccatcaatacctaatttattgagagcttttagcttgaagtgttgttaaattttgtcaaaggccttttctgcatctattgagataatcatgtggtttttgtctttggttctgtttatatgctggattacgtttattgatttgcgtatgttaaaccagccttgcatcccagggatgaagcccacttgatcatggtggataagctttttgatgtgttgcttgattcggtttggcagtattttatttaggatttttgcatcgatgttcatcagggttattggcctaaaattctctttcttggttgtgtctctgccaggctttggtatcaggatgatgctggcctcataaaatgagttagggaggattccctctttttctattgattggaatagtttcagaaggaatggtaccagctcctccttgtacctctggtagaatttggctgtgaatctgtctgctcctggactttttttggttgctaggctattaattatggcctcagtttcagagcctgttattggtctattcagagattcaacttcttcctggtttagtcttgggagggtgtatgtgtccaggaatttatccatttcttctagattttctagtttatttgcatagagatgtttatagtattctgtgatggtagtttgtacttctgtgggattggtggtgatatccccttcataattttttattgcgtctatttgattcttctctctttccttctttattagtcttgccagcggtctctcaattttgttgatcttgtcaaaaaaccagcatctggattcattgattttatgaagggttttttatgtctctatctccttcagttcttctctgatcttagttatttcttgccttctgctagcttttgaatgtgtttgctcttgcttctctagttcttttaattgtgatgttagagtgccaattttagatcattcctgctttctcttgtgggcatttagtgctaaaaatttccctctacacattgctttaaatgtgtcccagagattctggtatgttgtgtctttgttctcgttggtttcaaagaacatctttttttctgccttcatttcgttatgtacccagtagtgattcaggagcaggttgttcagtttccatgtagttaagcggttttgagcgagtttcttaatcctgagttctagtttgtttgcactatggtctgagagacagtttgttataatttctgttcttttacgtttgctgaggagtgctttacatccaactatgtggtcaattttggaataggtgtggtttggtgctgagaagaatgtacattctgttgatttggggtggagagttctgtagatgtctattaggtctgcttggtgcagagctgaattcaattcctggatatccttgctaattttctgtctcattgatctgtctaatgttgacagtggcgtgttaaagtctcccattattattgtgtgggagtctgtctctttgtaggtctctaaggacttgctttatgaatctgggtgctcctgtattgggtgcatatatatttagggtagttagctcttcttgttgaattgatccctttaccattatgtaagggccttctttgtcttccattgcttccacgtaataagctgtattattattacattgaatagtagtttaaaaattacttttaaaatttggtaggtctgttccccttattattcttctttcccaaatgaactcttgcttttaaaaagacaaatttgtgctattatttcatctgattataaaagtattttaaaataaagctcaggctaaaatgattgcatatataatgttgtctctattacctaaaatttacatctacacattagcataggagaatcactggatagatacataccaaattattaatgacagttacctctgagcaatttatttatttgatttatcatactttattttcaaagtactcatttcattactaaaaaataaaatatctaaaataaccatgaaaaattacatccaaaattccttagtataactgttctgaaaaccttaattccgtatgctgacacagaaatatttggcagtaagtgaagtaaagggctcagaaggatatctctttgactaaaaataattcctaaacaaattttatttaaaattacctttttctgagtcataatgagatcttggtccactttggacattaaaaatgagcctccatcatgttccatccagtaaaattttaagtcttttaaatgtacctttgtgtctagttttaacctgtgtaggattaaaaagaaactgacatcaacaaattatttagatatccttaatagttcaatcctgacatctgagcttcagctctaatgaagtatttttttccctgagcactgtgtgccagaaacagtattatacctttagaatttagatttgcatttaaaaaatgtacttgagctgcaagggagagaatggtttgaaatgcatcaaaattgtagacgtggtgacaagtcaaaatgttttggtggtagttcatgctagaaatgattatagcctgaactagaactgtaaccatggtaagggagagatatgtaaagatgtaagaaatcattagtaggtaatttcaatatgactcagcattgcttagatgtaatgactgagaaaaatcggaaatgaggctttagcaactgggttgattttggtcatccagtcactgggattgggtaagaatcaaagtagtggatcaggtttctggagcttgaaagaaaaataatatcagttttagatatattgagtctcagtta

SEQ ID NO: 93916 - DNA, 47648 bp, Homo sapiens
  misc_feature (1)...(47648): n = A,T,C or G
accagaagaagggaggaaaagagaaagtgggaagggaaagcatgtgagttcatccctcctgcctgtgattttctcacactgcgtccgttcctccattcatcatatgtcttcagaaggcatgaacaaaaggctaggagaacagtagtatcaggtcagaatatttccccacttgtatctggtcttgcaagaaatagctggtttgcacaaaggatttaattgaagtgagtttaataaatggactattaacagaggtgcaacagccttaagggaactcggcaaagagtggtgaagaaccagggacaagcacagcaggaagccaatgccactcatagacgcgtagaagcaagtggtgatggtgttactggacccctgtgagagccacagctgtggagaagggaacacttgaaagtcccgtggcaaagaggaatgcagccactgcaaaaccatgtcccaacaaggagtcacagtgggataaataggctgacctggcttcctgccttctaatccccagtcagcaccagccatcagccaaacccaattggaagccagaggacaaggagagtcagatgacacagttgtaggcgtcagcctcccagagcacaagccaaggcaaagggtggagagtggaggggaaaacagagaggaaccaacacacagtcaacaatcagaagtgaaaaatgttcggcttatcccacaaagcaaaccactgtgtgcagcttattacgactttctgttagcatactggacttctttttttttttttttttggagtcatgtgcgcctttattagctgagccattacttgagagggatgaagcgggaggagtgggtggccccgatgccgggccggccgtgctttacgggcttgtaggtgatggagaactcgcccaggtagtggccgatcatctcgggcttgatctccacctggttgaaggtcttgccgttgtagacgcccaccatgctgcccaccatctcgggtaggatgatcatgtcccgcaggtgcgtcttcaccacttcckgcttctccatgggcggcgcctccttcttggccttgcgcaggcgcttcagcagggagtgctgcttccgccgcaggccccggttcagccgccgccgctggcgcgcactgtacagctgcatcggctgctccagctgctcgtaggacatgtccagcagctggtccaggtccacgccgcggtaggtgaacttgcggaaggtccgcttcttcttctgctctacttctgccatcttgccggatcctcagaagagcagcatactggacttctgtatgcaccagaagaaatgcaacattattttgtggaagttcaaaagacagatggcatctagggctcccagtgcctcatctcctgatgggtgggatttggattttctttccacaaccctcacaacatgtcttcttactctacattctacatctgtgtgagggacaaaaaattctgcatgagcatgtttctagcatctaggtgttttttttgtttgtttttttgtttttttttttttttttgagacagagtctcgctctgtcgcccaggctggagtgcagtggcgtgatctcgtctcactgcaagctccgcctccctggttcackccattctcctgcctcagcctcccgagtagctgggactacaggtgcctgccaccacgtctggccaattttttgtatttttagtagagacagggtttcaccgtgttagccaggatggtctcgatctcctgacctcaagatctgcccgccttggcctcccaaagtgctgggattacaggcgtgagccactgcgcccggccagcttctaggtttttaggaaggccatcttcttcaatgctctcccccacctgctacatcaggaatcacccaacagcattgctgacaggttattgagtctgattaggtactttggtgacaaactgcttacaatctccagagggaaacttctatcatttaacaactctgttttaaaaaagttcacaggcaggggtggtggctcatgcctataatgccagcactttgggccgccaaggcaggtggatctcctgagctcaggagtttgagaccagcctgagcaacatgatgaaaccccctttctaccaaacatacaaaaattagccaggcatggtgacacacgcctgtggtcccagctacttgggaggctgaggcaggagggtgagtccaggaggtggaggctgcagtgagccaagatcatgccactgcactccaatctgggtgacagagtgggaccctgtctcaaaaagaaaaataattaattaattaattaaaaggttaacagtaagccacaacaatgtttattgaaaaatttccccttctcagtgacagttttatttaatatcaaagttaggttcttaaaagataatttaaaagttgaaattctctcagttttacatataacttcaagatgattcaacaccattggtaccatttggccatgttttcatcctcccgaaatgttttgttaaatggggtctggaatcccagagattctcatctgctgctgctatgaagcaaaattaactcaagagtggagtgaaggtgttaggtcaatggggtgaaaacattaattgaggacaaagactagatacttttagggagagggatagggatacaatgatgtcattatagaattacaagctaaagttcgcaaaggaaaagaatcagtgtaagatgaaacaggcaatgtttgcagcactcaggaaccaaaaaaaggtctgaaaaaataaaaccggaagattcagggatagtttccttttattcctagggatccgctctcactcttctctcttctgctctgtgccctaagttgacctgggatggatacatggactgccctgtggcttctgattaggttctggttagcccctgggacaccctaggcagaagatcagaggggagaagagtaaggctggaatatttatctgcttccatctttctccctatgaggtctctgcaggctggctgcatccctgtactcaaggcctctatcggacttccccctccgcacaattttctctctggattccagtaattctctgcccttcagacctggggcactgcctaaccctgaggtttcctacactgcccacaacttcataaacagtcttgttcattatgaaattactcaattccaatatgctgtttgttttctgccaggaccctgattaacacactcagtctcattagcctcccaacacatgtttattgagtaactgccacatcccaaggaggaataaaatgatcaattagagaatccatgccttcaatagggcagtctgagagtggagacagccagagaagcagatccttatattacatcctgacaggtgacacaaggaggcactggatggggaggtcagtgggatataaaagtctgggcaggggcagactcagggaaggtttctcagtggagatgggggtcagggaaatttagaggcagtggcgtgggtaggaagtggtcagaagctgccagagcagtttacagccaaggacatcagggccagtcaggttgtggtaagagactggcagggggtgctaggctggaccagatcaaagaaagccttgtgctggggaaaggtatccttctcttccatttgcttactctccccaccaagggaaaaataatgacacaggtgaggtctacagccttttactctgagcccttaatcctgccctactaccatggcttgccactcctatttccttagcctgctttgaaaatcatccccgtatacttcctgcacattctaaggtctttcaagacggcaacaagacaatatagcaaagtagtccttggagatgagctacagaagagggctagaagtgaacgttcccaaatgcattctggaagccctggcagtcagaaccctttttcttataatagcattagataatgctgacattgtttttgtccagtggagaagggtgaggataatgttggaaagagggcagggagcaagcttcacttcatcaaggaggggctttggttcaaattggtttgggtgggcgggcactttgaaaatccatttgtcacactaaacggcaagtccaggtccaggaggttcctgtcttccctctctcaagagcaaactgcaagtagtttcattgcaggataaggccaagcccaccgctgcccatgctgtttttgttttgtttccagacagagtctagctgtcaccaggctgcagtgcagtggtgcgatcatagctctcctgagctcaagtgattctcttgcctccacctcccaaagccctgggattacagctgtgagacacctcatggggacccggtttactgggttttttttgttttttgttttttgtttttttttgagacagagtctcactttgtcacccaagctgaagtgcagtggtgcaacctcagctcactgcagcctcgaccttctgggctcaagtgatcctccttcctcagtcccccaagtagctggggctacaggtgcatgcatttgtattttcagtagagacagggtttcaccttgttgcccaggctgttctcaaactcctggactcaagtgatctgcccgccttagcctcccaaagtgctaagattacaggtgtgaggcactgcgcccggcctttactgttaacttaaaacaaaaaattataaatttgaaaaaagaggagactttatttcttataaaaggttatagcctgcaaggaggccattccataggctgataaacatagcctctggcctaagaccagagacaggcacttggaaggcagaggggttggggtaggagctttatgctgaacagtttggccaaacatacatacgtaacaggttacaggaggagctatgaatattaatggaggtggtccttacacatgcatattgaacaaacatgcatgtaacatgttctctttggggtggagacttaacatttaattgtattacttcaaatacatttaaatgtattacttcaaacctacacttcaaaaggtcttttcaggacgtgaatgcatacaagtgcacaatccctstacactggccagaaccggtccatggtcggtcttcttatcatgaaaaagttcctgaaatcagcccagtgaaagctgtagttctggctggtgcaacaggggttcagctggtcagcatctgtgaactgattaagttgtaattgttttaatattgcttatctcaagccagtgcttgtttagcctctagaggaaaagaaaacctttgtggcagttagaccatagtttatttcttaagtgtaggagtgtgtgacttaggtcctttttataatttgatgtcttattgctacaaagagtctgttctgtccgccttatgatttctattttaaacattaatgctagtcagctgttgagtctaaattccaaaatggagggggtagacttcccttccggctgtagctagaaactcagctttaaggtttttctggggtctgcttggccaaggaggtccattcagtcagtgaggggcttaggattttatttttagtttacaccaccttacaggttcctccttaacaccctttgatgtcagagacagccaattctccagcactgtggctaaggaggcttcgttagtagttaaaagcacacacataaccctacccaacggatccctctcttctcttaaccaagagggcgcaccactgccctactcaacctccccacaaataaggacgagacacgggaagtgttaaaagcaagtggtgagtataaaatcctcggaattttctctttgagcaactaactaggtctgttactgaagccctctgcgagcttggatgctggacgagggagagggtgaggccaccaggcagtgagcgccctcggcggccgcgtgatcccgggggtggggcccatttctgagttggggccagctccccacccgcaagaggccccacattccgggccagcagcccagaaagtccmtccccgcaggcggagacagccccaagaagtcgacgccccggtcccgccgcccggccactacccagagggctgccgccgcctctccaagttcttgtggcccccgcggtgcggagtatggggcgctgatggccatggagggctactggcgcttcctggcgctgctggggtcggcactgctcgtcggcttcctgtcggtgatcttcgccctcgtctgggtcctccactaccgagaggggcttggctgggatgggagcgcactagagtttaactggcacccagtgctcatggtcaccggcttcgtcttcatccagggcatcggtactggcacctcctgggggggtgcggggaggaaagcggggagaacggcgggggcagagggtcctccgtgaagccccttccagctgaggaagtgctggaggatcgcggggcccggaggagtgcggtgaggagcgcgcgggaagccaagtcggctgggcgggagggaggctggctggctctggggcgggacagagctgcggttcaggaggatcgccgcgagcgcggggccgggggtgcgcggtggagacgcgctgctgggggcggcggagcggggccggccccacttggttaactctttgcggcgactggctaggacgcactggaggggcctccaagacccagaaacttgagcccgggcgcgatgccggagcgccgcgcagtcgggccgctgcagcccacgcgccccggaaagtcgcccctgtggaccgagcctgcgcratcgggggcgcggaaacactttcgcctcagccttttgctgaacttgcttccaggctgcagatgaggaggggaaggcagcggggaaaagattgccrgagcgagaatttgcccgtatttgtaacatcctcggccctgggtaaaggggctggccaaggggggcgagtgaagcatccgccctgggttcctctcctcctagagtgttaaactcagtcgagtccgggaagctgccaggacttccaagtgtgtttcrccgccctgcccagtcattggacggtcttgagcccgacttgtttatgtggcagaagagtggcgaaagttcccccgcggggcttcctattgggcactggcccagcactccgggtgggagatgcccggagagggcccgcggctgcctggcaccgagggatgcctctgctcgggatgcccccggcgcaagctgcgtccgtgtttggcccgcggcgagccagccccgggcctgcattctctgggctgaggctggcgcgggggaggggctcagcagtcgctggcaatgtttgttgtcattgtgtagtgcctctcacaatgtcctgactgcttccttcggtttgccgtgtagctggaggaacctctagcttttggcgcaaacaccatttatttgtaaccacttccccaaaggcacggccttcagaaagtagttagagaaaggcagcaaggggtggagtggtgctatgtcgcagaaaataatcgagaggagtagcaagggtttggaaagatatgcccactggccgaaatctctagctttgcctgcgggcaggctgccttttcttcaccaaatatttaactccccacaaacgagtgtgcaaaagagtgctgacctcattcctaaagaaaagtgattttggcttttgtttttgttggttgttttaaacttgtactgcagctttcgcaagtgtggccagcattctcccactctggaatgtagtggaaggtgttactaaccctcagcattcaaaggcttccctggtgtgagatcggcatcasggtgtgagcaccactgggcacctaaggcatttcgttgcgtaactctcagttattttgccactatgcttataagaaaaaaacatactcaagttccaaagtaactgtcagaagcactctttccttcgtggtggagcccttaagtttggccccgagctgtctacaccttgtttgctcaaagagtagagccagtctcctcttctacccaactcttcagagcagcttctaataccaaaaagctttctggaggtcttggaatatcttctcataattgagggtaagggaaacacaagtgttattgctcgttgcctgacttgccacagaggagaagacatcagaatggctaatagtgattgcatgctgtgtgtccactaagtgcattatgtcacatcacatgtatgtaagagtaaactgaggcagagaagttatgtaacttacccatgaaagttgttttaagtcttttcagtgaccttatcgtcaaagttggattctctgcttttatggcaatatgcttattttctgccaaatctttttagacagcgaaaaccttcatctaaaatatgttttgaaactcttcattcatgttagagtccaatatacggttttctaaaaggtttttwaatttctctaaactttgtacttctcttaatctgttcatacttaactcttggacaaaaatgtgtaaattttggcaattttcatctgctgctcttacgaaaatcttgtttctttttttctttctttcaagacgtagtcttgctctgtygcccaggctggagtgcagtggcgcaatcttggctcactgcaacctccacctcccaggttcaagcaattctcctgccccagcctccccagtagctgggattacagatgcctaccaccacgcccagctaatttttgtatttttagtagagacggggtttcaccatgttggccaggctggcctcgaattcctgacctcaagtgatccgcctacctcggccccccagactgctgagattacagacgtgagccacagtacccggccgatcttgttttctttaggttcaattactgtatttgtatcaatggtccagagtttgtcccgtcattactcatcctgtttcctgtttggatcctggatgtgcaaatcactttaatcataatgcatttaattgacatgagcataaatgttttcatacatgtaggcacatgtatagttctccccagttcttccatatcttggccaacccatccacattcctcaccctaagtattaggaaggctccagtggaaggagggggagtaataaataaactttataggctgcgagggacccacatgttacagactcgccatgttataacagacttttttaccgtgtgtgattgctgcaaggaggaaaattttaggctatgagatttcaaatctctaacaaagaacacgatgtattggagttcttctcttctgtaatacacaaatatttggagatgaagaagagaaggctaaagtacagttattactctaagtataaaatgctttagaaatgcaatatacaaatagtaaacaatatttgaaactaagaacaagtatgagtcctttgaaacacctttaagaagtaggctctgggccggcacagtccagctacttgggaggctgaggcaggagaattgcttgaactcgggaaacggaggttgcggtgagtcgagatcttgccattgcacttcagcctgggcaacaagagcgaaactcccgtctaaaaaaaaaaaaaaaaaaaaaaaaagaagtaggctctggccgggcacggtggcttacgcctataatcccagcactttgggaggctgaggcgagtggatcccctgaggtcaggagttcgagaccagcctggccaacatggtgaaacactgtctctactaaaaatacgaaaattagctgggcgtggtggcaggcacctgtaatcccaggtactcaggagtctgagacaggagaattgcttgaacctgggaggtggaggttgcagtgagccaagattgtgccactgcactgtagcctgggcaacagagtgagattctgtctcgaaaaaaaaagagggataaactccaaagaagcaaagctaacatagaagttacaaaacaaatctccctctccttctttattcccctttccctttctcgctcaccctctctctccttgtcccattttctcctctgtgtccctctcccttcctttccccctctctctcccctcctttccccctctctctccccacctcccatactccaagtatattttggaatatgtatatattctaaattaaagtataacagatcatgggaaatctaaaactaaaataaaattttaaactagtgggaaatctagctaacagactctaacatgaatgaggaagggtttagaagaggctttgtgcttctctgaaagaaatgtttcccatgaaataagtatactactaggaaatcagagaaacgaaccttgaaaagagggccacagaaaagactgaaacaaataaacgctgtcaaagtggctgttgaccttttaaaaggttcagcaaggtggaatgtgttctttagtgaaaggtagaaaattcgggtgtctacatttagcgaaaagaagtcttggcaattctatattccttcctttcctgtgtagaactccttttattgtataaactgaagggagagaaattaaatagtctaatgatctcaagttgatttcgtgagakaatataactacctttaagtaacatttaaaagactaacagaaattaagagcagttcttaaaaaacagttgggatatcctattaatttatctaaaagtgaccaaattccaagattacttaaatagacttgaaaaggctcttggggtaaaatccagcaagtaagataacggagaaagtgtcccaaatacctactctaaaagaagcttcagggacaccattgataataaatcctatcaatattagcgatacaagggtttttacaaagcgtaaagagatgatttaaagcaattttgtgaccaaaaccacaaaaaatatccccaacatattttttgttgtaaataaatacacatagatttttaaataatgcaaccaataaaaatgttttagatatgactgtggtgctcagtgctatatccccagtacctagaataacactgagaactggcacatggtagacgagtaagtggttgttgaatgaatgagtgattatttctgtaccatcattgaattgttagtaacaaaatgcagtttacagccacttacttgtgacrataacaatagtgtctaaagtaaacacaccctcgcttttccctagtgattctcctgttcagccagtttaaaagcactggcttagtcaacctccaggaagaatggacatcatattgcactggaaacscatctttattctgaggcctctagctgatgagaatgttgctgcttaagtacaatctgtacctcctcttcccttcatcccagttctccctcctttttctgcatcattaagtttctcccccaactggcttatttccaacatgttataatttctatcatcttcgaaaacaaaacaaagcaaaacaaaacaaaatcactcttgaccctgtatatccctcagctactgcctcagttctctgcttgccttactatgaacttttgaaatttttgtccatacctgcagtttctagttcctttcttcctgttctttctcgagcckgttccaattaggttttcatctcctgctccaccaaaattgtgcttaatatggtagctaatgactaccatgtcactaattccattggtcaattctcagtcctaatagtgtttgagtggaaggcagcatttgacataattgacccctcactcctccttggggcactttattttattttattttttttgagatggagttttgctcttgttgcccaggctggagtgcaatggtgtgatttgagctcaccgcaaactctgcctcccgggttcaagcgattctcctgcctcagcctccagagtagctgggattacaggtatgcaccacgatgcccagctaaktttgtatttttagtagagatggggtttctccacgttggtcaggctggtcttgaactcccgacctcaggtgatctacccgcctcagcctcccaaagtgctgggattagaagtgtgagccaccacgtctggccrggacactttctttacttggcttctctttcttcacctggtaagttgggtggcttccaggacacctgattctcatggctcttctctctttcctggctgccccatcctcagtctcctttgctggttcttcctcatcttcctgatgacggcaggttagagtgctcaagcctcagtcttctgaccacttctttttttctacactcacttctttggtggtcaatcttatccagtctcttcttcgctttaagtactatctatacactgaaccctctcaaatttgtatattcagcccagactcttccctgaactccaaatccaaatatctgtttgcctactcaaactctctacttgaatatcagataggcatgtccaaatctcagctcttgatcttcctcatgcctgcaaaaccaactcctcccataggttccaccatctcagtaaatggcaactttatccttgtagtcgttcaggacgaaattatgcagtcatctgtgattcttctcttccatacttctcagccatttcactagaaaatcttatagactctgaattcaaaatacagtattatctaaattctgatcactgactattaatttattgtctgtcttctcctactagaatataaactcccagaaggaagggattttgtctgttttcttcaatgctgtatccatagcattacccaacacataataaacattcaatgaatatttactaaattgatggaagtttggccagttctttaaaccagagggtcacaccaacaaggattggagtacaaagtaaataggtgaagtagatttagtatacagcacccaccagggtgtctttctggattcaactaaacattcagacacgagaaactgctgccaggggcggtggctcatgcctgtaatcccagcactttgggaggccaaggcaggtggatcacctgaggtcgggagttcgagaccagcctgaccaacatggagaaaccccatctctactaaaaatacaaaattagccgggcagggtggtgcatacctgtaatcccagctacccaggaggctgaggcaggagaatcgcttgaacccaggagacagaggttgcggtgagctgagatcatgccattgcactccagcctgggcaacaagagtgaaactctgtctcaaaaaaaaaaaaaaaaaaaaaaaagacatgagagactattaagaccatactgaacaccagtctactcagaaggatgtaggacagaagtcagagcttgctggcaggacagtggctgggcagtggcagtgggcatccttgcagcagcagtcatcatagccctcagtaagctatcctttcctcaggtaacagctcaggcaccaggagatgagatctgcactggtgagatcagagcttaaagtccccttgccccataggaaccactgtcttttgtagtactctgtatacctacttctatgatccctgcaagggataggtagtgggttgaacagtgccccccaaaaaggtatgtctaaatcctaatcccaggtatccatgaatgtgaccttacttggaaataggatctttgcagatgttaactatrgatctcaagatgagatcaccctggatttagactgggctctaaatcctatgattggtgcccttataagagaaaggagaaggagatttgagacaaagacacacagagaagaaggctatgtgaagacaggcagagattggagtgatgtggccacaagccaaggaaaatggagaattgttggctcccctagaggccgaagagggtatggcatggcttctccctcaggaccatcctgctattataacaccttgatttttaatttctggcctccagaactgagagataataaatatgttgttttaagttactagatttctggtaatttgttatggtagctctaggggattaatataggctataacagttatcactgcactctgggaagcmcraagtattggcatcgtcatcaggtatttacagatttttcattgtttctctcagtccagacacagtttaccaattgggtcagtttttattataaccagcgttgcctaataactggtgacaaaccacttatctgtttactaaggcagttaattaaaggtcaaatcctcatgcagcagagtataggtgtacacttgtgtgagaggtgggaactgtagggaactagagagtgctcactcctggcaaaacaggaagcttccacttagccccagtggatcgtggctacgtgaggatgccagttcaaggttgccagggcttctcattctcccgagagaatccaggtttttaaaaaattggttcaaacaaaaagtaaaccagccacaaaaacaaaacctccaaaacattgggctgatcaaacaaaacaacatctttggaccaaattccagtccatagcttccagtttacaggtgactcctgctagggttttctgacttgactttgcaaggttttaaatttttcccttaaaaggtagaacattcttcctttttaagaaagatagagggccaggcacagtggctcatgcctgtaatcccaggactttgggaagccaagtagggagacaagcctgggcaacatggtgaaaccccatctctacaaaaaaaaatacaaaaattagccaggcgtgctggtgtgtgttggtaagtcccagctactcaggaggctgaggctggaagatcacttgagcctgggaggttgaggctgcagtgagccatgaccatgccactgcactccagcctggggacagaacaagaccctgtctcaaaaaaaaaaaaaaaaaagaaagactagaaatctttgttataacttttttctttatatagagacttccttaaaaggtcaaaacaagctttgaaatgactatacagactttggctgtacttttctaagtttttgttgttgttcattcaatttcttcatattatcctatccatttaattaacatatttattaagtacttactgtgtaccagacactgtgtaaaacaagtaagatacagctcggtctgcaagctgttcccatttaatttggttggacacgagttatggtttctttctttttgcttgtttgttttgatacagggtcttgctctgtcagccaggctggagtgtagtggcaaaatcatgactcactgcagcctcgacctcccgggcccaagtgattcttccacccctctcaaagtgctgggattacagttgtgaaccaccgcaccgtcccagctcaaattatgatggggttttttgttgttttgtttagaaatgtaggttatattgatccttaaatatttagagctggctgggaccttaagttctacccttcattttagagaccaaatgtctggccagggtcagacaaccaggtagtatcaaagccagtactctttctaacctgtcataatattgatatgaggcacaagaaaatatagctgatctttctgaaaacacacaatttctgaatatttttaaatgtgtagtcaattaattgaatttttttctttttctacatgtatttggtaccaagtagctgcctttgcgaggattttaatcactcagagatgtttctagggctaaaaatatcttccaaatcatctgaatcacttccttcattttgactttccagagattttcagtttcatgacattcgtgctgtgagacagtttgaatgcacagacatgtttcaaagctctgattctctttgacagccactgcaggaatcttttcaagaagtttatttaaagaagattctctgctttttcatttaaacttaaggtcctttggatagaatctggtaagctcttgcgtgcagagggaaatgagttgtggagactgataatcctgttctgagcattctgccaaggagagtgaaataatactttattcaaagagggaagggaagtgtaatgggcacaccatgtttaagtagaattcataagtgttttaaaattccagtgtacttcaaactcaataacttactcttattttatttttgaattcacttcaagttgttaagtgggtccaagtgcagaatgctttttacttatttgaaagggccatttggtcttctattagctaatacttgcatcagcagtacaatttttcttgagttttttgatttgtgcattttatgggcctggcatggtggcttatgcctgtaattctagcactttgggaggctgaggcaggagaatcacttgagcccaggagctggagaccagcctgaacatcacggcaaaaccctgtctctacaaaaaaatacaaaaattagccgggcatggtggtgtgcacctgtaatcccagctatttgggaggctgaggcaggagaatatcttgagcccaggaagcagaggttgcagtgagccargatcatgccactgcactccagcttgggcgacatagtgagactctgtctcaaaaaaaaagaagactaaaaaataagtatgtgaggtgatggatatgttaattagcttgatttaaccatttcacgatgtgtgtgtgtgtgtgtgtgtgtgtgtgtgtgtgtatggaaacatgttgtatagcacaaatatatgcaatttttaattgtcaagtctctaaattaaaaaaataaattttaaaaaaagtaaaagaggatttgctcatttgctggcaatactgaatgaactactgtgctttattagcaattattcctgtgctttatttagaattatttgggccgggcatggtggctcacgcctgtaatcccagcactttgggaggccaaggtgggcagatcacttgaggtcaggagttcgagacgagcctggccaacatggtgatactctatctctactaaaaatacaaaaattagccgggcatggtagtgctggtctgtaatcccagctactctggaggctgaggcatgagaattgcttgaacccgggaatccgaggttgcagtgagccgagatcccgccactgcactctagcctgggtgcaaagagagagactctgtctcagaaaacaaaaacaaaaacatacttactgaattcctactatatgccaagctctatgctaaatactgggatgtgacagtgaacaagatagacatgttcccgccttcatgaatcacaagatttaaacacagaagaactagagtcaaaatgttttccatgtttggggacatttctctccctctaagcactcttcccctaccacacacactttgacagattctaaatttgcattgcctgctctaagacaaacttgtgtatataaatagttttgtaatggtatatggatggaaagctggtgtcaaaccagagattacattttagagagtatacattttcacatattcccaagttttggttatgcaacaaggagctgagacattttcttttcttttctttctttctttctttttttttttttttttgagacagaaactccagctctgttgcccaggttggagtgcagtggctcactgggactacaggtgtgagccaccatgcccggctaatttttctatttttttatagagacagggtttcaccacattggccaggatggtcttgaaatcccgaccttaagagatccgcctgtcttggcctcccaaagttctgggattacaggcgtgagccaccacacccagccgacattttctaataattaaacccaaattcaagttactgkatttttctcttcattgtcttaagataattatacacaggtattcacttcttcctccctccctttctttctttttaagtttgtcatgctagcatgttccaccatcaatatcttttcttttaaaggatttaaagtgtatttctcatctataatgtttgtatttcccctcattttctgggagaaatggaatgccaactacagcctctaacagcaaagccttgtttccgtcacaagtagctgttttataccatttccccttcttgtgggcttaggggacctttttcttccttctcattgaacctcaggaatggtgtctaggtaagtgccaagccaaagaagcaagaaatatttaaattccgctctccaggcagtttttataactgttgagaatagattcttgtttaggaaatatggcttggtttgttaagattgcccttttctcccaaagtccaccatatttcagttacttatacattttaaaaagcatgtaaacagcttatgcaaatgcaacattttgcatttatccttcatttatccagagagcattttgaagcatattgagctttgcagcagagcctctatgtagccaggatagatgctgtgaaaactccatgtgctagaggtcacctgcctcacttctgtgagagcccctcaaatctctgcgagccacctattgagtaggtaagactaattggctagtgggtttgcaggcttatggaaatattgttttaactttaaaactggaatgagctctttcaaccataagaaaaaacataatagatccctaagtacccacgacccagatttaacagatgttaagattttcagcaacataaaattttataagctgttagctgggtgtagtggcacacacctgtaatcccagttacagtggaggctgagatgggaggatggcttgagcccaggaggcagaagttgcagtgagccaagattgcgccactacactccagcctgggtgacagagtgagaccctgtctcaaaatagatgaatgaataaataaaaataagacattttataagctaaaacttagagctggtgggaaccaaggatgagacaaagtgatggaggagagaggttggaagtaggtgccctaactcaagccagaaacaaaacgagatagaaaaactctgagagagacccagggactctcaaaccataattgtatgggctcatttggatcagaggtgagcacctctcctgcttcagaaacccctaagggcttccctttagagtaacaggataataattggtgtttgattgatgaccccaaatgatcaataaaagactgaatatattctattcattctactgctggacagggaaagctagcgtgcagccaatttgygtaaatgtaaaaggtttttaaaaatcaagttttgacactcagagggggcaaagttcagttttacagcaaatttgacacatttctctgtgatgcttcatagcattagaaagagtaagaagtcttcactgggaacacggttgtctttgaatttttggctttatttatttatttttgagacagaaaagagtaagaagtcttcactgggaacacggttgtctttgaatttttggctttatttatttatttttgagacagagtcttgctctgttgtccaggctggagtgcagtggctcgatctcagctcactacaacctccacctcctgggctcaagcaatcctcctgcctcagcctgctgagtagctgggactataggcacacactgccaggtgtggtttatttttgtatttctttgtagagatgaggtttcactgggttgcccaagctggtcttgaactcctgggctcaagcagtctacccactttgacttcccaaagtgctgggattacaagcatgagccgctgtgcctggcccccacactttttaaaagtaaactttttactgaagaacaacatacatgcataaaagtacctaaatcggaagggatgtgtgtttatcacatgcacacatccgggtacccagaacaagaagcaatattctgtgcacatcagaacccccccagcaacccttgtaactcctttgagtcatgatatcatgatagttactctttttttttttttttttttttgagacagtgtcttgctgtgtcacccaggcagggtggagtgcaatggtgcgatctcagcttacctcaacctctgcctctcgggttcaagcgattctcttgcctcggtctccccaagtagctgggattataagcacatgctaccatgcccagctaattttttgggtttttttgagacagagtctggttctgttgcccaggctggagtgcagtggtattatctctgctcgctgcaacctccgcctcccgggttcaagcgatcctcctgcctcaagcctcccaagcagctgggattacagacatgcaccaccatgcccagctgatttttgtgtttttagtggagacggggtttcaccatgttggccaggctggtctcaaactcctgacttcaagtgacccacccgccttggcctcccaaagtgctgggattacaggcatgagccaccacgcccagcctgtatttttagcagagacagagtttcaccatgttggccatgctagtcttgaactcctgacctcaaatgatctgcctgcctcagcctcccaaagtgctgggattrcaagtgtgagctactgcgcccagcctactcttgacttttaatatcagagatgagtttttattttgggaatttttgatataatatgatccagattggggagaaaatgctactgtggttcattgttcataatttgcttttcgagtgttgaaatcctgagtattktttttttctgtatgtagatgttcaagttcactcatctaagactccttacccggagtggtgtttgcataatgtgatggtgatgatgataacaaaaaaacaacaatattaattttaaaccatgaattgaggagggacaaactacttaacctctctgcctcagcttcctctgtacaatagtaataataattctatcttcacagagttgaggtgagaattataatgaaactgtgaagcacttagatggtacctactacctagcaaggactcaattgtgtgtgtgtgtttgtgtgtctstgtatgtgtgcgtgtgtgtgtaataaatgagcccaacacaggcaagggggagatgtgttattaggtcttcatatatcgcacatttttattttactattgcgtgatcacacacagattgcagaaggctccactttgtagataaaagttcactaggtcattgggtaaagaggcatttgctttcccaggaaactaaagaattatgtagggtctgcttagaggagaaaaagcatgaggaggggaaaccacagtgtttgagttgacatcaatttagtttccagatttgatcagtctgtagaaagtgctttgtgtttgtttatttaaacaatacttatgggtcacacatacacacaagtaacctagtgaaatctgaataagggatggaggaggagggagagaaaaaaataaaaaataagtaaattttaaaaaaacctgaataaggtcagaggattgtatcaatgtcaatttcctggttgtgctatggtaccatagttatataaggtgttagagaaaactgggtgaagagtatatgagatttctctgtactgtttcttacaactgcttgtgaatctatgataatctcaaaatagtttaaaaaataagttctagtgttctatatagcactgtaggacgactagagttaacaataatatgctatatgctttcaagtagctaaaagagaggatattgaatgttttcaacaaaaagaaaagagtttgaggtgataaatatgctaattaccttgatctgatcactatacattgtatgttttgaaacattactatgtaccgcataaatatgtacaattattatatgtcaagttaaaattttaggccaggcacagtggctcacacctgtaatcccagcactttgggaggccagggtgggcggatcacctgaggtcaggagttcaagatcagcctggtcaacatggcaaaactccgtctctactaaaaatacaaaaattagctgggcgcgtattcccagctactcaggaggctgaggcaggagaatctcttgaacccaggaagtcgaggttgcagtgagctgagatcgcaccattgcactccatcctgggcaaccaagaatgaaactccatctcaaaaagaaaaatacagagatttaaaaaatacttatggaggagctacatgctttgagtccagggctgccttaggctctggggatacagtggagaaccagcaagacacattaacgccctcagagaagatgaagtaggrgtgagagggggccttgagtttgctttaaaagtgtactttttaaggtattgcattaaatcatttgaaaagattccttgaatatagaaatgattatccaaaaagtctccacgttctcaaggaagtataaccaatcgacattcataggatacccatatacacactaaatttagtaagtagcagtccttcagggttgggattaagtaaaagaaatattgtcctaatggtgaggactgttaagtgttagaatggaaccaaagaataggaaaaatgacatcctgtgctgaaagctttaaagaggctgaattcacatyggtctttgtaggtttagatgtgtttctgtctgaaaaaggaatagataatyccttatatttttataatcctatgaagttcttgggtgtttgtttgtttgttttttgagacagagtctcattctgttgcccaggctggagtgcaatggtgcggtcttggtttactgcaacctccgcctcccgagttcaagcgattctcctgcctcagcctcccaagtagctgggattacaggtgcctaccaccacgcccggctaatttctgtatctttagtagagactgggcttcattatgttggccaggcttgtctcgaactcctgacctcaggtgatccacctgccttggcctcccaaagtgctgaaattacagcaccgagtggctcactgagcgcagtgagccactgcgcctggcctgaagttttatatattaaaattataaaagcctttggtgaagtgaggctcctttttattttctggaattaagaaatgtacatgaggccaggcactgtagttcatgcctgtaatcccagcactttgggatgctgaggcgggtggtgcacttgagcccaggagttcaagaccagcctgggcaacatgatggaatcccatctctgctaaaaatagaaaaaatagcagcgtgtggtggtgcatgcctgcagccccagctactcaggagactgaggtgggaggatcacctggtcccaggaggtcaaggctgcagtgagctgtgatcgcaacactacattccagcctgggtgacagagaaagaaaagaaaagaaatatacgtgataccctgctgatatagtggaatccatcgtctgaggaagtattctataaactttttcaatctgccacacatttccagatatctaaattttccctgacacagactggagggatggataggggcaggattttatcttcagaacaaaaattaactgaatgttggttaaggtggccatataatttattgcttaaaccaggacacttaagacaaccctttgtaaaaaaacttttgttttctttttttttttttccccgagacggagtcttgctctgtcacccaggctggagtgcagtggcatgatctcagctcactgcaacctctgcctcccaggttcaagcgattctcctgcctcagcctcccaagtagctgagattacaggtatgcaccacaatgcctggctaatttttttgtatttttagtagagacagggtttcaccatgttggtcaggctggtcttgaactcctgacctcaagtgatctgcccacctcggcctcccaaagtgttgggattacaggcgtgagccaccgcgccaggccataaaaaacttaattggagtttgttctacatgcagaatgatgaatcttctgtctatgacacctgtgaaaccagcacctagattgagaaacagaatgttagtaggagtcttcaaaatcccttgtgtgttccattgtaattgctgtatccttccccacgaaggcaactactatcctgacttttccaatgcagagatgagttttgctggtttctatacttcatataaattgaattacactatatacttgttaacgtctggcttcttgagattgacattataggttgatccatattactgggtctagttctagttgtagatcgtttctttccatggtgtaaatttatttattcattctattgatgatgggcatttgggggagtttccaggttttggttactataaatagtactgctaataatattctagtatcttttgatgatcatataaatatttctttttggcatatacccgagagtgaaattgctggacaataaggtatgcataactttaccttaagtagatactgccagttttccaaagttttgttctcattaaagcactcatcagcagaacattagagttctgactgctgtatattcattttgatacttggtgttttccaggtttagccattcagatatgtggtagaggtattctcattcggcttaaatttgtatttctctattgcatggtttaaatttgcatgtttttctgttcctttctttttcttatcaaactaagactttttttttttttttttttttgtcttcctctgttgcccaggctggagtgcagtggcgcaatctcggctcactgcaacctctgcctcccgggttcaagcgattctcgtgcctcagcctccagaatagctgggattacatgtgcatgccaccccatgcctggctaatttttgtatttttagtagagatggggtttcaccatgttggccaggctggtcttgaactgctgacctcaagtgataccccgcctcagcctctcaaaktgctgggattacaggcatgagccactgggcccggccaaactgagacatttttaagaagaaaggagacaacaggcataaatcagattgttaagattaggaatttggttttggataagtttgagatgtctgggaagcaaacaccgtacggaaataccaagaagacattggattatgcagatctgaagcttagaagacagttctgggctggagatataaattttttggagtccctgccatggagacagcatttcagtgaaagagtgaatgagatcacccacaagagggagtgcagagggagaaaaagccctaggaccgagcctgagaggcaccaaggttcattcacaagttgggagtgaagaaaatgccagcaaaggaactcctccaccgtcccctagagggagccactgagaggcaggggtaacatggggaagaggggagaagcaaaagccragggaaaaaggtttcaaaaagggagtgtccagtgtgtcaaactgttcattttgtgttgtttaaaaaacaaaacaaaacacattctgtgtcctttcgtctttccstagccatcatcgtctacagactgccgtggacctggaaatgcagcaagctcctgatgaaatccatccatgcagggttaaatgcagttgctgccattcttgcaattatctctgtggtggccgtgtttgagaaccacaatgttaacaatatagccaatatgtacagtctgcacagctgggttggactgatagctgtcatatgctatttgttacaggtcagtayttcagtgtatttacaagcaagttataaaaacaattcagagactgtaaatgttttcttttctttttttttttttttttttttgagacagagtctcgcttagccacccaggctggagtgcagtgctgcgatcttggctcactgcaaccactgtctccagggttcaagtgattctcctgtttcagcctcccaagtagctgggattacaggtacccaccatcgtgccaggctaatttttgyattttagtrgagatggggtttcaccatgttggccaggctagtcttgaactcctgacctcaggtgatccgcctgcctcagcctcccaaagtgctaggattacaggtgtgagccaccgcgcccagtgactgtaaatgttttctaaacattctttacatttgtttctattataactattttcccctcagagagcaccagaattgcagaattcacagaacaaaataataagaaataaagatttcttatactggatatgacttttaatctggattctctaaaaaccaacttatactctgctctatatcttaatatgtaaaattaagaaatatcaggctgggcatgctggctcatgcctataattccagcattttcgaaggccgaggtgggaggatcatttgagctccgaagttcaagaccagactgggcaacatagggagactgtctctacaaataaaggaaagacagagagagagatcgagagagagagaaatcaagagagagactgatctaacaattagcaataaagagaatacctatttaaaaatctgtgggtcctggctgggcatagtgcactgctcactcctgtgatcccagcactttgaaaagctgagaccagtggatcgcttaagcccagacgtttgagatcagcttgggcaacatggcggaacctcatctctaaaacaaaaacacaaaaattagctgggcagggtggtgcacacctgttgtcctggctacttgggatgatgaggtgcacagctcccttgagaccaggaggcagaggttacagtaagctgagattataccattgcactccagcctgggcaacagagccagaccctgatctcaaaaaaataaataaataaaaatctttggggtttaattaaaatggttcccagaggaatataggcttaaatgcttttattatattttttggaaagaaaacttaaaatacataagctatttacttaggtaactataagggaacagcaaaatataccaggaaaagtaaatcaataaaggtaaaaaaaaatccataaataattcattttctattgtggtaaccaattaccacagacttaatggcctgaaacaacataaatttatgacctcacagtacctgtacatcagaagtccagattggcttgtctggtttctctgctctgggtctaacaaggccagtatcaaggtgtcagccttccagggctctgattgggagactagggtagaatcagcttaaagcaaattcagcttgatggcagagtccaggtccttgtatgtgcaggactgaggtccctgttcccttgctggccatcagctggggctgccctgaaccttggagtcctctcttccttgtacccggctcccttcatctccctaccagcaatggacatccagtccatctcgctggcttggaaactctctgacttctccttctccttcctcctcatctcttctcctcaaccagataaagttcttacctaccccaacccctagaggttaccattctcccggtgtttattctcattctctgctttttaaaatactttaatcacatactgtgaatcaatatattgattaaacaagatgtttaattaaataatattgattaattaaacaagatgtttaaatattgattaattaaatcatatattgtttaattttgctttttaaatgaaactttttttaaaaaatggtctcatatatattctattgcaacttttttttaactctactgattaaactgtattgattcctctggctatagttcattcatttttacttttgtattccactgtataaatatgccacaaatttacttacctgttctcttgctattttcagttagaaactatgctgcattgaatattcatatatacatctcctggtcctcacatctaaaggtttctctgggcatatacatagtagtgaaattacaagctcaacctaaaaagataatgctaaattgttttcccaagtgattgacccagattatattcctgccagaagtttatgagttcccatatccttaccagcttgcaccctctttaaactttaaatccttgctaaactagttggtacttaatgatgtattcttgtagttttaatgttcatttcacttgtgttttatcttctaagacacacctgtttgtgtcttttgtctatttaaaaaatgtttctctttttcttaaagatttataggaattctatatcgaattctttttcatttatatatattgctatatcttctcctagtttgaagcttgcattttctctgttgttaacatcttttgataaacagaaattgtcaattttaatgtaaccaaattaatcatcttttcctctgagactatcattctttgttttgttttcttttggtgacttgtttatgaaattcttctctaccctgaggtcaaaatatcatcttatgctttctactaagagcattaaaattttgtcttttacttttctactctagtacacagaaaaaacaaaccaaaaaaacyccaacaatatgaaaaatagttttgtctttgatatttaagtacttacttcatctggaattaattttaatgtgtgaggtgatgtgattcaacttcatttttttccagatgggtaaactatcttcccatcaccatttattgaatcatctctgctcctactatttatgtacaaagccaattgcatcctatagagtatcttatcctctgtatcctagccagtgcagtacagaattcaagtgtgtagaagtactgaagtatgtagaagtgtatagaagccataagaagtagagaagtagagagaaaaatctttgacttttggggccaggcacagtggctcatacccataattccagcactttgggatgcctaggtgggaggattgcttgagctcaggagttccagaccagcctgggaaacatggcaaaaccccgtctgtacaaaagatataaaaataagccagctctggtggtgcacacctgtggtcccagctactcagaaggctgagataggaggattgcttaagcctgggaggtcaaggctgcagtgagctgagatcccaccactgaactccagcctgggtgacacagcaagaccctgtctcaaaaaaaaaaaaaaaaaaagaatctttgactattttttattttaaagagaatgcctgccaaaggctaaaaaagaattaataaataaaaagaatgcttctaatattttaccattgagtacagatgcgtcacatttcctcctacccctgtttgtgcaaaggttttgtttttcttcttaaatcataaatggatgtggaattttattgaatgcttttgctatctctgctgagatgaatataccttttttgttttttttttttgagatggagtcttgctctatcacccaggctggagtgcagtgctgccaccttggctcactgcaacacctgcctcctaggctcaagcaattctcctgcctcagcctcccgagtagctgggattacaggctcgtgccacaacatgtggctaatttttttttttttttttttttttagtagagacggggtttcaccatgttggtcaggctggtctcgaactcctgacctcaaatgatccacccgcctcggcctcccaaagtgctgggattacaggtgtgaaccatcacgtccggccaatgtttatttattttttaattgatgtataataatcataacatatttttgtggtacatatgatattttgataaaagtatacaatgggtaatgaacaaatcagggtaattgggatacccattatttcatttatctttactttgtgttgggagcattccagttcttctcttctaggtattttgaaatatacaataaattattactaacggtaaacaccctaccttaagttttcttctttaacatcttaatgtagtcaattatataaatatattctatttttaaacttgggtgagttaaaaacatatttgtctcaaaattctcttttgctgtctgaaatatccagattcatatctcgcgttgttgtctttgtgctaaccgagcttctcagaaatattatttcacaacttcatggctttgcttagtgggaggaattttggcacctggcttcttccttgctcagatccagaggacaggtagtgtttaagaaaacaggatttgcaattaggaagacctcagtttggattaggttcatccatttgatagttggtgaccgtggaccaagttacttctctgaatttcttttgcacagctataaatcaaggattataatccttcacaaaatcataagaatcaaagccaaataatgcatctaaaggtccagcccagggcttagcacactggtataacacaaactagctgttgttattataagtgtaaatcctgtggtatgcccctttatgacctgcagatgacattttccacttctactattgatcataggtaccttcatggttaagaacatgcattttttgtcattgcaattttattcccaaatctattcatrtattcagcagtgaaccgaatacccgttatatgccagataccttgctaggctgggctgtgggtgatacctgttccacaagacaaatgtgggctcaaagagacatgctctctgcccttgtaaagcttgcagggaagataggcaattgagtatttggtagataggaagtgttctgggaggcctctcatatagtatgtgagagctctcatataggggataaaggaagtcacacctcayaccaagacctgaagccacacacctggtgtagaaagggcggagagtcttctaggtggatggaatagcatgtggggaagagtttgtggtatttgargagtagggaggagaccaggctgtccagagcagggcatagaagatgaattggaggctggacaggtataattatagggagactagcttgcaggtgtttatggagttaagatgagaaacaatggtggcctagaggagtagcagtagcaatgtagcaaagtggatagattctaaagatatttagcaggtagaattaatgcgtgatgtaaagaatgagagagagtcactcacaggctttattgagcaggtgggtagccacaagtttgaataagtgggtagatgagaagggaaacattggaggggaggagagggctggaggagtgttagatgctactgaggagataagcaaaataaagtctgaaaactgatcattaggcttagtaacctggaagtcactaatgaccccagaaagcaatttcctggcttccttcctaggagccagactgcaatggattgaagagggagcagaaggtgaggaaacagagtggtaactcagtcaagaggtttgggtgagaggggaggagacagagagggtgacaattggacaggggcaagagtccaaggaggcatttgggtgctcttttttttttttttttgtctacttctgctttttattgtgagaagtttgggcttatggaaaggctaacaggatggcaccagtaaagaaagagacactgtgaacactggagagacacagtgatgtatagctaggtccttgggaagcaggtcacagagcacagctgaaaaattggaggacataatctccaatgtaattgaagaaaagaattgttggcttggggtgatttcttgctttgttttgtttggtggcaggaaattgaggctcttctctgaagttgcttctgtttttcccatgaggtgatagtaaaatcatcccccaagagtaaggaggcacatcggagagtcagacatttgaggatgggggagaatggagagctcattgataaataagacaatagaggtttgctgagcagggttgttgaactgctcataatcatgaacttggagtgatgctagtctctgtggttgtggtttactccagtattacctagcagaccaggggtagtcatgaagatggctgagccagggttggggtattgccaagttgatgtgatgaaaagacagtgtagcaaggagatgtagaatattggcaggagacttaatgaccagtttgagtgtctgttacgtcccttataaaaaaactatgggcatattgtagttggtgctggttagatttatttatttatttatttttaatttttttttaacccctggaagaaaagtgtcattacactggaggaatgcaatttggcaatgacctaagacagcgtttggtccctagaacagcagcattagcatcactagggaaattagaaagacagattctcagcttccaccctagatccactgaaccaaagactcgggctggggcccaacaatctgtgctttaacaagcacataaggtgattcagattagtgctaatatttctgaataattaatctaagagaaaagcctatgaatggtcaaaaagttggacattaacagtaatattaatgaaaataaatgtgagttctttaacattgggagcttgtctgtcttgtgtagcattcccaacactccgaacatctgggtcataagaggggcaaaacgtatgtggaatgaaggactgaatgagtttataaaatagtacaaagatgaaggagagctgggaggagcttccatataataatctacagtttacttgaaagctcattaaatctacctgtaccctaaaaaaaaaaaaaaaaaaaaagcaaaccatacctactacaaaagctagccaggtagatattttctggtctcattaatgtcttttgcaataagagcttttgttatgtctaaaagcttacacacactaaaaaaaaaaaaaagaaaacaaaagaaaagaaaaaaaaccaacctcaggccagacatggcatggtggctcacgcctgtaatcccaacaatttgggaggccaaggtgggaagatcagttgaggccaggagttgaagaccaacctgggcagcatagcaaggccctatctctgtaaaaataaaaacaaaaaaactcatctgtttcataaagtgagaaactgccatagtagtatacatttatatctttaagaatagtaataattaactgagaaatgcccaggcatttaagatggaaactttattctattctattctatttatttatttatttactgagacagcgtctcaccctgtcgcccaggctggagtactgtggtgcaatcttggctcattgcaacctctgcctcctgggttcaagtgactttcatgcttcagcctcccaagtagctaggattacaggcccatgccaccatacctggctaatttttgtatttttagtagagaaggtgcttcaccatgatgtccaggctggtctcaaattcctggcctcaagtgatccacccacctcggcctcccaaagtgctggaatggcagacatgagccactgtgcccagccaacatggaaactttaaaagtaaacttttattgtctatttctaattataaaagtaatacacattaatgttaaagtttataagatgtagaaagatatraagaaaaaaccctggctattctgggcacactgcctgtggggtattcctgttccacaaggagtagaacctctgctgctgctacaaattaaataaaaaaacaaaaaatgaaaaaacccactgatactgccataatctagagatatcattagcttttggcttattccctttaggcttttattatgcctatgcaaatgtagatatagatatttaatttttaaacataattgggtcatactgtattttcactttcatctctaagtaataactttttatgaaagtttatttttccttagctcttaagaacttccactgtgttgaagaacagcttcctgtaggtgatgattcctaaacactggggcactttgtttgcatatagttggcatttagtgtgtttgtagactatatataatggaatattccactaccttctcttttgagggttttccagactgtttatccatatctctagaataatttgagtgaatcaacagcagtcattttcaaacttcaacatacgtaagaatcgtctgggcagtttgttaaaaatacagattcctgggccctaatccagaaattggatttagcaggtcagaatgtggcccaggcatctttttattttttatttttttgttgttgttgtttttgttcttgagacagagctttgctctgtcacccaggctgaagtgcacaatgtcagctcactgcaacctccgccatccgggttcaagcaattctcttgcttcagcctccagagtagctgggactacaggcatgtgccaccatgcctggctagtttttgtatttttagtagagatggggttttgacatgttggccaggctggtcttaaaatcctgatctcaagtgatcctcctgcctcggcctcccaaagtgctgggattacagcaggcatccctttaaatgcatgccttctgtgaacagcacttccactactgacttagagagacaaaaggtcttataattttcggtccactaggttataaattatcaccttcacttgtaaggtagtaagattaagatagttaaaaggaaataatgattatttataaattataagttattataaattataaatatgcattattgcagcattcagaacacttttaatcaaagttaagcattctgtaatgtttttcttttccttttaaatgtaattttcttttgttgcaaaaaatgtttaatggtgaaagtcagatttagggtagttaagttgctcagggatcctgtaagcaaatttctgacctcctacctgcttagactgttgagccctacaggattgtaagagacacacatgacaaattatggaggaaatgagagaaaacagaaagaatcttaggaatgaaaataggagagcaggaatgagaaatatatgtttctatgggtaagccacagaaaagatatgatgatttatggagatatatttgtgctatatccctgagccccattttcttttcctttcttttcttttttctttcttagacagggtctcactctgtcacccaggctggagtgcaatggcacaatctcagctcactgcaacctccatctccaggactcaagcaatcctcctgcctcagcatccacagtagctgggaccacagacgtgcaccaccatgcccagctaattttttgtagagatggggtttcgccatgttgcccgggcttgtcttgaactcctggactcaagtgatcttcccaccttggcctcccaaagtgctgggattacaggcgtgaggcaccacactcggcccccattttcatatagaaagcacaacatggacatcaggaagcttgccctttgatactaatagaatcactgaagttcactgaagaagatttaggaatattctgaaccaccaagagggaaccctctgaaccatttctaatatattcaggcattttggttattaactaaataataaaatatgcaaaccaacctatcaaatgcatttgttattactttttaaatataaattacagaatttattgtattaggatatacttcagaaaacaacagttaatcttggctattcttggccctttgatctatgtaaattttagaatcaatgcatcaaattccaccaaaaatctattaggattttatttaatctatagatgaatttgagaaccgacatctgtataatacaagtcttccaactcattatcctgagcctgtttttttagccttctccaaaatattgcaaagctttatattttctttgtagagttgttgtctccaacttattgctagctccttgctattaaaaatggtatcattaaaaattaattcacttgttgcctctttacaaaaagtgcaactgatctcaagtataaatttatacctagcaaacttgataaacttatgttagtaattaatctcaagattcttttggattgtgttttataatcttatgtgattaataagttttgtttctttttctatcatcatttttttttcttgcttaactcagtagctgagactttcagaaaaatgctgaataggaataggtgataagggatataagacaaatcccttctagatctgagtcatgtcttggaagagagctactctgaaatgcctatagaccataagcagactgtgtgtgagcaaraaatatacttttatatgttaagctcttgaaaatggagcctgttagttcctatagcatgttctgtcctaatataatcagattaaaataatcatcttccattcctagtttgttaaaacatctcatacatgactgttgaatcctaccaatgtttttcaccatctgttttgatgattatatgatttttcctctgcagtctgttaaagtgacaaatcatacaaattgttttgttatcagtttccatttattactacttggtattacacatgagctgattctcagtgtgaattagggcgttggacccctccccctgcctcccttcttctgtctccccattagcccttggatctcaatcaagaaagctgaacagtgatgttagtgctttctccccactctcctctcttttcataattgttttgctaggatggtagatcctaaataggcatctgaaaaaaaatgttcctttaaactcagtaattcagtaaccacaaagtcatctttatcttgttgaagagaggatacttgatgggcaaacgtgtggggtgacaaaaccgtgaaagcgcaacagacttcagtttatataggaaccttgctgtcttctctgcaaagaggtatcccactagcgatttcattatcaaggaaatgaagacaccttttctgcagaattcatttctttctcataaaacaaaaatcaacttcattccacatagctttttaggttgaactgactaaattctgtgtcctaatgtactcggttttagtgatttaaaaaatcttttccttcccttcctacttagcaaccttaggagattggtaaaaacaaacaagtaagtaccagaatgttcactatagtcggattaaggatagcaaaaaccaaacagaaacatccatagagaactgtataaataaattgttatagccttaggatattagccattaaaaggaataaattaggtaaatgtataggtatgaaaaagatttccaagatattctgttaagggaaaaaagcaagatgcagaacaatatgtatagggataataaattttctggaatgatccatgagaaggtgataaaaggggttacattaggtagtggaactggagngaggaaacttcattttctaccctttggttctatatgaaaggttttgtcatattacacatattgctttttaaataatttaaaattagtttagaacttaaaattaaatgataacctttgcactttttggtgtttagcttctttcaggtttttcagtctttctgcttccatgggctccgctttctctccgagcatttctcatgcccatacatgtttattctggaattgtcatctttggaacagtgattgcaacagcacttatgggattgacagagaaactgattttttccctgtaagttgcatagtcttcttaattgtaatacttaagccacaaaatgttaaatacttgttcactgggaaaatgtaataaaaatataacaaaattttttagatattaaaattaaaaaatattttaaagaatttgttatatcatataggtaatatgatattactaaaagtttagaaggrccaaaaagtctgacaaattgtattactcttatgaaacaactattgaagttatacattccctttcaatcttgttgatatgcatgtttttatattaattgtaattatagtgtacatacatttttgtttcatcctttttaaaaattttaagtgataactgttactggtggagggtgtccaggttcttggcgttttgaacaaagaagtggacaaaacacacaaacaaagcaagtaaagaatgaagcaacaaaagcagagagttactgaaaatgaaagtacactccacagggcgggagtggcctgagcagccactcaacggcccgatagggaatcttcttgggtccaaatagcccctagaggtttcccattggccagttggtgttcactgcatgtaaatgaagtggtggcctgcagtcagtttgattggttgtagaaagcaaccaatcagagatactttcaattttccatccgccatgcagaaaagcggggtttgcaaagggagtagcctcgggtccttttgctacttagatgtggaaagttggggttttccttttggtttagttctaggaagtccgtgtgaattgacctgaggttgcctgcctccagaccctacctgccttaaaacaagtgttacagatgctatattattttcatatttattatttttaaatcaatttcattatatattccygagtgaattgtagcataatttatatttctccttaatagcaagctttgagagtttacattgaaactgtactagtgtgcmttttgagcagataaattcaagactgttttgcatgttgctgtatcatcctstttgtaattggatacatctcttatttcataggagagatcctgcatacagtacattcccgccagaaggtgttttcgtaaatacgcttggccttctgatcctggtgttcggggccctcattttttggatagtcaccagaccgcaatggaaacgtcctaaggagccaaattctaccattcttcatccaaatggaggcactgaacagggagcaagaggttccatgccagcctactctggcaacaacatggacaaatcagattcagagttaaacartgaagtagcagcaaggaaaagaaacttagctctggatgaggctgggcagagatctaccatgtaaaatgttgtagagatagagccatataacgtcacgtttcaaaactagctctacagttttgcttctcctattagccatatgataattgggctatgtagtatcaatatttactttaatcacaaaggatggtttcttgaaataatttgtattgattgaggcctatgaactgacctgaattggaaaggatgtgattaatataaataatagcagatataaattgtggttatgttacctttatcttgttgaggaccacaacattagcacggtgccttgtgcagaatagatactcaatatgtgaatatgtgtctaytagtagttaattggataaactggcagcatccctggcctgttgtcatgcagtcatttcctgttaattctgggagacaatgatttcacaactagmgggaagcagtcctaaaagtttaaaatccgataaggaatatctgggacagggtttagatcatgactctacacagataccatgatgagagtatattaaagaaatttaggaaagcacctggttcctttctccccatgcctgccttctgctccctccccagctggtttgggctcaaattgtccctggagactagggtttatgttagggtattgatagattagagcaggtggttgaagagatcttctctggtcagacttggaagaatttccaaaastgaagttagccccaagacttccctagggttgatgtactttatgatccagatgctaaacttcttagaatgaaaatatgcttcaacacttaagtagcatacactgccctacaaacctcagagagcacttttccccaagttcttgtttttatttttgaaagtactcacacagcacttactatgctccaaacactcctctaagcactttacacatattagctcattcagtccccagacagacgggatgaagtaggtattgttactgttcccattttacaggtgagagatttgaagcctggggaggctagtaactcaccccaaggtcacacggctcatacatggtgggactgagactcagatgcaggcagtctggcacctcagtctggattctaaccatttcactaagctatttttgtcttgtactactttgacccacccctgaataaacctcaattgctggagtggggtgtagttattaaagggatgctttttaccttttgctgtytgctgtggcagattccccagataaccaaggaaaaggggccacccatacctggaaataggccatagggcccctactactgccaacaagccatggcctaccttgacamttgtttgatcttaaaattgtgtcttggtaacaaaagatttggacaggcatatctgtagctttcaagttaattaattgcaatatttttttcttcaggattttagctgctgaacaactttcagtttggagctaaaagagacctgtctcatggtctgcccttccctggggcaatagctagggtctttcctgatttttatggaattttaggggatattttgaacttgggttctcagtagtgaattgagacttggaggtgacttttcatgtttggagtatcatctctgtctgggmtctgggctgacaaattaaaacytagagtagtgcttatgctgaaatgatacttttcattttttggttgatttttttgccttcccttcaattttaaactgaagcattttaatrtgggtagaaactctacaccaaatacactaaacattttggtgcttagtggatttctttttaggtaactggtacttacttccaaagactgaatacaagccacactccatcatatcccttaaacttcatgaaaaaccattcaagatccccttgctgcaacactgttctcttcttctctactaaattctatttccaaaattggtaatagagccagaaggatccccagtacccagccctctgcctggcacaaastggtagcacaattaaattcagtatgggtggagcatggtacagtcttggtgccatagaaggagtagttgcatagtcacacatcatttgataagttggatgttccattacatagaggaacacaaaattccagggtttttggaggaagggattagatagtgactaagccgccagaattgaggtggccattcctttttgtataggctaagaaacaggttatcagtgaaaagttaattatggctttggcactagaatagcactgttgcaaagtatttaagcaccccccatctcagccctttattttatctttcatgtgggctaatgrgaggataatcttacagatattataggaatttcttttctatctttatgaaaacaacgtatataaaatatatctagaaaacctttgtttgagactcttatttaatgggcttttgattctaatgataattgtacctttatctttcaaaagctgatatttcctacctaagcatctcccgagaaaaatatctcattaaaaagcccataaataataggggagaagaaagccttaggtatcaattccaaaacagtgattgaaatttcccaaaataattatggcttctgtcatctccagagataatctggcttggtttaccccataatctaatttcagaaaagaaagctttattttaacactcatctgaatcaacattaaagccttttctctcaaagcgtttattgagaaactcaaatgaatatactttttgaattactgtcatcaaaagtgtacggcttcctgtgctgcttgtgtcaaatggaacctgccctctaaagcactttctttcctttacttgcgtggtttcatgtaagctgtgctgtttagaaacaacatctcagactttacaaagaaatgacaaagaaggcaattgcactttttaagggatatcgacaagcagtttctgttttctaaaggacaaaatacagagtgtgtgtcatttttaattagattctttcccctgctgagttggaaattccagtgcagcactgattgaccacagttgccaatctaaaagcacaaagacagaagtaaagctttatgctaattttatttcaatatgatagaaaatttatcttggtatgtccttttttagataactccagcaggaaactgtaactgctatgtctttaggaaaatgtagaagaaagaacattattrttctttaattcctacaaggtactygaaaaccttaagtgaaaaagatttctatctttttatcttagygcatttatggaaaaaatattaactrtcctgaatattttataattttgtaggaaaaatatgcatctattttttcttgacttcttttatatagtaataaaagttattttggaagctctttgtgtgttatcaatttgtctggggtaacaggggtaggcattgttgtgaaagtttctttgccatggtttttggtttgtttatttttcagcagagatagtcttttttcagtttcttgattatgttaactgaaaagccagactctgtaatgtataatacatattttataatatttactattaatattatatatttatatataatatttactataaatatcatatatttatatataatatttactataaatatcatatatttatatataatatttactattaatatcatatatttatatataatatttactattaatattatatatttatatataatatttactattattatatatttatatataatatttaatattttatatatataaaatttttcgcagtaaagagtttaattaatgcaaagcagccaagcagaaggactggagttatcactcaaatcagtcttcctgagggctcagaggttagggtttttcaatgatagtttggtgggcaggggcaagggaatggatgctgctgattggttgggaatgcaatcataggtgtgtagaaaacaatcctcatgcactgagtccccctctggaggagggccacaggaccaattaagtcatgagtcacaagtccagatggggtcagctcttcactacctgaccaatcttaggttctacaatagtgatgttatctataggagcaactggggaagtcacaaattttgtgacctctggccacttgactcctgagcagtaagagattagagaaactgatgcaggtcaggggagccccaacgtggagcttagcccatgtaggtttttggctttgcccaggaaagaattcaagagcaagccagaggtggaagaaaacagctttactgaagaggcagtgttacagcaccatgactgctcctgtagagcagtgctaccccctaggcagagagtagcctgtaaaatattttaaagaggtttattctgagccaatacaagtgtcaatgacctggggaacacagtctcaagaggtcctgagaaagtgtgccccagcggtcggaattacagtttgcttttagatattttagggaagcaggagttatagggaaaggcataaatcaatgcatggaaggtatgcagtggtttgccccaaaaaggtgggataacttgaaacagaagcttagtttataggtggattcagagactctttaatatgcaattggttaaaggaatagagctctgtctaaaaatttggagttggccgggtgcaatgtctcatgcctgtaatcctagcactttgggaggctgaggtgtgaagatcacttaagcccaggagtttaagaccagcctgggcaacaaagtgaaaccgcatctctaaaaaaacaaaattaagaagttatctaggtgtggtggcatgtgcctgtagttccagctactcaggaggctagggtgggaggatcacttaagtccaggaagtcaaggctgcagtgagccatgatcatgctactgcactccagcctaagtgacagagcaagactctgtctcaaaaaataaaaataaaaataaaaaaataaaaaaaaatttgggagtcaacagaaaggaatatttatggaatagcaaattattctacgtagtggttctctgctaggtttaagacaaatttctgccctgtaatagctacaataaggtcatgaggatctggtaaaacatactcaaatatcctacccaactttctacaccttgctgaattcagcatctcctctaaaactcagattttagagcttttcagctcctgcttcatctcctttgcccctgctcccaccacgcctcagtctgggtggaatgtttctcctcacagcattcaaagaacttggttcctgcctctagcccatctttttttttttttcagttgcaagatttaatagagtgaaaacagagcttccataaaatgggaggggacccaaagggggttgccgttgccggctcgaatgcctgggtttatgtcccaatcattgtcccttcccctgtgctctcacgtgatagatgattggctatttctttacctcctgttttagcctaattagcattttagtgagctctctttactacctgactggtctggtgtgagctaagttgcaagccccgtgcttaaaggtggatgcagtcaccttcccagctaggcttagggattcttagtcagcctaggaaatccagctagtcctatctcttagtaccacctctcaacaggaaaacccaagtgctgttggggaggttggccaaagaccgctctaactgcttcctgctgaattgggacgtagtaggggtcgtgcaattgagatttcctcgggaggggtgccttcgatgtcattaacatcagagcatgggctagcaggccggtccaggggtccacggtagatcttagtcatggactgcttctggggctccatttgaagaacgatttgtagttttacagcttcgattctggaagagacaaacttaacaaggaggttaaagatacagggattgaaatgtatggcctgcagtgcaggagattatttctttggcacacttcacaggccctgactatctgcttgatagttttgaaaaggcctggtcccataaataatgatttggccatctgatgggtgctatcaatggctaagtgaaaggtttggtgaagggttttaagtaatttccattggttagctgcaggcaaaagtattttcccttctttggtggctagccatcctgaggggaggaaactatgtccccgtgaggttccccattctatttctcctgctgagtacagaggggattaccccacactaggggtccttctacaagcatttctaatggagggtcccaccttgtggctcttttggcttcaatatccacttggcagttcccttccgatgaccccgacagtgtaagactgccacctctttaggtttctgtacagctaataataatctcctaatggcttcctgatgtttgataggtgttccctcggaagttaggaattccctttctctccatattgctgtgtgggcatggaggactaggtaagcatacttagagtctgtatatatatttaccctttttccttcttctaattctggtgcccaagtgagggctattagttctgccagctgagcgctagttcctggagtgaggggattactttcaagtattccattatcactgaccactgcataccccgcttttcgaagtcctttttctacaaaggaacttccatcagtatacaagttgaggccaggatcagtcaagggaatctctagaaggtcccctcgagtggtgaaggtttgagcaattacttgttgacagttatgttctatttttttcttcattgcctggaagaaatgtggctggattaagagttgcacaagtgtgcagtcgcagcactggtccctcaagtaatagagcctgatgtttaagcaaatggttgtctgacagccacaagtctccacacagtgagatctcttccctgtatcattttaactgcttcagatactaagactgctactgctgccactaccagtaaaaaatgaggccaacccgttgtcactgcatcagtttccttactcaagtatgccatgggttgcaagctggtccctcggacctgtgtaaggactcctagagctattcctgtttttttctgttgcatataaggaaaagtcttgccctgttggcaagcttaacactggggcttggttagggcctttagggcctggaaaaccacttctgcttcaggtgtccatcttactaaatgggtattggctttctgagttttcttaattagtgtatataatgacctggctatttcgccgtacctgggaatccatattcggcagaagcctgttatgccaaggaaccctcttagttgctttagtgttttggaatgaggataagccagtataggctggatacatttctcaccaagggcaaaacttctggtgagtgtactctttctgcaggaagtaaaaatggccttactaaataaattaaatttatgttcaagtactatttctttacagcacctgggaacaagcatttcaaacaactccttaccatttattccccgggtccacatctcttcttaaaggaatgtggactttcttccatgattatcggctgtatgaagaactgtcttggaaccaagagaatacatcttcataggatgcaggcttcagggagctagaatagaggagtggggagcacaaactgaaaagggttcccctcactcactacagaggcacaacccgtaaggccagccattctaaggacaggccaatttgggtgggtgaggatgctcgatacgggagcggtccaggagcacatgtctgccgacctttgttcatgtcagaggtagcccacagggcagtgctcatttatatcaccaatccataagaatacatttttgttttgtcaaaaagacaatgtctatagaattatctgaaacctgttttttcagatctgactagagtgagttagctatgatcactttccttctggtagccactcaaggggcgtgataggcgagtgaggtttatagagtgaaaggaagacggctcatgcaggatttggctggtgagtgttctattagggtgagaattttggaaggagaagctttctgattgactttcaaatacagttggcaatctggttggtataatatctactggtacataactaggaaatttctaggctgagtggaatagtatgagtttttctgtttcaacgggaagaatatctggttgtcagcctcagggtcagaactgtacataagcaatcccttagtttggtgaatgttatggcagaaatttagtctgaagtctagtccaaataaatgttttctatattctcatatctatttatatgaatcttatcacattaaggctagactgagacatgtcacaaatttctctcttgtggaatgaaggtgaaaaagagaaatataagcattgggtgaatgttgaaatggataagttctgagattcctcttaaagtttagattctgatgagatttcctgaacaggtgcctctcttgtggctcaggtaccagagggactctgtagaactccagggggccaggccctagctcagccctggcacacacaggcaggccctagagtagccactagtgatgaaggaggagggcaggaagcatccttgccctccccaacccacgacctggctccctgtctctatcagcgctcacattccccattcaaacctctaggtcttgagcagattgtaggaggttctggcccagtgaactcacctggaacactcaaatgaaggaagtaaaagggtgtgaggcaagaggagcagtgacagccttaagtgtgagctaattcaccccaagagcaagcaaaagtgcaaataaaactcaagggtgtggaaaagtgtggagtgatgattaggattcaggcctctccttgcctagccttcctccattctctctctctcaacctctcactctctctctctctctctctctctgtctctgtctcatttaacagagcactggattgcgaatggagtgcaagtagagactgagaatcaccactgtagtgattgtatctgtgtggcaaatcatcttaaagatttcttgtatttggaaacaatgtctaataaagaatggccaaatacaaagttacactatacaaaaactatgtcatcaaaaattatattgttcaagtgaataattagcaatatgaaaatatgttcataaaatattaagtgaaagaaattgaatataaaagagtttgtaaatgtgaatgtgcatacactttcaaataactggaggcataatataccaaatagttaattagttaataatggttatctttggcctggtgtggtggctcatgcctgtcatcccagcactttgggaggccacggtgggtggatcacctaaggtcagagaccagcctggccaacatggtgaaaccctgtctctactaaaagtacaaaggaaa

SEQ ID NO: 93917 - DNA, 29984 bp, Homo sapiens
  misc_feature (1)...(29984): n = A,T,C or G
ggctcttgtgtcttcatcttactttctatggtccccagataaaaggatggagaataatgtatctatccatttgcttcttttagtttactgcgatatgtggccgtttaggtggcacacaatatcaccagtgtggtcccattttatatgaaaagtaagtaggatcagactgtattggtagagtgaaattaatacagttaatttgattaaaatgagaccttcaaacaacagaaccctcacataatttatcatgagaagaggagcgactttgaagaccctttgtggcacctgtgtgctgggtttctcattggcaacgtagttagaatcattggccactgtagaggttaatcacttttattttacaataatcaagcaattcaaatccgctcaccttttctgtgataagtggctatcaacagtatgctagctaacagatttttaaacttactttggaatcattttagatttatagaaaagtcgtgcggagtccagagtcccacatacccttttcccagtttccctaacatgaacatcttacacgtctacagcacgtttgtcaaaaccaagaaattaacattggtacaatgcattaactgcaggctttattcagctttcactcgtttttctaatattgtcctttttctatcccaggatccaatccaggacaccgcactgtttttagttctcatacttgtttagtctcttccagtctagcgttttctcagccttgcttttcttgactttgacatacttgaggatcagcagtcaggtattttgtggatgtccatcctttggggttttattaatgttttctcatgatttgagtggggttatggattttggggaaagaaaaccacagaggtgaagtgcccttctcatcacgtcccatcgagggacataacatgactcatccttgatgaggttaacctggataacttggctaagatagtttcttcaccagaaagtcaccattttcccctttctatattctatctgtgggaagcaagtcagtcagtccagcccctactcaaagggaggagaattaaactccatttcctggagggggattacacagattacttagaattcttctgtgagacagacttgtttcttgtcctcagatatttatttattcaatcagttatttatatcagtatgtcctcatatatatttattttattctctgagttagaatccagtgctatcgttatttattttgttgtgtgattgtcccagttttggccattgggaattttctcagtttggttcctgtgtttctttgatatgcgcctcccccaaccgcagcatttccttattttctgggaccaacaagatactgcacacttattttgcattttccctgacccagtcctgaaatcagcctgttttctttttcttttgagacagagtcttgctctgtcgcccaggctggagtgcagggctgcagtcttgcctcactgcagcctccacctcctgggttcaagtgattctcctgcctcagcctcctgagtagctgggactacaggcgcgcaccaccatgcccagctaattttttgtatttttagtacagacggggtttcactatgttggccaggatggtctcgatctcctgaccttgtgatccacccgccttggcctcccaaaatgctgggattacaggcataagccaccgtgcctggccaatcagcctattttctaaagagtcctggtttcttttactggagaatgaaatggtattagaagcaagtctgtgtattgagaatgctcattgctactggagtgccactgtttctaggtagatggacagatttatattcatgtctcccactctaatccagtatcacagagttcaattctagtctttctcttttgcttgtttttaacttctctctctgacagtgtgaaatctggctcccatcgtctgcaatgcttttcttcatttgtttatatgtaaagtagtttcagaattgctgacactggccaggcatggtggttcatgcctgtaatcccagcactttgggaggccgaggcggctgggtcacctgaggtcaggagttcaagaccagcctggataacatgacgaaaccccgtctctactaaaaatacaaaaattagctgggtgtgggagtgcatgcctgtaatctcagctactggggaggctgaggcaggagaatcgcttgaacctgggaggcagagggtgcagtgagccgagatctcactactggacgccagcctgggtgacagatggagactctgtctcaaaaaaaaaaaaaaaaagaattgttaacatttacccctatgagaaagaaattcaccaactggaatacagtgtttatgtacagattgtttcgtctttagactttaaatatccagtcaaaacactgttttccaaagttacctagatcagtggctcttttcatactccttcagcaaatgtatgtcatacatttgtaatacagttaggtctttttgtcgcagattaaattctatcctggtatccctcaacatcctggatgagtttttaaattagcatacaatgaagctccccctttgtggtgtatgcgcctatgggttttgacaaattcatgaagccgtgtatcaactacctcagtaccatagagaacagttccaatgacctaaaatagaacgtgtgtggtccctttttagctgatttctcctctaatctttgacaatcactgaactgttttccatccccacagttttgccttttccataatgtcatacgcctggaattatataacatgtagtcttctgggtctggcttcttttatttagcaaaatgcatttaagattcatccacattgttgcaggaatcaaatagctcattcctttcattgctgagtagtattccattgtatggctagatcccagtttttaaatatatttgcctgttgaaggtcatcttggttgcttccattttttagtgattatgaataaagttgctataaacattggttagcttgtttttgtgtgaacgtaagtttctgattcacttgattaaatacctaggagtgtgattgttgatttatataagtctgtgtttaactttataagaaactgccaaaccgttttccaaagtgactgtaccactttgcatttccaccagtgataaatgggaattcttacggttctctgtcttcatcatcatttggtgtcgtctgattgattttagcaattctaatcagtgagaagtgatatctaattgtggttttaatttatacttccctggtgacaatgatattgatcatcttttcatatgcttatttgtcatttggatttcttatatgatgaagcgtctgcttaaatcagttgcccattttttaattgggtcatatgtttgcttatggtaaaattttaagagttctttatatattctgaatacaagactttcatcagacatgtgatttataaatatttcttccagtctgtagctagtcttttcattctcttaacagtgtctttcaaagagcaaacatttttaattttgatcaagtccaactaaacgttttttttttctttcatggattgtgcttttgttgttgtgtctaaaatgttattgccaaacccaagtcctgctgattttctatgtttacttatagaatttcatagtttcattttttacttttatgtctttgatccattttagattaatttttatatgagatataaggtatgtattcttcaatatgccttcttttattttgttggttttgaacatgtgttttgagcatagacagtcttattttagtaccatttggtgaaaagaacatcatttttccattgaatttaattagcatctttataaaaaatgttgttgactaaatattcatagatctatttctgggttctctcttctgttccactggtctatgggtctatcttcccaccaatatcattctctcttgattactacagctttatattgtcttaaaatcatgtagaatgagtccttcaattttgttctttttctgaatagttttgtttattgtagtccatttgcccttccgtataagttttaagatcatcttattgatattttcaaaacaattttctgggattttaattggaattccattaaatctatagattaaatcttaacaacatagaatttttaaattcaggaacatggtatttcttttccacttaggtcttctttagtttttcatctgtcttacagttgtcagaatatatatcctgcacagattttgttaggtttacatttaagtacgtcatattcttgtgtgtgctgttgtaaatgatattttttattttagaagaatctaaaatattttgattcctagtatataagaatagaaatggcttttgtatatttactatgtatccgaaaacttgctaaacaagcatttttgaaaaaaaagacaatctgtctctattttctcattgactataaaattcctatttcaaagcactttgaaaaagatgtttgaagaaaaacctatgtattttctcgtattatagacaattcacaagaaaaagcacacaggccagatgccgtggatcatgcctataatttcagcactttgggaggttgaggtgagcagattgcttgagatcaggagtttgagaccagtctggcagacatggtgaaacaccatctctactaaaaatacaaaaattatctgggcgtgggggcacatgcctgtaataccagctactcgggaggctgaggcacgagaatcgcttcaacctgcgaggtggaggttgcaatgagccgagatcacactactgagctccagcctggacaacagagggagactctgtctcaattaaaaaaaaaaaaaaagagagagagagagagaaaaaagtccacaaatggcttctgaagataagaaaagatgctcagacagcttgaaataagggaagctgaaattgaaactttgctgacaaattatgtttcatctctaatattagcaaatatcttaacctttggtaatagggtatgctagccatcttcgtcatacaagcccacgtggaaggcaatttggcaatatctagcaaaattacaaaattacagtccttaacccagcaattcaatttccaggaatgtatcctacagatattcttgcaaatgtacaaatgacaaatgtacaagattactaattgtaatatgtttatcatagaagaaaaaaataccttaagtgtgagtcaatatggaattggctaaatatgttatatctacacaatgtaatactatataaacttaaaactagatttcaacaagatctttgcattatttgcagatggaatttaataaaatacaataattagttaggtacaactaacaacaaacttatactgagatctacatattccaatgagaattcatttcaaatgtgtcattaaatctgaacacagaaataaatggaccttcaaactagctctttattgagtcacaaagtgttaagccaaatttttaaaaaacaatgaaatcatgttaattatacataaaaattttttatttcttttgtggccctcctttgacaatattttattaattaacaatataactatagcaaagaaatgtgctgttaattaatttttaatgttaatttcacctctcattcattttcagattttagttttgtgtatgttgataatttatgtagcatattagtacagaggtacagaagtgtgatttataatttaatatacatctaaagaggatacatgcttaactttattaatggaatttgtgataaagtttgcagactgttgccttagagaagagctctcacttggacgggaggccctggccaagttgtgtagtgaggacagttgttgagaggaaaagagaaaaaacgagaggtattaaggcccagaagagagttagcacctgcttcagaacacaagcgtgcaggatgatatagcttttagtgccaagaagtagaattctagcatctctaggtggtgagaaacaaaggactaagaatttttctttctctaacactctaaagaaaggttcttgagctaggaaaggattactcgagccttgttagaatcagacatggcttcaggggatgcaggacgctcccctgagctgcctgtcaccgactaagtggagcagtgtttctyccgcagactcaactgagaagtcagcctctgcggcaggcaccaggaatctgccttttcagtaagacctaaattactcttatgaagccacctgtccctgagaaccagcaatggcaggttcttgaaggatgtagaacatgatgcttggggttatcattgctacgggttttgttttgacttgtttgagatcagttaacattctaaggcagaggatggaaaccaaccttatttgtaagctctgcatctttttttttttttttgaaacaggatgtcactctgttgcccaggctggagtgcagtggcacaatcacaactcacaacagcctcaacctcccagccttaaaagatcctcccacctcagcctcccaaacaggtgggaccacagtcacacaccactatgcctggctaatttttgtgtattttgtagtgacagaggtctacctttgttgcccaggctggtctcaaactcctggcttcaagcaatttgcccttttcaccctcacaaagtgctgagattacaggtgtgggccaccatgcccagcctaagctctgcatcttaaacctygtttgtctgtccctcacagcttagcacaatgctgtacaccacggaytggcatgatctctctgaaaagggccagataataatatgttaggctttgtggtctatacagcctctaacacagctactcaactctgccactgcagcaggaaatcagccaccaacaatatattaccaaatgatgagagtagctatgtttcaataaaactttacatacaaaagcgggcctggtttgcccacgcttgctattcacgtttgtaatgtacatgcccctcatgcaatgcagttccttatcttattgcttagtcaccttaaagccctgcttgttactcggtgcggtggccttgctgatgactacttatccctgttttgggcctagcctttcaatgcaggaatccagccccagggagagaaactaatgactagagaagtttccaggcaagtgcagaaaatgacacgggatgaacatatgtaagaacatcaagttcaggatcccgagtagttgtcagaaatttcacttcaccccatcccagcaaggctgttgtgtttggggaagacattattttaagaggggaggagattgtggaaaatcagtaggcagcaggagacagcgctcttgatcctactcccatttcagacgattctatgggggcctctttattgtccctctgctcccccaggtgctttcctcctttcatgaggctttgtcctccatccctcttgctccccagtcaggtgccagacttttaggaggccgcccggagcactggttgtgaagcttagcaaagcaatgcatttgcaatctaagataaaacactagtactttggaagcaatgctcccacattttgaaatgcatcaagaaaagaaaaggaaagattaggtgcttaatcttcacccttcaataaacccccaaacgatgaatctttttttttttgaggcggagtctcgctctgtcgcccaggctggagtgcartggcgcaatctccgctcactgcaagctcagcctcctgggttcacgccattctcctgcctcagcctcccgagcagctgggactacagacacatgccaccacacccggctaatttttttgtatttttagtagagacgrggtttcaccgcattagccaggatggtcttgatctcctgacctcgtgatccgcccgtctcggcctcccaaagtgccgggattacaggcgtgagccaccgcgcctggcctagacgatgaatcttaaagttttccattcaggtccacgtgtatttcatctctggctgaaatgggstgtctgtttctacacacccagttgatccttgaacaaatgtaggggtcggggtgccaatgcctgctcagttgaaaatctgcatgtaacttttgactccccagaagcttaacgactaatagcctactgctgactggaagccttaccaataacatgaacagccaataaayacatattttgtacgttctatgtctatactggattcttacaataaagtaagctagagaaaagaaaatgttattaagaaaatcataaggaagagaagatatatttactatttgtaaatattaactatttgttaatagtaaatatttactattatattatatttactatttgttaagtggaagtggatcatcataaagggcttcatcctggtkgtcttcacactgagcaggctgaggtggaggaggaagaggaggggttggtcttgctgtctcggggtggcagaggcagaagaaaattcacggataaatggacccacgcagttcaaaccyatgatgttcaagggtcagcagtatagggaatgtttcacccctgtattctatttttcattcatagaattaaaatrgaaatcctaaaaatgccccytgtggttttcacctggatgtgtattaaggaaggttaattttttcacttacttaaccctgagaacacagcattgacttgaaagttactgtatggaaaagcattaaggagacagcctgcagtcacattccttccctggaccgtagagtggcyggttttccctgatggtggcactgaatgaccaaagtgacaggcagcatctaggcagggctgtgcacagtcaccrmygctggatttcgaagttcctgaaycaagatcgyctgacctgttctccggctctttggcaggttctgtctccggcaggctttgaggatgaaggctgcgggcattctgaccctcattggctgcctggtcacaggcgccgagtccaaaatctacactcgttgcaaactggcaaaaatattctcgagggctggcctggacaattactggggcttcagccttggaaactgtgagattatttctttcctgctctctttctgtccttgacctttcccctgagatgttgaaggtcctggctacactccctgctgtgtctccccaactacccctgctctgccctcaccrcacccaggggtggctgctrgcctaactgtggctctctgggtctcctctccttcctcccctgcccctcatttccttattcctggagtcctgtccttatgacactagccagggaaggggaaaataatgccacctctgctggcattgtggggagtggggggacctgactgttggtctagattaggctcagcccctgactgggtgtrcagcttcaggtgtgccatcccagccccygatgtgcccctcgtgtgccccctgggcrcatgcccgccctgccctgcccaagktgtattgggaggaagcagtcaggtaacagggatgaggaaactygccctyagaccaagcttagagcaaaagatggcacctcctttgctggcgtttctggctttcccccctccagggatctgcatggcgtattatgagagcggctacaacaccacagcccagacggtcctggatgacggcagcatcgactacggcatcttccagatcaacagcttcgcgtggtgcagacgcggaaagctgaaggagaacaaccactgccacgtcgcctgctcaggtgaggctctgactttccagtgatgccatcctcaggaccaggtgagaaagccgacaatgggatcaccaaccatgtcttgctttaactaaaatttggagttcagacttgcaaataggtctgttcaagattggtaaattatgcaacagtttccaaggtgacactcaggatcctgcggctgacttgtccaaagatgacttattccttgtagacagttttatgaagccctcccctaaagcagggggatggacaaacaaccctactgtgctttcatgtatagagatatttgatgtcttcagtaagaaaaaggaagctgcctgccagctgctttccataagcaattcactcaaaggatgcagtttgtacttctttgagcagaatgagatgaatacaatttacgtttctttctcttttctctttttttgagacagggtctcactctgttgcccaggctggagtgtagtggtgcgttcatagctcattgcagtcttgacctccatgactcaagcaaccttccctcctctgggtggctggaactacaggcatatgcccagctatttttatttttgtttttttttgtagagacagtctgtctgtggggtcttgctatggggttctctcccaggctggtcttgaactcctggcctaaggtgactgtctgacttcactcttgtaccttacatggcaaaagggactttgcagatgtgaggaaggatctgagcctgagcaagagagattatcctgggcaatgtgggtggagccaatccaatctcatgagtccttagaaggagagaatcttgtccaacataccgagtcattaaaatatcattgaattcacttagaaaggaattaagtttctaatgctgccctaaaaaattaccacaaacttgtggcttaaacaccgcaaaatttccttacagtcctctaggctggaagagtgccagcggattcacagggctgaagtcaaggtgctcacaggcctgttttcctttctggaggctctgtaggaaaatccatgtccttgctcatttgggttttggcagagttcagttccttgggggtgtcgaactgagatccttgttgcttgcaggttgtcacccaagggccattccaggcttctagggamcactcacaccccttgactcatggccccttactccatcttcacagccagcaatagtgggtcgagtccctttcacactttgaatctttcctccttcttctgtcatgggatctctctgtaaccacagctgggcaagattctctgcttctaaggactcaggcagagtcccttttgccatgcaaggtacaagagtgaagtcagagagtcaccttaggccaggagttcaagaccagcctgggcgagaccccatagtgagaccctacagccagactctgtctccacacaaattaaaaatagccaggcatatgcctgtagttctagccacctagagtatattttctgagaatcaagttgttacattttttacctcctgtatcataaagaatcctggctggaaaacagaacaaatgcaaactgggtaattggaagagaatattaatagactctacttacaaggatctgatcaaatcatagaaaaaccatggcaatagtgaagtgagggattaagaatcccttgcccaaagaggaatggaaagagagctttgaccagcactgaggtacaaaaggtctgccgggagaggactgccttctaggatctgagatcttccctcaagggacatgacttgtgctgagtgacctgacagaaataaagctggaagatattatatgtatatgccaacctcagtgtccttcttctgtcccttccctgctgatgcctactcttatttaaacccctccagaagtcagaggacatgggaatccattgacgccaactgtgtgtgttggcctctgagtgcacagagcatggtggagaagggtagagagtggatccatcagggcaaagatgagatactcagcccagctcccatgcaccctctctcacaaaactataggaaaacatactccaccaaaaggataaactaaagcaagtaagaggaaacatagttcggraaacaagggactcgatgagggagaaaggcaagaggaatgcccagcctgagagtgaaggatgatcccagaatgagcttttattaaagatttctagtttcacctcattacagtaagagaatatggtctgtatcagtggtccccaacctttttggcaccagggaacagtctgtggaagacaaattttccgtggacgagggggaggaggatggtttcaggatgattcaagcgcattacacttattgtccactttatttctattattattacattgcaatatataaggaataattatgcaactcaccataatgtagaatcagtgggagtcctgggcttattttcctgcaactagacagtcccatctgggggtgatgggagacagtgacggatcatcaggcattagattctcataaggrgaatgtaacctaaatcccttgcaagcgcagttcacagtagagtkcacacctatataagaatctaatgcggccrctgatctgacaggaggtggagtccaggcagtaatgtgggagatggggagggtctgtaaatacagatgaagattcactcactcacctgctgctcacctcctgctgtgaggccacagacacacataggtctgtggttcaggggttggagatcccaggtctatatgatttcaaacctttaatatttctttaaccttgttttacagcacagcaaatgtgtcttacggtgaatgtgcatttgraaaaaaaatgtgtattttatatttggtgggtggatgttctataaatgattgttacttcctttctaattttcttacttgttctactatacrgtgagaaatacatattgaaatttgcaactatcattttagctttgtctatttcacctttcagtctcgtccatttttgaagctttgttcttaggcatatattctttgagggttgttatgtmcttgtggtgaattgactcttttatcactggagtccaagtttctccttaactctggtgctatttctcatccagaaatctactttgtttgatagcagtatagcccactctcgctttctttgaggaaatatttgtatagtatgtttctttccatccttctacttttaatccatctgtctttatatttaaggtgaattatttataagtcatgtagagttatgtgttgcttttatatccattctggtaattactgtttttcagtaggagtgattaaaacataggtcagcaaatgtttgcctaaagggccaaatgataaatattttaggcttttcaggccatatggtttcgattgcaactacccaaccatgacatagtgtgaaagcagccatagaaagtatataaatgaatgggcctggctgtgttccaataagactttatttacagaaacgggagattggcctgtgggttatgccatgattaggccgtttgcatttaatgtgattactgatatgactagttttttctttttctttttttttctttttttgttttgttgagttggagctttgctctgtcgcccaggctggagtacagtggcgcgatcttggctcattgcaccctctgcctcctgggttcaagtgattcttctgcctcagcttcctgagtagctgggactacaggcacatgccaccacgcccagctaattttttgtattttttttagtagagatggggtttcactgtgtcagccaggatggtctcgatctcctgaccttgtgatctgcctaccttggcctcccaaagtgctgggattacagaagtgagccactgcacccggctgatatggctagttttaaattacatcttgctattttgttttctgtttgtgccatctattcttggttccattttttctgccttcttttgaatttattgaatattttttagtattctcttttatttcctccattggtttgttagctatacttctattttgtttttagttgttactgtagggtttccaataggcatcattatcttattacatcttaccttcaartaacacaccacttcatatgtaacgtatgagtttcttaacagtatacttcaatttttcctattccatcctttgtgctgtattgtcatgcatttttcttctatatttgtgtacctcacaatgcatttttataattttttctttaaacaattgtcttttaaataaatttttaaatgagaaaaaagttttatagtatctattacacattattatttccaatactcttcattcctttggtggatttacttgagcagacagttaattgatatcgttttccttcagcctaaagaactttctttaactttgttttgttttgttttagagtagaggtctattagcaagcattctttctgtcwgaaaatatctgtacttattttgattttgaggaatattttctttacatataaaattctgggctgacagttcttttccacctcaagttgttattgttgttgttttgagacagggtcgtgctctgtctcagaacaacactgtgagtgtagtggcatgatcacaactcactgcagccttgacctcctggactcaagtaattctcatgcctcagcctcctgagcagctgggactacaggcacgtgccaccatgcctggctgatttaaaaaaaaaaaaattgtggagatggggtctcgtcatgttacccacgctggtctcaaactcctgggctcaggcaatcctctcacctcagcctcccaaagtgctgggattacagttgtgagccaccacacttggcttcaagtttttaaagatattcggttgctttctggcttgccttgtgtatgatgggaaaccagtgatttccttctgtttgtccccggtatgtaatatgtgttttttttctctagttgtttttaagattttctctttgtcactcattttcagcaattcgatgatgtgtgatatttgtgtttatcttacttggtattcattaacattttgtatccctgagtttataattttcattaaatttggaaacatttcagccattctttcttctaatgcttttcttttctccttcaagaattctaacggcatgtatgttcgatcgctgatgctgtacmattcatcattgaggttcctcgttttttagtatttttccctccctgtattttattttcaatagtttccattattatgtcttcaagtcggctgttacttttttttttaatgctaatctgttaaacttattgattggatgtttcttttcagatactgtgttttttatttggcatcataattttgtttctttcatttcattttattcctgtttctctttaagtccttgatataaatcatcatatttataagcagtgatttaaatttcttatcagctaatgcaatcaactgtcctttctgagtcttgcccttgaccgatctttttcttagtatgtgtcacatttctctgcctctgcgcatggaataattttttattgaatacacacacagtgtatgtgttgacggctcttgtgagtcctcgggtcctgtcttcttagtttaaaagaatttcaacaaaagacacatagcaaaggagatgtagcataaagtaatttattgagaaagaaaaagactattttgaaagttaggtgcagaatagacagtacaccctgagagaggaagatatcaaggcaggctgctcgtgaagattggacaacaaagactggtaccagggatgctccctttaatggagacttccatggttactcataagcgggtgggaagaggtgttgctagtaagcatgttctgggcgatcctcttggtgcacttactcagtagctgtacatgattgtccatacatctcatgtctcattagcatcttaaatctccacccagggatctgttttttatttttattttttgtgtgttctaataaaactttatttacaaaaacagcagtggcctcacgctgcagtttaccaacctctgcccttgaggaaattctaaacgatccttctattctccttgtagaagatgatattacacaatttttggcatatgaagaagcaatcgataaatacaaacacaaaaatatgtaggaaaatcatattatctgtgccaaacagaaaattgcagaaatatttcctttttgcagatttttgtgaatttttccagctttttaacacttgcaacatgccattttttagtatttgaaagagctgtctctttaatatctaaattttcttttcttttttttaatttttttattattgtactttaagttttagggtacatgtacacaacgtgcaactttgttacatatgtatacatgtgccattttggtgtgctgcactcattaactcctcatttagcattaggtatatctcctaatgctatccctcccgcctccccccaccccacaacagtccccggtgtgtgatgttccccttcctgtgtccatgtgttctcattgttcaattcccacctatgagtgagaacatgcggtgtttggttttttgtccttgtgatagtttgctgagaatgatggtttccagcttcatccatgtccctacaaaggacatgaactcatccttttttatggctgcatagtattccatggtgtatatgtgccacattttcttaatccagtctatcattgttggacatttgggttggttccaaatctttactattgtgaatagtgctgcaataaacatacgtgtgcatgtgtctttatagcagcatgatttataatcctttgggtatatacccagtaatgggatggctgcgtcaaatggtatttctagttctagatccctgaggaattgccacactgacttccacaatggttgaactagtttacagtcccaccaacagtgtaaaagtgttcctatttctccacatcctctctagcacctgttgtttcctgactttttaataatggccattctaactgatgtgagatggtatctcattgtggtttggatttgcatttctctratggccagtgatgatgagcattttttcatgtgtctgttggctgcataaatatcttcttttgagaagtgtctgttcatatmctttgcccacttgttggtggggttgtttgtttttttcttgtaaatttgtttragttctttgtagattctggatattagccttttgtcagatgagtagattgcaaaaattttctcccattctgtaggttgcctgttcactctgatggtagtttcttttgttgtgcagaagctctttagtttaattagatcccatttgtcaattttggcttttgttgccattgctttttgtgttttagacatgaagtccttgcccatgcctatgtcctgaatggtattgcctaggttttcttctagggtttttatggttttaggtctaacatttaagtctttagtccatcttgaattaatttttgtataaggtgtaaggaagggatccagtttcagctttctacatatggcctgccaattttcccagcaccatttattaaatagagaattctttccccatttcttgcttttgtcaggtttgtcaaagatcacatagttgtagatatgcagtattatttctgagggctctgttctgttccattgatctatatctctgttttggtaccagtaccatgctgttttggttactgtagccttgtagtatagttggaagtcaggtagcgtgatgcctccagctttgttcttttggcttaggattgacttgacaatgcgggctcttttttggttccatatgaactttaaagtagttttttccaattctgtgaagaaagtcattgatagcttgatggggatggcattgaatctataaattaccttgggcagtatggccattttcacgatattgattcttcctacccatgaacatggaatgttcttccatttgtttgtatcctcttttacttccttgagcagtggtttgtagttctccttgaagaggtccttcacrtcccttgtaagttggattcctaggtattttattctctttgaagcaattgtgaatgggagttcactcatgatttggctctctgtttgtctgttattggtgtataagaatgcttgtgatttttgcacaytgattttgtatcctgagactttgctgaagttgcttatcagcttaaggagattttgggctgagacaatggggttttctagatatacagtcatgtcatctgcaaacagggataatttgacttcctcttttcctaattgaatgccctttatttccttctcctgcctgattgccctggccagaacttccaacactatgtkgaataggagtggtgagagaggacatccctgtcttgtgctagttttcaaagggaatgcttccagttttttcttttcttttcttttttttctttttcttttcttttttttttttttttttttttttgagacagagtctcactctgtcacccaggctgaagtgcagtggcacgatctcggctcactgcaacctccgcctccagggttcaagcaattctcctgcctcagcctcyggagtagctgggattacaggcgtgtgccaccacagccagctaacttttgtatttttagtagagacaggttttgccatgttggccaggctggtctcaaactcctgacctcaagtgatctgcctgcctcagcctcctgaagtgctgggattacaggtgtgagccgccgcgcccggtcgacatactttcctaaggaaattcagttgtgtccaatgagtactttcaaaacatcccaattgtgcaacaaaatgctctaacaacataggaggggacaaacaactttacgcggtgtctgcttcctggtcctgcatggcctgaccctttcaggaatccttacagaacattgccagccaagcaaactgccctgcccccagtacaaatgtgcrctttctgtacatgcctgggatgacctccaatcccagaataatagaatgtgatctgcttcctcctcactgtgtctctccaacccctagagacagccccaaacccatgtctcccaggaaatacgctagaccacttccaaacacaaacgagtgtctcagcatttattaagcacttatgcacccgaaataaagggtctctaagtaatttgaacatatatcaggtaccaaatgcttaagtttggataatctcataggtaaataattactagaaaaattaaaagtatattaaaagtaaataattactagaaaaattaaaagtatattttcattatcaactttattagcatatagtgttccatgagcaggaatcttgcttaagtggcctctgttggaagaaggaatcagaggaaaacagaatttaagccctctatcggaatacaggctcattaactgagtgtgtgaacttggtttayggggataaaatggtacccatagaaatggttgttctgaggactgatggagattttgcgtgaagagatttaacrtgtgcctgacatagagtaagatttcaataaagtattagctagtggyaatagctrttattatcctaaatatttatatctcaagaagataggcaaaagacttttttgttgttgtttgtttgattgtttgttttgagatggatgtttgttttgagaggatggtctccatctcctgacctggcgatcygcccgcctcagcctcccaaagtgctgggattayaggcgtgagccaccgcaccaggctggcaagagamttttataagctgatatagctttagttttmactgtagaactataaaccaaatgctagtgaatctgcgtatgttgtttcaattgctatctcttatagacgatgtattttgttactttttctcctggttaatagaattttgtttyaaataaaaattaagccacatttagaataaatttgcttaaaaaaaatctatcactacgtttatcttctagtgaagcctaactgagaaagcaacaaaattagcaactcaaggaaatagcatgctcaaggaaaaattccactttcaactgagttaacaaaataatttggaattacaatgccttattgaaatgcaacattttatgctaacattatttttggttatttttctggtaataaaagtagtacatttcaattgtaaaaaattttagaaaatatacagtaaagacatraaagcattggtgaacccacagttaagagccaatctttcttaaaatactggtgaattaatgrctatcttttttttttctaaaccagtgctatctaatagaactttccatgatgacaaaaatgtcttccatctgtgctgtcaaacagaaccactagccatgagtggctataaagtatctgagatgtagctagaacaaataaggaactaaagttttaattgtctttaatgttaattaattacaattttttatatttttcccagctttattgaggtataactgacaaatcaaaattgtatatatttaaagtaaataacatgataatttgatatatttatacattgggaaatgatcactacaattgagtttaacattacctcacataattactgtgtgtgtgtgacagagtgtgtgtatgagagacagagagagagagagagagagaagaacacttaagatccactatcagcaaatttcaagtaagcagtacagtataattaactatggtcacratagcttaccttagacccccagaccttcctcaccttataactgaaagtttggacccttccatcagcatctccccattttcctaaccagccaccgctctactctctgcttttatgagttcaacttttgtagattttgcatatgcgtgaaatcatgtggtatttgtctttctgggtctcacttccttcacttagcatgacgtccttccgttcttccatgttgttgcaaatgtcagcatttccttcttttccatgactgaataatattccactctctatataaacatatttttatccattcacctgtcaacaaatataattttaatttaaattatcacatgttgctaatgcctgccatattggcattagccaatacagctctcaatggatatttttatgatattgggaacttaacattgcattgggagcatttctccatattattaaatatcctgggaaaacataattcaaacagctctttattttattaaatgaaggtattatgactaatttgaatatcactgattatraggcaattagattttttcattttaactcttgtaaataatgctatagtaaaccactttgtaaagaaatatttgtctagtgtcatgactatttccttaggatagatctggagagagaaattattaggtgaaaggataaaaacctcgttaaggctctaaacacatgctgctatgttggtttcctgagacattgaatccattayactcccaccagcaagtatccagagaacctgcctctctgtgcccttgtcaacatccagcattacccaattctcttaaaaaaaaaatctttgcataattgacaagcagtaatgagatcaagtggtttgagtatttttgtccttgattggtggttgtggtggtcatggagatgggcctcccagatcccctgctaagggaagacrtgctgcccccgctgcagttgtgtgatgagcagacagtacctgccacctgcttcaggattggcttcaggtgcaggttgctcccttccggggtgacccacacccattgacgtgtgaggcagaggcattcagacctggcatgtgggcctgacttgggccactctgatgggcagtgctcactcgggagctcatggctgggctgcccaatgaattgctgggtctgcgtcacaaatggacatctccgtctgcccatcctgcttccccccagccgattcctttcataggtgtggattgctgaaaatatctggcatttcaaacccatctcagcmtcagctcctggaggactcaacttgcagtagaagtaatgttgaacttgttttgtttatttgcctttttctgtcatgtttgtgttgaggattttgaggccgcttctaagcaagcaggaaagaatgtggatatcaactaatacatttcaattcaaagatttgttatgtctgaagcaatagaaaaaataataggtggcggggcatggtggctcatgtctgtaatcccagcactttgggaggccaaagccagaggattgcttgagcccaggagttccagaccagcctggtgaaaccctgtctctacaaaaataaaaataaaaaatggtcaggcgtggtggtgcatacctgtatttccagctwttttgaaggctgaggtggaagtattgcttgaggccaggaggttgaggctgcagtgagctattatcatgccactgcactccagcctgggtgacagagtgagattctgtctcaaaaaggaaacagaaaaggaaaagtaataaagacaaagactggtgtatttgatttaaaaggtaaaactttctgcacatgaaaaacaccctggataaaatttttttaagacacaaactgaaaaatgacaatagacaaaatttaatatttacctgtaaagaaaccttacacktcaaactaacccaaatacagaaaacactatactatcctgtcttatgtgccttttttttttttttcttragacagagtctcactctgttgcccaggctggagtacagtgatgtaaacacaactcatttcagctttgacctcctgggctyaagtgattctcccacctcagactcccaagtagctgagaccacaggtgtgtgccatcacactaggctattttttttacattttgtagagatgaggtcttgctatgttgcccagactggactcaaactcctggcctcaagtgattctcctaccttggcctcccaaagtactgggattgcaggtcagccaccacgcccggcctgtgcctatttctgtaggacataaggaacattttcacatagcgtcttctctaaacacatttccaaaaacccttcaggattgggctcttcctctgaaangtcaggtagtgcaagatgaagatggtcttaaaacaaaagcaaagttcttttcattatgaagaagctcaacagaaatgarattgtggctttgcagggaaaattatagttcttccaaccttcccatcccaaaaagactgagaaaaatgaagtaaacttgagttggggtccctctccaayaacaaagtckcgcctaaccctgatgacctctctttttacagccttggtcactgatgacctcacagatgcgattatctgtgccaagaaaattgttaaagagacacaaggaatgaaytattggtaagagtctttccttggaagacttgggctgtcatgggcaaaacctagtgtgtgtatttatcacagttatggtggaattgacaaactcacctcsgcagagtggtccaaccaatggaaggagaycttgtctatattctcctccatcagtgtgtgggtgtgcagtgaacatagtagtacatagaaagggagcagagacatgggagtgagttaagataatttgcaattgcttttcatatgaacatattccaaacaatggagaaaggtattttctaaagtgacttggaaagggtcaattgagtcaattcaccagagggaaaaaaaagcttgagtttgctctagatttggataagattttgaaggttacggcaacattttgcagggaaagagaatgagcagcagcaagaggaaagtgagcaggtctgtgtcatggcgactcagcagaaagcgtccccagcattgagcctggggccttgcattccccgctgctgtgttctggtgaacattgccagccggccccactcagggaacccgaattttcacagatgtgggtgtgacatggaatgacccatccttacaaaagttgattgcttgttgctgaggctaacagtggctaggagaaaaccaggagatcaaagtctgaactaggcaaaatgacagcgtcctttgatctcagaagcaaatgaaacccaacccagggttccgctggcgattttggttaatttctgtagactttgaaactgagacggtttggattgtcacgcttctttctgctgctcttgcttccctctcgtcctcaggcaaggctggaagaaacactgtgaggggagagacctgtccgastggaaaaaagrctgtgaggtttcctaaactggaactggacccaggatgctttgcagcaacgccctagggtttgcagtgaatgtccaaatgcctgtgtcatcttgtcccgtttcctcccaatattccttctcaaacttggagagggaaaattaagctatacttttaagaaaataaatatttccatttaaatgtcttcaccctgactcggttcccttttctctttctttcctttctttctttctttcctttcttttctttctttctttctttctttttctttctttctttccttccttcctttctttctctctttctcttcctttcttccttcctccctccctctctttccttctttctttctctttctttctttctttctttctttctttctttctttctttctttccttccttccttccttccttccttccttccttccttccttctttctttttccttccttcctttttttttttttttcagagtcttgtgctctgtcccccaggctggagtgcagtcgtacgatttcagcccactgcaacctccacctcccgggttcaagtgattcttgtgcctcagcctcccgagtagctgggattgcaggcatgtgccaccacacccagatggggtttctccatgttgcccagcctggtctcaaatttctgagctcaaggtgatctgcccaccttggcatcccaaagtcctgggattacaggtgtgagccatcgcaccccaccctgactcagtttcaatgatgtcttaatggcatcgtgttaagacttgaaaaattgcctccaaaatgctctagccctgagggaaacaaacgtcccttcttcattgtagggagtcctggttcctgtggccattcgaaataagactcattcgaaaataagactccctcatcttcagggccatcctcagaaacaggacacatgcagaagggttaggttaagagctaggagcacctgaggggcgggacccccttaagagtaccccagaaggaccatcgatgtatgcatacccacaagcctagacaccatttgtgtacctacacgcacgcaagagatgtggagagacaaggcaactgagattcatggtttgatgattaaaattctcatgaaggtttttagttgtattttctgtattttgcattcggcattttccaagttttccatgacatatcttgctattgaagaaaaccatccacttttttccagaaaaaaaaataaataaataagacttccagtgaggcacagtggctcatgcttttaatcccaacaatctgggaggccaaggtgggaagattgcttgaggccaggagttcaagacaagcctgggcaacatagcaagactctgtctttacaatattttttaagccctgtgtgcattaggtatttgtcctaatgctctccgtctcctttcccccaaccccctcaacaggccccagtgtgtgatgttctgctcccagtgtccatgtgttctcattgttcaactcccacttatgagtgagaacatgtggtgtttggttttctgttcttatgttagtgtgctgaggatgatggtttccaggttcatccatgtccccgcaaaggacatgaactcattcttttttatggctgcaacattttttttcaattgaagcttttaccccaaatcctgctggaaagtctaataggacaaaatagataaaattgcagctcttacccccaacatccagagagttccccatgttattccagcttctacttaaatcaagcttttcaaacccagcccagatggctttaaatgtggcccaacacaaattagtagactttcttaaaatattatgagatttgtttgtgatttttttttttagctcatcagctattgttagtgttcatgtattttatttgtggcctaagacaattcttcttcttccagtgtggcccagggaagtcaaaagattggatacccctgattggaaaactgactccaaaaataagtgcttcaaaattcaaggtgaaagggcactgggtgtgctaccattagactcatatatctttttgcaaaactcataaaatttctaagcatgcaatcctactcttcccccatatttgatttatttctataataatttagggtaaaaaatgcatttcccagataattttccataattaatgccttcagaaattcaagaggaaatgactacttctatgcctgagctatctttattcaacagaagtatattttagaaaaacccacactcatgttccctttatagatatttggaagtagattttcattttctccccatggccacattatctgttggttaccaggtacactgagcagactcttgggtattaggggatagtgactggcttatgtggggacatgctttctgtggggactcagctctgcctggttcttgggacagcccctgctatctccagcatctggctctttgtatcccaacttgttctctgttgtttgttcctggatgctttctggtctggtctgcaattttctcttgattccttttatacccagtatatcatttccctacagatgtccttgctcctggtttttcccaaacttggaggttgtgcttctcccctaaagcctgttcaagcctgacccagccaacatgaagctccctgctcctctaaccccctagtgctcttgcctctgaactcgtggctggtgtgtgccataggattaggtcactgggaattggtgtcctcatccagcctgtaagctacttgaggcctagaccatgtctttcactgttatattgtccacagtcccttctgcagtgctaaacacataatagttaacattcaaaaatattagatgttggccaggcacaatgactcaagcctgtaatcctaacactgtagggtgccaaggcaggaggatcacttgagccaggaattggagaccagcctgggcagcacaatgagaccccatctctacaaaaaatacaaagattagctgcgtgtggtggtgcacacctgtagttccagctactcaggaggttgaggtgggagggtcgcttgagcccaggaatttcaggcttcagtgaactatgatcgagccactgcactccagcctggatgacagagtgaggccctgtctcttaaaaaaattaattaattaaaaaatttgatgggtttttttgtgccactggacacatgtggaatcacagaaggaatacaaatcagacctcgcattaagaacatttttgttttcaaatcaagttcatgtttattatttcatatgctcctcacaacaaccttgggatataggggaatgtaaccttcattccacacacatccctgagatacggaaggggtaactatcgcccaggggccacagcgcaacagcagagaatccaagaggcccctgctgccctgcggggatcttcagaactcaatgacagaacgtgtcctagttcctttaygaacaggaagtacctgagcccttcacctgcgttccatatagccacttccttgagtgtctcaaatatggcacaaaccctaagccagcccctgaaagatctgcaggagcaatttaatctcttcaaggtgaattttaaaagtagaggctttatcaagaaagccagaaagattttctctgtgtctccaaaatggaaggaaaatgatctagatatctaaaattgaaactcccaataaacaacagttactttttccaactagaaaccaattacattttttgatttaaaaggtttaagggccatgcatggtggctcatgcctgtaaccccagcacttggggaggctgagtctggaagattgcttgagcccaggatttggagaccagcctgggcaacagggcaagatcccatctctacaaaaagttttaaaattagccaagtgtggtggtacacgcctgtggtcccagctatttgagaggctgaagtgggaggatcacttcagcttgggaggctgaggctgcagtgagctgtaattataccactgccctctagtctggctgggcaacacagcaagatacgtaggctaattagcccactccaggcccactcagcctcctggcgatgtttctccaggttatcggatttcctctacagtgcttctgtcttgaagggtccgactgcttgaggacggacattgctatcccccagggctcaggctgagagcagttctttacacgcaatgatgtctaagggtggaaattcacacatccagcttgcaaaaaagccgcagccagggagagcttagggtcctgatctgggaggaatcctgggtgtagtagaagctttgggagtaacatgaggctccttaggggccaggaaggcagcttcacagcactctgccttgaacaggtgattcttttcctcatttttctcccgtctctcatccgattccacaagttcagggaaacggaacaggggacactcagaaactgttctgatttacagattcagcaagcacctctgtttaaactgatcctccagtaacagaaagagaagaggaagcacaagggcagaagctaataagcagagtcttgctggagaacaggagagaggagagaggtaaagaatccgtttccttacacgaagctgcagtttgcacattttttaccactggggcctcctttgctgatgtaacccaaaagaaacgctgggtattgaatggaggcattgttttactcaccttattggttaggctctgttcataacaataatctacattctttgtagggtagaaaatatttttcaaaactctaaaaataaaagaaaataggctgggcgcggtggctcacacctgtaatcccagcactttgggaggccaaggcgggtggatcacctgagatcaggagtttgagaccagcctggccaatatggtgaaaccccgtctccactaaaaatacaaaaaattagccaggcgtggtggcgggtgcctgtaatcccagctactcaggaggctgaggcaggagaattgcttgaatccaggaggtggaggcagcaagccaagatcgcaccactgcattccagcctgggcaacagaagcgaaactccatctcttaaaaaaaaaaaaaaaagaccaaaagtatgaaagctgatcacagtttgatccatcatctaccatttggttggtactaacagaaaacatttcaagttggtactgtactgaaaaacccaaaacatgcccttactgtagctccaggtcctctgtccctggtgatagagcaaagttgatagctgtgcagagtggggagtagacagggcgcccttgagaagctgccagagttaagttaagcccacctcctctgagactagctccgtgagtacagacaagacactgaagttctgtgtttcacctcctgtaaaataggaataacaatatttgccatgcacggccatggtaaggactagcaactgtgttagaagcacatggcacaaactaggcttttaaaaagcattggtgactaattcagctggggatggaggtgcatgcctgctagtcccagctgcttggcaggctgaggtggaaggatcgattgatcctggaagttcaaggctacagtgagctatgatggcaccactgcactcagcctgggcaccagagaaagaccctatctctaaaaaaaaaaaaaaaaaaaagtaattattattctatttcggtatttttccttctctatgattttgtaccaggtgatttctaacaggacctgcagacacttcgacaagataaactacattttatgtgaaataaaggcatgttcaaaaagcaagagggcagatcgtggctgaatgagacaacctgaaactgaggctaagttaattttcacaagtccctgctactaagatttctaagctacagggaaaaggtaaactcatcgctagatttccctgcctgctcaagaccacaccccaactggcagcataattcttggtgaggatgaaaaaactaaatatatacttgccttgaaaagcaaatataggttttcaaaacagtatcctgttgccagctaaagcaaacagagtggtttcaaccccaggaactgacaggcagtgcaaaagggcagattggaagagattaaatatttgtgcaaaagcccgtaccccccttcacaaagggctgcctctgtctggcataaaagggaagggatgcgggaactgagaagagggccttatctttccagaggaaggactgtttggggccggaggaggtggagaag

SEQ ID NO: 93918 - DNA, 22065 bp, Homo sapiens
agtccccagagtgtgatgttccccttcctgtgtccatgtgttctcattgttcaattcccatctatgagtgagaacatgcggtgtttggttttttgtccttgtgatagtttactgagaatgacgatttccaatttcatccatgtccctacaaaggacatgaactcatcattttttatggctgcatagtattccatggtgtatatgtgccacattttcttagtccagtctatcattgttggacatttgggttggttccaagtctttgctattgtgaatagtgccacaataaacatacgtgtgcatgtgtctttatagcagcatgatttatggtcctttgggtatatacccagtaatgggatggctgggtcaaatggtatttctagttctagatccctgaggaatcgccacactgacttccacaatggttgaactagtttacagtcccaccaacagtgtaaaagtgttcctatttctccacatcctctccagcacctgttgtttcctgactttttaatgattgccattctaactggtgtgagatggtatctcactgtggttttgatttgcatttctctgatggccagtgatgatgaccattttttcatctgtcttttggctgcataaatgtcttcttttgagaagtgtctgttcatgtcctttgcccactttttgatggggttgtttgtttttttcttgtacatttgtttgagttcattgtagattctggatattagccctttgtcagatgagtaggttgcaaaaattttctcccattctgtaggttgcctattcactctgatggtagtttcttttgctgtgcagaagctctagtttaattagatacaaacctgagaaaaacaagcaatagggaaaggattccctatttaataaatggtgctgggaaaactggctagccatatgtagaaagctgaaagtggaacccttccttacaccttatacaaaaattaattcaagatggattaaagacttaaacgttagacctgcaaccataaagaccctagaagaaaacctaggcattaccattcaggatataggcatgggcaaggtcttcatgtctaaaacaccaaaagcaatggcaacaaaagccaaaattgacaaatggcaacttatgtttaaaaggaagcagagcataaaagttcagaaaatttgcagcccgatgatgcaatagaaaagaaaaaccaattttctgaggagaaattcaagccagctgcagaaatttgcataaggagaagccaaatgttaatagccaaaacaatggggaaaatgtctccagagcctgtcagaggtctccacagcagcccctcccatcacaggcccagagacctaggagaaaaaatggtttcatgggctgggcccagggccttgctgctttgtgcaatcttgggacttggtgccctgagtcacagccatggctaaaaggggacaacgtagagctcaggccattgcttcagagggtgcgagccccaagccttggtggcttccacatggtgttgggactacgggtgcacagaagtcaagaactgaggtttgggaacctccacctagatttcaaaggttgtatcaaaatgtctggatgtctaggcaaagatgtgcttcggggcagagccctcatggagaacctctgctagggcagtgtggaagggaaatatggggtgggagccccccacacagaattcccactggggcactgcctagtggagctgtgagaagagggccactgttctccagacctcagaatggtaaatccactgagagcatgcaccatgcacccagaaaagctgcagacactcaatgcccacccatgaaagcagccggaatgggggctgtactgtgccaggtcacagggacagagctgcccaagaccataggatcccacctcttgcatcagcgtgacctggatgtgagacatggagtcaaaggagatcattttggaactttaaggtttaatgactgccctattagaatctggacttgcaaggggcctatagcccctttgttttggccaatttctgctatttcgaatggttatatttacccaatgcctggacccccattgtatctgggaagtacctaacttgcttttgattttatatgcttgtaggcagaagggacttgcctggtctcaaatgagactttgaactgtggacttctgagttaatgctgaaatgagttaagactttgggggactgttgggaaggtatgattggttttgaaatgtgaggacatgagatctgggaggggctggggtagaatgatatggtttggctgcatccccacgcaaatctcacattaaattgatgagatcccataattcccatatgtcatgggagggatctggtgataggtaattgaatcatgggagtgggtctttcctgtgctgctctcatgatagtgaataagtctcatgagatctgatggttttataaaggggagttcccctgcacacactctctttcctgccaccatgtaagatgtgactttgctccgcctttgccttctgccatgattgtaaggcttcctcagccatgtgaaactgtgagtcaattaaacttcttttgaaatataaattacccagtctcgagtatgtctttattagcagcgtgagaacagactaatatactatgttctatgatagataagagatataaaagacatatttattaaatttgcaaatgacacaaaaagaatggttaacagaatgtataaaagattcaaatgcaaaactatctccatagattaatgagttgagataaaaaagaatcagctacataattagaggatgggagagaccaaccttagtcaaaatccatacagggtattttagtgtgagccaatagttggacatgactgtcaaaatgcttatggaagcttaggctgaatggatgaaaatattgtgccaagaattatggaaaggagataatggtttcatggactgttcagaccataactggaatattgctttaaacaaaatggaaagaggggatgactggagatattcaataactgcagacatcaataaagggtgataggccaggcgtggtggctcacgcctataatcatagcactttgggaggcagaggtgggtggattactggaggtcaggaggtcaagaccagcctggccaccatggtgaaaccccatccctactaaaaatacaaaattagccaggcatggtagcagggacctgtaatcccagctactcgggaggctgaggcaggagaatcgcttgaacccaggaggcagaagctgcagtgagccaagatggcgccattgcactccagcctgggcaaaaagagtgaaactccgtcttgaaaaaaaagtaattaaaaaaaaagggtgacagatttggtgaaaatcttggaaaccatcttatgcatcatgagtaactcaaattttgaaaactgaatcatgacttcccattgactctgaggctttcataacttaagtctcagccaatagttcaactgcagaaaagtgcctttcatccgattttggtcacatacattcatcttctaagttctcatttagtatcttcatctctcattatggttttcaatgataaattttagtgttcatatttcagttccccaaaaagacggtaaactctgaggcgtgggagatcaaaagccaggcagttgtcagaatcttgccagtgtaaattgactttaacctaacagaaatgattcttttggcatcacatttgggtgcctctatttcctctaatcataaatctttcttctactcatttcttcatagtaaaaccaagaagtctgtgctatcactccaacagcaccaagaacagatatactagtgcaatattatacacataataggggctccattaatgcttgccaaatgaataaagactgttcctataaattttttttgaaaaaaaaaatcgtctagatgcagtaaagctttttaatttgccaaagaacagaatacctacctaataaaataactctcaaattcaatattctatagaaatacaatctaccaatctgttatagaggagttttatctcatgtaatatgcaggaatttgaaaccaaaagttggtgcaacaatagaaaatttgaaaataaattctgcaactgtgccataacttactttacattcctctttccagtctctagatgttgatatgctaatggagatgtaatacagttactgctctaatttaaaccagatacttaaaattgaagaagctgcctacttgttgaagctattaccctaatactagtaaaaataattgaccattagatctaaaaggggccttggatattatctggtacatttatctcacagatcagtaaacaaatgaaactttattctaaagttcacaaagacaattaattgctaggcccgatttttagtccagtccttttcaaatgtggttttgacttgcatacggacaaggatgatggtaaaagacaggaaacatttcaagtcctaggagaaatgagattttctccactactttctttgctccccacagatttaagtaagttctaagaagtccctacagatgggagtaactgaagtgcttcctttgcacgtttttgagatttggagaatttaagaggttctaagacctatgtaaaatttcaactcaattacatattttttggttcattatctatccaccaattcttccttccatttaaaccattagatctgaaaaagtccttagaaactgcctaatagtggtagatatttcgtttcactgatcaaaaacctgaggctcaaaagcaaatgtaaatttatatttcataaaaatcttgggggaaaagtcctatcctatcccattagagagggagtagtgcagttagaaatacaacaccgaactcctgaaaccaaacatcaagtatccttaaacaagataatagaattgtgatttttttcttttcaacatgaaacttcatactatgctgtatatcacatataattaaattacacaataatcacataccgtattaataagaggttaagtgtaatataataaaatggtcatctcacagcgccagactgccctctctgtaaaactgtgagatgctgaatacctagatatttcgaccttttctctaacaagttatcctccaaggctacttcatcgaggcaaaaatacattttatttattattaaaaattccagtatatgtatgcttaattaatactgagtattccccattcttgtttcaagtgatagtctttgcttatccacatacctaggaggctggggaggctccttcaagtcactgggtatgaggttataaatgcactcagaagagcacgttggatccatggccaccaaatgactccttaaaagctactctccacaacttttttctccctgtcccagtatctccgtccctttcttcactgcttcccctttctttcttcttcgccttctgaaggaccacaggttctctccttcacatcgtccccctttaaccccctcttagcagtcctctctcgggaagaaaacaccctatttctctccggattgctaagcgtcgttgactgtgcggttgccgtggaaaccgttactaggcaacgaggaagtggcaggcagcactgcaaactaggtctcccctcttccctctttctgcagcgccttctgctagagaagctcatttggaagccactgtttttacgtgcctttgaaagttaacggggtgaaaatgatgtccccttaaaaactgtgctcttttctatttctgtgtatctggggaaaaaagaaaaatcctagtagagacggcaaagcgcagctggtgcgcaggcgtcacccaataaggtttttgtgagcaggccccaatcgcggtgtgggcggagcgagcggctgagaccacgaggacgcaaggccagcgccgccagggagacgagggaggggaggagcctgaggagatcggagtgctcggataggctacagtgagaaaggagagtcacgtgccctgcgcgaggccgctcggggaagggcgtggagcggaggcacgctggccgccgcaggcacaggcgcagagtccactgcgcgggggcgggaccggggagctagctgcaggtacggtgctccgtctcctgtggaggctttagcggctcgtggacactgctcccccatttcctttcatttcccccgtcttctcagtgagatttccttggtgagttattggaggagaaaggaaggaaaactagaagccagcccgctcccatcgcatgcctttccccgtaccgtcccttcccctttccgctactcgctggtcatctcaactctgcgcgcatttttcctgctgcttctggtcgaggctcctcggaacgccgcgcagccctgcccgccacgtgtgtgagtgcgcgcacggggcccgcggcctcctccgcctgctgcgctcgccctcccgcccctgctcccgggaccgccccttgggcggtcctccgggtcggctctgcgcctgctcttccccgggtcgggactcttcctctaggtcgttctccaggaaccagtggacctgctctttgtaaatgagcagcctaaactaagaggagaagccttttaagtgggcctttacgtttttgtccagtttttggtgtcccttgttggaaaattgtcttctgagaagcggttttattcctttttgttccacctggtcacccgtaaatctatgcacatgggcctgccgtaggaaagtcatttagacgcttttacccgagtgtttaaaagacattttggtaataggatttggggaggaagatggatgcctctgaaccaccggtacagaggccactctgcccgaaggaaataaagcttcccggagaggagagaaaacacacttgagtctgggtttctcactgcctggttggctggcggagtgattaaaacaacacaatggcctggtgaaccttttagttcctgtataaaaaggctttactgaatgtgtaggtccttactttgggctcttactgaatttcactacataagaatacgttaagtttttcttttttttttttttgtatacagttgattttaatttttgtcccagacgcttagggaaaattctccagatttcttcacatcagattgtcttccaaaacattttagatagatggatctgtagatctatatttagatctagatccaaatctatatcactttgcccctttcttttcgcccttgagtattttatgtttgggatttctgtttagcaagtatagagaaaaaatttggcgggaaacctcctgtatgtacgaagattcgaaccaaggactcatggaatgataacgccattagccaagtggatagtcactggctaaagcttatgaattttctaattagaaggaacaccttgagactatttgtgttaatcagttcctgaaatagcaagtaagggcaaaacatgatttctgcagttagcaccaactggcctttggtagccttgatgttctggggttactgaaataaaataatttcactgatgtctgtatatttattatgctttaaaaaatgctaaacaatttgtgcaagacctcactgtggtatagttagtttacagccatgagcaggttgttaaatcatttggaaaaaaacttttcttttttcttagacatttgatctgcaattctccttgccttttgaaagtgtgtttaagcaaaattatttctagtttttataatgctcttgaaatgacacttcaaaaaaatgcctgtgtccaccgcatgtccacagggaattaactggtatatacctacagggatgaacaaactgtctataaaggggtagacagtaaatatttcaggcctttttaggccaagtggttatgttgcaactactcagttttgccattgtagctcaaaagcagccaaagacggtactgaacaaatatgtgagcacatgaatgactgaagttgtgcttcaaagaaacttgatttatgaaaatgatggtgggccagatttagcctgtggattgtagtttgcacagatcctagatccccgtatataatggtatgcctgtgatgtacataaacaaatgagggttgttttgttttttttttttttttgcgaaggattattttaatctatttaaatgaataaaatgggtgtagatgagtatataagacaattggaaggtaaataaaccctttataaagacaggttctttataattctcaaagttatagaattgtggatactaaagttttcaattaaatattcgagatcgttaagaatatgtctaacagcagaagtctaacggcagaaaaagcttagtcagctttgatagtaatataaagactaagtgatgaacttgcaaaattgttttagttgtgagatccttgtgattacagaactatactggattgtgtggtccttccaccctcacctctatttcatggcaagtgggaggccctctgaatgaaaagtttgagagaatttttggtcagaagtcagaagcagtagagcttaacctccttttggctagtttgtgtcctgatacacagttggttctccatatctgtgaatttcccattctcagattcaactaattacagattgaaaatattttaaaattttagttgggcacagtggctcatacctgcaatccaagcactttttgaaggccaaggcaggaagactgcttgagcccaggagttggagaccagcctgggcaacatggcgaaaccccctctctactaaaaatactaaaattagctgggtgtggtggtgcgtgcctttagtcccagctacttgggaggctgaggtgggaggattgcttgagcctaggaagtcaaggctgtagtgagccaagattgtgccactgcactcctgcctgggcaacagagtgggagcctgtctgaaaaacaaacaaaaacacgaaaataatggaacagtaaaaataccacaaacaaaaaagcaaattagtacaacagctctgtacctagcatttgcattgtattatgtattataagttattcagagattaaggtatacaggaggatgtgcacaggttatatgcaaatactacaccattttatataaaggacttgcacatctgcagatttttctcactctaaagtcagtcctattaactgctaattatccaatatccctctcaatgcttaatccaaataattgttaaacacatgaaagagaagagtgtcaagaccaaaagccttggagtgcactaccagaaatttccctctattcaacagaaccatttttatgatcattcaacaatatcctcaaatcttttttttccatttctccgtgaattaaaaaaattttaaatgaaccatgtgtaatgctttggtgaagtccatatatatgccttctatgtatattcctgagtggccattgcagcagacgttctcaaaaaagaaatgaggatgtcttttcctcatttggttggttaaaaaatgttgagcccctaaaatcaatttgtggttaaatgttacaaaataaaatttagtatgtagcttaaaatagaatatatctttattgttctttagaaataatatatattatagcacttaactgccttctgctagtctaaggaacatgtttgtgggaaataatattgatacagaatttacaaattgaactgtcataattttctttaaaatatatctatatctatatctatatctatatctatatctatatctatatctatatatctaccccaaagtcttgaaaaagggaagtgaagtaaaatttaaaaagaagagggtagaggggaactaacatataggaaaagtaagattgcaaaacataaggtgaaggtaacataatgtttccttacaatctacttttaatgaagttgatgttaagcayggtagcaagcaatataaagcggaagaaaagatgaaagatttactgggccagtatggtggttcatgcctctaatcccagcactttgggaggccaaagtgggaggattgcttgagytcaggagttcgagatcagtctgggcaacatggtgaaaccctgtctctagaaaacctacaaaaattagctgggtgtggtgatgcacacctggtgggaggatcacctgagcccaggaggttgaggctgcagtgagctgagatcatgccactgcactccagcctgggtgacagtggaagaccctttstcaaaaaaaaaaaaaaaattactgctcatgaaaaccatctactcagattatatacaattattactaatacaggtatcagaaagttatgtattgcaaactcaaaaagaagaaactgtaatgttacaagcaaaagcttcctgaataggaggttaatcagactgttttatgtaagtgccctaaaagcagtttgtgcttttaaagtccagtaccagaatatggtttaataaaataaattgatgttatggttcaagtatataattctttctggtccctggtttacttcagggaaaggattagactgtgcatggcaaaacagttcttgattcgtgggtgaacaccacggtattctctgaaggtttataaaccaaaccataaaaaaaatgcaccctgcctwgtacctacatatttgggttcaatttatatattcctagcccactgtcagtgagtgacaatgattaatcttactgtaaatattttgtgctaaccactatgatatgtgctttgattttattatagacacttatatagctaagaggtatctttttgtggcaagagttttatttgggctttttatagtggatattattacatatgaatatatagtgattttgatagataatatagcctaaaaaacaactcagacactaatttcatagctttagtctgctgactttttcccctctgatcattatacagccaaatcattaaaattccagatatccytctgaaaagttttatatttgttattatttggttttttattgcttgatggtagaaattccttcagtactgtttagtgaaattctttttataatgagacacacatgtttaaaaacagtattttaatcttctaataacagatttggggaaacatatgaaaagggtcaatttttctgtatttttaaaatttcagatgagcttttcaaataatagactagtctatgtgtagaattttatgatactctatacagttatgattaacttaaatttttttccattatagactccacgttttgcaaagatcggttttgcctcagagycaacaaactcttcagattggttccggtgtgtcctatgtttacaagtcagtggaaattaagcacaacacatataaattgaaaagtcaaataaggaaatgaattacctcccttgacggctctaattttacttgtaagttaaattcagagttagcttaaaatcatttaaatgtttaattacagaacagagtttaagtagcatagaaagtcagtattacatgattaaaagttttcagaacatattttaacatatgatctagtatttaatatggtttagttgcatattgcttctaccagagaacacgtgataagccccactatgtgtctgtgacattacttcaggcaatttacatgaacattgcacaggtattatactgcattttacgtaactaaaaacttgacttgtctggcatacatttttgttttaatggtgagtatatttccaaagacaaggacttggtcaatatgggaaattatagagcttctttggatgccagaataattgttgtctctcatcattggaaacattcctgaggttcttggctgtggccctggggtctggaaattgagttaaatctctccactgatgattatagggttagaaacaaaagtgatggttctgtgcagataaggttatatgtagcctttgacctcattgctgattattaatttttcttaactatttgtataatatacctttcaccttggctctttttaaagccttcaatatgaataatatgtaacaatgattcttaatatgcgtgtaaaaggcacataagaaagaaaatgtcatacctttgtcctgtagtttggaaaactaagcattttataagcaaatatgttcttttattctggtttcctgttatgacttctataagaaatttatgagtaatatagtctgtcacaatgttcatataactgaagagaaattaaatataaagaatattgttcaacttttgtgaattgcaagtagatagcactccaactccaaatcatctttatatgtgatataaactgataaaccatgaaataattttcattaaaagatctcaatatgaaaagaaatagtaatttgatttagtgtatatatacttttaaaagcatctacaatctggcactttgtgaatacaagtttctgttttttatagttacaaattttgtcaaagttttgatttttyagtgtctcgagattttaaaagatatcattaaaaggataatatgcaatatataagaatttgggttggaatactttttttaattccataagtttggaagatttttaaacagtttatgtaccatgggcatggttatattcagtcctattgggattttaacaatctactgtaattagtaaccaaattatcttttgttgttttttgtttgttttgtgttttgaaaagggctaaagccaatttttaggttggcttgggcagaaaagtgaaaagagaatgctccactttaaccgatgtcatcatctgaaaaagataacacagaaatgtttttctagtatacatgttaaaacggataaacatgcacagcgatttctttcaagaacctttgcacttgcggaattgaggaagtcatggtattcaacccactctcttgttggagacaaaaatattatcctgatgggacctcctggtgctgggaaaacaacagtaggcagaataataggtcagaaactaggttgttgtgtcatagatgtggatgatgatatccttgaaaaaacctggaatatgagtgtgtctgaaaaattacaggatgttggtaatgagcaatttttagaagaggaaggaaaagctgtgttaaacttctctgcatctggaagtgtgmtttcccttactgggtccaatccaatgcatgatgctagcatgtggcatctgaagaaaaatggaataattgtataccyggatgtacctctactagatctaatttgtcgtctaaaattaatgaagacagataggattgtaggtcagaattctggracatctatgaaagacttacttaaatttagaagacagtattataagaagtggtatgatgctcgtgttttctgtgaaagtggggcttccccagaggaggtagctgacaaagtgctgaatgcaattaaaagataccaagatgtggactcggaaacattcatttcaacaagacacgtttggcctgaagactgtgaacagaaggtttcagmaaaattctttagtgaagctgtaattgaggggttggcttctgatggtggcctctttgttcctgcaaaggagtttccaaaattaagctgcggggagtggaaaagcctagtaggagcaacctacgtagaaagagcacagatactgttggaaagatgtatccatcctgcagacatacctgctgccaggttgggagaaatgattgaaactgcttatggggaaaactttgcctgctcaaaaattgctcctgtcaggcacctttcaggcaaccagttcatcctggagttgtttcatggaccaacaggatcatttaaagatttgtctttacagcttatgcctcatatttttgcacactgtatcccaccaagttgcaattatatgatacttgtagctacttcaggagacacagggagtgcagtcttaaatggttttagtcgtctaaataagaatgataagcaaaggatagctgtggttgcrttttttcctgagaatggagtaagtgattttcaaaaagcacaaataattggcagtcagagagaaaatggatgggcagtgggtgttgagtcagattttgatttttgccagacagctataaaaagaatttttaatgattctgattttactggctttcttactgtggaatatggaacaatcttaagttcggctaactccataaactggggccgactacttccgcaggtagtttatcatgcttccgcatatcttgatcttgttagtcaaggatttatttcttttggaagcccagtcgatgtctgtattcccacaggaaactttggtaacattttagcagcagtgtatgccaaaatgatgggaatcccgattcgaaaatttatctgtgcctctaatcagaaccatgttttgactgattttataaaaacaggacattatgatctaagggaaagaaaaytagcacaaaccttttcaccgtcaatagatattctcaaatcttcaaacctagaacgacatttacacttgatggctaataaagatggacagctaatgacagaattatttaatcgattagaaagtcagcatcatttccagatagaaaaggctctagttgagaaacttcagcaggattttgtagctgactggtgctctgagggagagtgcctagcagctattaactccacctataatacttcagggtatattttggatccacacactgctgttgcaaaagtggttgcagatagggtgcaagacaaaacttgccctgtgattatctcatctacagcccattactcaaagtttgcacctgctatcatgcaggctttaaagattaaagaaatcaatgagacttcatcaagtcagctctatttgctgggttcatacaatgcattacctccactgcatgaggctttattagagagaacaaaacagcaagagaagatggagtaccaggtctgtgcagctgatatgaatgtcttgaagagtcatgtggaacaacttgtccaaaatcaattcatatgaaagctttcagagtaaatttttttttctagctataagcatgcaataataaatctcaaacactgatttggagtacagtagcattttgtcttttatgtaaatatctctatatctgtttggaatttcaaaagtctgatctctagggctgacatgagamctccatgtcacctcctcagatctttaatctggaagtgacaaaaggtaacacagtgcacggacctttgagctatcatacttttgccttctgctcatgaggggtgtatcaatttccactcccacaccctcactgttatgtggaccaaaatgtctggtatactatttggcgattaaaatatttaagcccagttttcaggtactacatctgtaactagtgaatactctgttgattagaaagttaatttaccactcaaaatggctaacttgaatggaggaagtagtaaactcttctattaggatttgggccagtgttttttgtttgttttttggtgcagtttcagctcactgcaacctccgcctcccaggttcaagtgattctcctgcctcagcctcccaggtagctgggattacaggcatgcaacaccacacatggctaatttttttatttttaatagagatgaggtttcgccatgttttccaggctgatcttgaacctctgacctcaggtgatccatccacctcggcctcccaaagtgctaggattacaggcgtgagcctctgcacctggctagggccagtgtttttaaccctcctcaaattccattttggactacaactaatgtgtatctcacactgtccaaattaaagatgtactctgtccttcactctcctttggatgtgtacggttagggtgacgatgtttgaaaatcaacacataactgaaatccaggatgaaacagtaagcagaactacttagaagtgaatacagaaatgatctatttcaagaggaaggttttccaaaattaagagtacttgagtagtctcaataggagtgtatttgtagacagcagtttccctatattatttggagtcaattcttacgtaatttgttgtttatttcttcagtgaacattgtctttttctggcagctgaaactgcacacaactgatacacatatttaatttgtattcctttgtagtaatacattttaaccatgatttatgtttgtgaatttactggatgttttctttctgaattaaagattgtcaagaccaattagtgtaatggactactgtcaaccacaagatggcattcctaacataatttgtctttgataacattcagtttcattttctgggagaacaacctccataaagaaatatattgaaagttgtaatgaaaacattttaatagtttaataagcaagagaaatttgttttaatttttttaaaattaaaccaattatatattaacaccagatctctggcttagcttctaaaaaggaggttctaaaaccaaaaattgaaaatcaggagcagttataggaaaaaaatggaagattcaaagttacgtttgttcatgtatgtctttattattttatcatttacttttaaggatatttcagtagatgatatatttagaaactgcctctaaatattcactatacataagaatgcattattttgcttggcatggtggctcacacctgtaatcccagcactttgggaggctgaggcaggcggatcacctgaagtcaggagttcgagaccagcctgaccaacatggagaaaccctgtctctactaaaaatgcaaaaaaatagccgggcgtggtggcaggcacctgtagtcccagctagtcgggaggctgaggcaggagaatggcatgaacccgggaggcggagtttgcagtgagccgaaattgcgccactgccactccagcctgggtgacagagcaagactcccgtttcaaaaaaaaaaaaaaaaaaaaaaaaaaaaaactagccaggcatggtggcgcatgcctgtagtcccagctacttgggaggctgaggctggagaatcacttgaacctgggagatgcaggttgcggttgagcagagattgcgccgttgcactccagcctgggcaacaagagcaaaactccgtctccaaaaaaaaaaaaaaagcattatttttctgaaagtgagaggaacagtgttttaaaagacatgatttctggctgggcgcagtggctcatgcctgtaatcccagcactttgggaggccgaggagggtggatcacctgaggccaggagttcaagatcagcctggtgaaaccccatctctacaaaaaatacaaaaaattagctggatatggtggtgcacacctgtagtcccagctacccatgaggcagaggttgcagtgagctgagatcacaccatgcactccagcctagggaacagagcaagactctgtctcaaaaaaataaataaaaataaaaaagacatgatttctgccttcaagaactgtagttaatgagacaacgcaaaaattcagtcgtacaagcaaaagagttattgcaagatggtgtgtcaataagtgaaaaatgagtgataacagctaagtagctaaagtgctgtaagatttaagaggaaaggattactatgggatagtcagaaaaggtctcacaaaggacatagaatctaagatgaatcttgaaggatgggaagattttctaggtgaaaaggaagggggaaaacattctagcagaggcaggagaaacagggaagatgaaatgcccaagggttcatgtgtatttatttgtggacagcacattttcttactggccaaaatagttatttcatgtcttcactttttctcaaaaccaactctggcccttcactctcagctaataactttgcttcattctagaggaacaagtgaccatacataacacacctcaggcttcccatcatcaagtgtatatgtttgctgcatccatttctgtccctttccccgcccctttgattgaattgggtggcattccttctctttttaaaggccagtctctttagatgtgccttggatcctattcccttcaacctacttaaatggtgtgtgtcatcaggtaccttcctcttgtttcttcaacttctccccttctgtgtaacctttcttcttatggtatttagagtctttctgtactttagcataagaacaaaatctctgtgaacatccacctttttcccatctgtgcttctttattctccaatcaagataaagctcttcacagagttatctacatacatggtctccactttcctgcctgtctttttctccagagtgtaaaatatatgtacagtttaaggataagcattaaatacctaagtattcaccacctcacccaatggaacacaactcacctttggttcttctttgattgattagattcgctttcttcctccagctgtaactacatcatacattttctgttattcattccctttctcatagttctgcattgtttagttctgactctttgaattttatataaatggagtcatactttatgtgttatcccatgacctatttcttttgctcagagacttccaaattcatccattcagatgaatgaagccacaattcattgaattgtattactaaatagtattctattgtatgaacaccaccatccacttacccactactggacatttgtctaatttttatctcttcttgtatccaatagatatactgttttttaaaatttatgttgaaggttagtgactgtaaacttcttaacatttgtgactcttcttaatagcatgtaaaaccattttttatgtcaacattaaaaatctatgagtttatgaaatgaaaattgattaattttcaggctatggttataatttctagctttcactgaaattaatttaaatagcctaaatgtagggaatttgtaagatatttgagaaaaatgagatttttaagttacatatttatggaaattataaaatgttttcatcaacatagagtttagaagacaataaattgttttgtatgaagttttagttagattttaatagcaattcactttcaaaaataatcatggatggcaaatattgtttcaatccattaaatcgtttataaaccttttgtaattcagactacgtaatgttagttaaaaaaaatcatgaagtaactgttttcaaatccatggaaacataatactgtttttgtccctatccaggaaaatgaatacaatctacgtatgaaaaagtagtttgtgtaggcctcatctgtgcactccagccactcaaatcttcaactttttatcattttgaaacttttgctttcaaaacaaacagtctccttcaaaaacaaatatgcttttctgactcaaaaaagccaagccaagaaagttgccaatgtcatggaaaagggacatgtcaagtgcaagcaactaaatcaccataactgatatctggcaatactttgatcagctggcaatattttgatcatagtcctacatcagaagttgggattgccttgtagaaggatgctgtagtcacattagctgcttttctttttaaaatcagaactctttgtttcttagatctgagttagggttctcatttaattggtactaacaactgttcattaggtaatccaacgattttatctttttcttgaagatttcccctcttgagtgcctttcctgttttaaggcaggctggttgatttatagggagactaccctatagggtctctctagtcacctttcctttctattcacattgtccttccatctttctcctgagtggatccagtttcttccttttacttcgtttattccataattttgatagaactcactctccagtagcttcctctgataatgttgtgattttagcgtgtgcttttaattatttgagaaattgcttgtctaacaatgtctttattccattgcagactagattaatattttgctgtgtatagactagattaatattttgctgtatatagaatcctaggttggaagtaatttttttcctcagaaatttgaaggtattgctccaccaccaacttctaggttctcttattgtttttgataagtataatgttattctgattcttgatttttaaaatgtaatctgtttttttcctttcctgtagaagcttttaggatcttctctttatggtcagggttctaaaatttcatggcagtatttattggtacaagtctttgtgcttgtttgttttgctgctggagcactttgatgggctttctcaatatggaaatttatgtccttcagttctgataattatgataaaacttatttttgaatttctttttcctwtcttatattgtctgttctttctttctcaaactcctattttagggattttggacaccttaaagtgatcttgtgtggtgtggaagattgattctaaagatagtgcttggccaggtgaggtgactcatgcctgtaatcccagcatttttgaggtggaggcaggtggatcacctgaggtcaggagattgagaccagtctgaccaacatggtgaaaccccgtctctactaataatacaaaaattagctgggcatgttggtgggcacctgtaatcccagctactcaggaggctgaggcaagagaattgcttgaatccgggaggcagagattgcagtagccaagatcacaccattgcactccagcctgagtgatagagtgagactccgtctcaaaagtaaaaaataataaataattaaagacaatgctcagtgatacctcccaaaccttatgtgcatgctattcctcacatcaacaaatgaaatccatgttccctttccttgaatctgggctgatcttgtgacttgctttaatcaatagaaagtggcagaaggtatatgggatttcaaggccaggccataagggtgctagacacttctacttcctacattttttttatgtaaagatacttggcgcggattacctcataatgaaaggtcatgtggaaagaggccttagagggtgaaaggacatcttggaatattgagccctggccaagttaccaggtgagtgtagcaaaagagcagaagacatgctaaactgaacccagtcaacccacagaacattgagaaataataaattgttttaattcactaagttttggggtagtttgttataaaatattaaataactgaaacaccctctaattctctagaatttttctttcccatgtcccatttctttttctttctttgaattcatccatttatcctttctgggagggattccactttctgggtttatttctccttgttaacttttctgttataggttaccattgtcacgtttttagttcttttttttttcttttaaatttttaaattgctttctgttcttgtttcatggatacaaaagtcttttttttttttttaaactctttaaggaatttttaaagcctttttcttttcctgtagagatgggattttgctatgttgcctagactgggcttgagctcatggcctcaagtgatcctcccacctcagcctcccaaagtattgggattaaaggcttaagccactgtggccagctaaggaatttaattatagttagaaaattcatttgaaatttgtttctgtttcttctgaagtccactttttgtttgcttgttttggtctctgtctttcctattgagacattcctcaagtgtttagtgatcttcctctcttattcccatttaattttcaagtagcaagaaattgattggaaaccatatcctggatgggccttatcaattgctggacttcactgtatgattatgaaactgggctatttcagtgggtaccgtcaattctatctgtaggacttttcttttagcctctttaggcttcctggaaagaaatcctccagggaattagaatcagagtaaagaargggggggggctatgatcgttaccattcaacatgtagatttttcagtatggaacctctcactgttttgtggtgttggcatgtactatttctgctctcacctatgcctaatatcccagaatttgaagtctctccgtagaataagcgcttaatcctaatcagcagtcaccctgctacatggggtggggaacagtttccaaggctgtaactgctttttatacagattttcgatgaattctcttgttcttagttctatactcctttcccccaaacccacctcctggttcagaagtaaatgttatctctaattcttgaactattttagggtcttgacgtcctaatcagccaaattttgaag

SEQ ID NO: 93919 - DNA, 32646 bp, Homo sapiens
  misc_feature (1)...(32646): n = A,T,C or G
gttttaagacttaaagtttagatgagttgatttttttttttttttttttttttttgatggagtctcgctctgtcaccaggctggagcgcagtggtgcaatctcggctcactgcaacctgygcctcccaggttcaagcaattctcctgcctcagcctcccgagtagctgggactacaggtgcacgccaccacgcccagctaatttttgtattttcagtagagatagggtttcatcatgttggccaggatggtctcgatctcttgacctcgtgattcgcccaccttggcctcccaaagtgctgggattacaggcgtgagccaccgtgactggcagtggagttgattattttacgtgcattcattataagcttggtgaacaaagacagcgaacataaacacaaagcttaaacgtctcacagctaactttaaaatccagcggacttattgagggtgagttggtgcacctgagaaagagatggagggtggaaaggagaaactcagtgtggaggttctctgaagcccagacaggagcaggacgctgactaggtagggctggggccgatggaggtgaggagtcagtccattctccaaaagaaggaccctgatgagaaggaaagaggatctaagatcttctccaggaggaggaaggactgatcaattcttgaaactctaaaatgatggcttacaatgtgctaacaaactggcttgggttcatcctgtataatatcctctaatttagaaacagaaaaggggtttagtgagtggtggtggtgggtggtgataagtgagaagaccctccaattctcaatatcatcaatttttctttgatgcctgtacacatgtttgagaaggttttaaacttctctgaatttggatttgcagtttctagtaacacagcagtaaatcctagaggagaagttctacagaatccagattcaagtttagcagcaactggggataaagtgaaaaagcaggagaaaagcaggtatagtcttagacatagatattttctattttgctaaaatacagtaagaaaaaaatctgtgaacttcaacagttctaataaaaactaaatgaatgtacagacacagaacaaaatacatgataactattaaatataattgcaccatgtttatacattgagttatttagtatagtagtctaggtatcagtgctgttaattttctcattttctactttcttcattcatttattcaacaaatgtttattgagagatgttttgtgccaggcactggaattataatgatgaacaagacatagtcttctccccaacaattatatcctctatcctgggaaatgataaatagcaatttccatatagtatgacatgtgccatgatagatctaaagacaggactctggctggatgtggtgactcttgcctataattccagcattttgggaggctgaggagggaggattgcttgaggctaggaattgagactgccctggtcaacatagtaagaccctgcatctacaaaaaattttttttaaattatggccaaccgcgtggctcacacctgtaatcccagcactttggaaggccaaggcaggtggatcacttgaggtcaggagtttaagaccagcctgccaacatggtgaaaccccgtctctactaaaaatagaaaaattagccaggggtggtggcatgagcttgtaatcccagttactcgggaggctgaggcaggaggatcacttgaacccgggaggcagaccttgtagtgagtcaagagaatgctactgcagtccagcctgggtgatgggagtgaaaccctgtaaaacaaaacaaaacaaaacaaaacaaaacaaaacaaaacaaacaaacaaacaaaacaaaaaaacaaaaaaaaacaaaaaacattggctcacgcatgtattcctagcactttgggaggctgaggcaggtggatcacctgaagtcaggagttcgagaccagcctggccaacatggtaaaaccccatctctactaaaaatacaaaaatttgctgggcatggtggtgggtgcctgtaatcccagctacttgggaggctgaggcaggagaatcgcttgaacccagaatggggaggttgcagtgagctgagattgcgccattgcactccagcctgggcgacaagagcaagactctgtctttaaaaaaaaaaaaaaaattgccatgcattggtggcacatgcctgtagtcccagctacgctggaagctgaatcagggcaattgcttgagcccaggagttcgatgctgcagtaggctatgatggcaccactgcactccaccctgggtgacagagcaagaccctatttctaaaataaaaacaaaaacaggcaggacccactgggagcagaagtgaaaggcactactctaggtcttttgggattggtacaaagccaccattccagtggtactgtgaggttgatagctggaggacaagggaaaactacacaaaatagagtgaagaagcatgtgcaaagagctggaggagatcacctgtggaactagaactggttgcctgtttggagattttaaaatgccagccatcagccatggtatttattgagaactattcagattttaaagtaaatgcttaactaaatgtcactagaaaacagtatttttcttagccttataatgtaaacatgggctgggcgcggtagcttacgcctgtaatcccagcattttgggaggccgaggtgggtggatcacctgaggtcaagagttcaagaccagcctggccaacatggtgaaacacagtctctactaaaaatacaaaaaattagccaggcgtggtggcacaggcctgtaatcctagctactcaggaggctgaggcaggagaatcacctgaacccaggaggcagaggttgcagtgagctgagatcgtgctattgtactccagactgggtgacaagagcaaagttccgtctcagtaaataaattaagtaagtaaacatgataagttgacgatgtatcacaaattcatcatcaagataatagtttcagagtgcaggctgacaatttcatagggaaagcagaagtaaaggatagccagaaatagaaaggcccacatagtgacttcttttttaagaatttcaatgctctgaaagatcatgaataaataatattattttccaaaatgtactaatgtatttcattagatgtgtataaaacaaaatacgtataacattgtggctgttatttaaacaatggaaagaaagtgatgccattttccatttacaatttgttttaaaaatcaaagatatgtaaatttacttcccatattttgttagtgtattttctttttttccaattcctgcttattctgaaataacagccaagtatcatttgataatactcaagaaataataaagtaggtatgataacttttaaaaccaccatagggcttagagttcaggaggttccggctcagacccatgtttggcaatgataatctccttaatttcaagaattttataaccaaaaatgagtttttgtcttagaaagcctatcacaagaaaaagtagtgagaaaagcctacgactccagaaactattggtcataacttttcctaaaaagcaaactacacaaagtgagacacgcagttggggtgtggagagagcagtttctttattcatttttagaattagaagggagaaatttggctgggtgcagtggctcatggctgtaattccagctctttgggagactgaggtgggtggatcacctgaggtcaagagttcaaaccagcgtggccaacatggcgaaaccccgtctctactaaaaatacaaaaattagctgggtatggtggtgcacacctgtaatcccagctatctgggaggctgaggcaggagaattgcttgaacctgggaggcagacattgcagtgagccgagatcatacaactgcactccagcctgggcgagagtgagactctgtctcacaaagaaaaaaaaaggaaaaaaagaagggagaaatcctgttgatggagtttatggtggctgatgtcctagaaagtactgattagaaagtattaatttatgtcttagaaagtaataacggccaggcgcggtggctcatgcctgtaatcccagcactttgggaggccgaggcgggtggatcatgaggtcaggagttcgagaccagcctggccaacatggtgaaaccgagtctctactaaaaatacaaaaattagcctggcatggtggcaggtgcctgtaaccccagctacacgggaggctgaggcaggagaatcgcttgaacccaggaggcagaggttgcagtgagccaagatcgtgtcattgcactccagcctgggcaacaagagcaagactctgtctcaaataaaaaaaaaaaaaaagaataacaagatttatttcatcaaatttaaacagaattcacattgacttcacagccctttgaatatacttggacttttaagttcaactgtgctgttgaccagtctttccaaacggtgttacagtacaaagagcatgggctgctgaaccagactgactaaataggaaactctgcaatgccacttgtcagctatgcatcttgaccaacttattattattatgttgcacgtgggtcttgaaatcctgggctcaagcaatcctctggcctgggtctcccaaagtgttggggttacaggtgtgagccaccactcctggtttccccaaattatttaatctccctgggccagttcttttactcataaaatggatttgtttctaacacagaattgttggaaacttaaatgagtgtctaacgtgcctcgtattgccagactctcaataaacttttgcccagtcaactaatatccagcaaagaggctagcgatttttcttttttttttgagacagagttttgctgtgtcgcgcaggctggagtgcagtggtagctcgatcttggcccgctgcaacctccgcctcctgggttcaagctattctcatgcctcagcctcccttgtagctggtattacaggcgtgcaccatcgcgcccgactaatttttttcccccgagaggagttttgctcagtcgcccaggctggagtgcagtgccgagatctcagctcactgcaacgtctgcctcccgggttcaagcgcttctcctgcctcagcctcccgagtagctgggattacaggtgcgtgcctccacgcccagctaatttttgtatttttagtagagacggggtttcaccacatttgccaggctggtcccgaactcctgacctcaaatgagccgcttgcctcggtcggcttcccaaaatgctgggaggctagtgatatttaacgctaaataactctggcctccaaagatacctgtttccattttaagacacttctatttcgttttgggagggtaaactagttatattttaataatgaaaacatgtgttacataagcacatagtgagtactcgaatcaacctcggactctccgggcgtgaggggtgggtgaggggaccggcaggtggtcacagccccatcaaaagggagttggggctgggggatgtcgcggtcaactgggaaaggagagccaatcagcaagtggcgcgtcccacgccgtctgtcaaatgcatctgggggttagctgtactcatacatcttgtgggtgactaggtgacttccgtgttcaagacacaagcgagctaagcctgggatttcagtttgcacagcgctttgttaagttttgtctctcaatcttgctgtccaagagcgaacctggaggtcgtctgttagcggtaaattctttacccacattccgaaaaggaaaacggcggccgcgcgcgaggacatattccttggatggtcactcaaccaggactccgctgctcccgcgccctagcttgacctagcgcaccgccccctccccgacgcaggcgcagtcgcggagctgtagagccccacgcagctgcagagccatcgggctgctgcgccatgcgcgcgactgggaaagaaggggtcgcgctaggcttgcgtcactcgtctgcgacggcgccttcgcgaaacactatgctaatggcatggtgccgcggtcctgtcttgctgtgcctgcggcaggggctcggaaccaattcattcctgcacggcctggggcaggagcccttcgagggagctcggtcactgtgttgcaggtcctcgcctagagacctgcgagatggagaaagagagcacgaggcggcacaaaggaaagccccaggagcagagtcttgcccatctctccctctgagcatctcggacattgggactggatgtctttcgtcactggaaaacctcagactgccgacgctgcgggaagagtcatcmcctcgagagctcgaggactcgagcggagaccagggccggtgcggtcccacacaccagggatccgaggatccttcgatgctctcgcaggcccagtccgctaccgaggtcgaagagcgtcacgtctccccttcttgttcaacttccagagagagaccctttcaggctggggarctgattttagctgagactggggagggagaaacaaaatttaagaaattatttaggttgaacaacttcggactcttaaatagtaactggggggcagtcccgttcggcaagatcgtggggaagttccccggccagatactgaggagttccttcggtaagcagtacatgctgaggaggccagccttggaagactatgtagtattgatgaaaagagggactgccataacattcccaaaggtaatgcgatggagataaggtgtgtattggtttcaggaggggcaaagacagatgcagtactcagtcctgattaatgtattcaaagacatctcagaacgtttggattttttattgtactcaggcttttaaaataaaccaatggttataacttttacatatcatgatgaaaattagcattagggaacggctakattttaattttaacttaggagtctcgagtcccttatttgtaaaatgtggataatagctcaactttctgttagggtgatgtgaactcactacgtacataataagtactaattttgttccccattactcttaagtttataacttcaggactcaagagaatgttgaactcttagggaacaattttttagtactactatgatgatattttaatattcaataatcatgttacaagagtatattaacaataggtacattacggtgcttttccccttttagggaagaaatagagttttatattacaatagctaacattcaacaccaaacataaaatgactattctttattaaaaagttaactgcctaaagcctagtttcagtcttttttttaagacaagttctcactctgtcatccaggctggagtgcagtgttgcgatcttggctccctgcaacctctgcctcccgggttcaagcgattctcccaccacagcctcctgagtacctgggactacaggcatgcaccaccaccccgggctaatttttgtagagacggggtttcgccttattgcccaggctggtcttcaactcgtggcctcaagtgatccgcccacctcggcctcccagtgctgggattacaggcgggagccaccgcgcccagccctagtttgaagcttatgctaatcatctattgctagcagattatttcaatccttagtcacagtccttgagtagaatgttcctgtgtaacacaactcctcctcctttctccagatcaggattcattcgttatttattcagcaaattgactgccttccatactcaaggcactgtttagggaagtatagtgttgaactgcagtcctcaccctcaacatagaccttacattctagaaggggtgacaaagaacaaacaagtaaatgaaagaataaggtcatttccagtagtgttaagtgtcatgaagacaaatatattaacaatgacattgttttgggtgacctggggtatgagcatactttatgtcaggtgaggagagatggtctccaaggaggtacacttgataggaaacctaaataaggaagagcttgccttgtaaacagatctaggaagagaattgttcttgcaaagggaggaatgctgcagagtttctgttgtggcctcaatgggtcagatgagggaccccgtatgaggtgtggtttgagtattttattccatttgtagtgaaggaccattagaaggttcttagtaggaatccagtctgtattttaaacggtctacccagggactaaaaaaactttcctcagaaacttaggctactgaggtataataagctttttttgtttaaagacaaggtcttgctatgtcacccaggctagagtgcagtggctcaatcacctcttactgtagcctgaacctcccaggctccaacaatcctcgcacctcaacctcctgagtagctgggaccacaggtgcatgccactatgcctagctaatcaaaaattttttttgtagagttggggtcgccctaacttgcccagactggtctcaaacttctctaggctcaagggatcctcccttgagggtgctgggattacaggtgagaacgaccgctcctggccatggtatcataagctcttgaagaaaactaaaagactttcgtaattttatcttgcttccccrtgtctcctttctccccattagacaaaatcaggagagattagttacatttcatgaagttataaatatgcatatttagtatactttctgcctttccatttgttacagataaaagtcacattgttccactctaaggaggaatttaagtactaaatttgttaggtgttgacttctctttatagcttccaagtaatggctggagatagttttacttcaacttctacaactttgaaatgcttgagggaataccttcactgatgtttaaaaactgatctccctgttagaattacataattccatcttagtattaaaaatatgaccagaggcagagtgcagtggctcacacttgtaatctcaatattttgggaggctgaggcaggaggatcatttgagcccagaagtttgagaccagccggggcaacatagggagaccttgtctctacaaaaaataaaaaattagccaggtatgctggcacacacttgtggtcccagctacgcaggaggctgagatgggaggattgtttgagcccaggagtttgaggctgcagcgagccatgatcttgccactgcactccagcctgggcaacagtgtaagatcctatctcaaaaaaaaagtgagggggcaggtgccgtcactcacacctgtaatctcagtgctttgtgaggccaaggcaggaggattgctggaggctaggagttcaagactaacctggccaacatagcaggaccccatctttataaaaaataaaaaaaaaattagttgggcatggtggtacatgcctgtggtcccagctactttggaggctgaggtaggaggattgcttgagcccagaagttcgaggctgccgtgagctactattgcactactacactccagtctgagtgacagagaccctgtcaccaagaaaatttgtttactaaatttaaaaaaacagtttttattaatatcatccgtaatatttgtgttaacaaaaacaattccaattatatgtttggcaagtgggtcctccaatctagtaatagcatagtctcttttttttcttatatagcagggctcccctacccccaggctgaggactggtaccagtgtgtggcctgtaacagggaaccgggccacacagcaggttagcggtgggtagtgagcattactgcctgagctccatctcttgtcagatcagccatggcattagattctcataggagtgcaaactcttgtgaactgtgcatgcaccagatctaggttgcatgctccttataagaaactaactaatgcctgatgatctgaggtggaacaatttcatcccaaaaccatccccctctccccagtctgtggaaaaactgtcttccacgaaacgggtccctagtgcccaaaaggttggggaccgctgttatatagtatcttaattctaaattagaagttcatcatttggccaggcacgttggctcacacctgtaatcccagcactttaggaggccgaggcgggcagatcacctgaaatcaggagtttgagaccagcctggccaacatggtgaaaccccatctctactaaaaatacaaaaaattagctgggtgtggtggtgggtgcctgtaatcccagctacttgggaggctgaagcaggagaatcgcttgaacccaggaggcggaggttgcagtgagccaagatcgtgccatctctctccagcctgggggacaagagtgagacttcgtctcccaaaaaaaaaaaaaaaaaaaaaaaggaaattcatcattttatgcagagattatatagtaaattcctaactggtcttcctgcctcttgatttttctccagtagatcctgtattcttctgccagattaatcctcataaaatgccatttatatcacctcagtgacacaccctagttgcttatcaggctgagttctaatgcctcatactggcatttaattctctgcctmtctctcctgagataacaaactggatttattctacctctgctttgtttaaagctgtttttaccttgtgattgttcccataaaytgtctactctttgtctttaaactaggccatcctgctactctatgaacttattgtctgtaattttggtattattctgaagtgttgccttatttgttaattgattcttggatctcttttatttcatcaagtgaaatataaactgaaggcaggtccagagtctgattcgttttttcactcccttcttctgcacacccaacaatgtaagataagactaggtgcttagtacatatttattggtcgctgagtcacccatactgttttcaatcataggatattaatatgattctctcaatgatggatatcaacccaggtgatactgttttggaagctggctcaggctctggtggaatgagcttatttttatccaaagcaggtaagagattggactgagctggatctcagtaacaaagaaaacattcaatttgttcataataacagaaakgtataaagatatttkggaaaatacctaacattgwggtagcattctcctagaatctgaaagtaagcaactatttttctttccattctgtacatttattccagtcagtctctttctaatcctccctcaattttctttgctttgttttactttctccatgctctctaatgctgcttcttttttcttaagtatactttttattggaatataatatggctacagaaaagtgtgcagatcataagtgtatatctcaatgaatctttgtatagtgaccactcatgtacttattaccgagatcaaggtagggagtgtccctgccccacagatgcctcctcatgtcccctcccagtccttatcatcaccaaaggaaaccactattgtgacttttatcatcactgattagttttgcctccttcgaacttatataaaatggaatcatacagtatgtgctcctttgtatctggctactctcattcattattatgtttgtgagattcactcattgcatgcagcagtagttctttcattttagttgctgtatartactctctatttaaatcacaatttacctattttactgttgatagacatttgagttggatattacaaatagtgctgcttggaacctccttgtgtacttgtcatgttattgttgaatactagtgccaggtgaatacttagcctgagggaatatggaaggacgttgtcagctgttggggggagagttatatatcgttagggccaaagaattatagtaggtgttcataaagaaattaatcatagtacagagctattaagtaaaaagctagatcatgaagaattatcttttttttttccagaaagtctctaaaaattgtcagttggtaaaagtactgcttgaaggtgggtgtctgatcaaaaatcaagaggtgtatattaaacatatatattttttcatgttcctaccacttaatttctagttacttttatgctagttgattagtacctctttgcctacctaatttctctgagtgtcagggttgctttgggtggtctgtctgtgcagtgttctcttccctacataatactagactgctgaatagtcacagtactttctttgagtagattttataaagattacagatagaaatatgctgaaattaaactcacaccttttgttctttgacctaatgtcttcacatatgaatattatctagattatactaagccrgtaaattcattctgggctcctcaatcaatcttttgtttgacttttctgtacatagttaaaggcagtcattttctcatcatctatgacaaattcctaactgcacggtttcatttgacaaagtggatttataaaaattggtgagaacagataagtgcctatatttctaaaatatatagtatcagaagagtgtcatggcttgaataatcctaaactataaatgtgcaagaacttattgctatttacctatgtgatggatatttttctccatattttcttttccagttgtttatgttactttttttttttttttgaggcgggttctcactctgttccccagtttggaatgcagtggtatgatcgtggctcactacagccttgaccctcggaactcaagtgatcctgtcgtcccagcctcccaagtagctgggacaataggcacataccaccaaagctggctaatttttaaagtttttgtagagactgggtctcactgttgcccaggctggtcttgaactcctggcctcaagcaatcttgcctaagcctcccaaagtgctgggattacaggcatggggcaccacgcccagcttatgttactattaaaattaatttttatctcctgagaacctgataacttgcagttggagttacatttcaaaagataccttggaatttaaacttcattagtaaactgtaaactgattgatctgggataatctccaaatggtatcaaatcacttcagatagaggtgggtggaaagttaattgccttaagttaaaatgtagtactcctctctggaattgcagtattactgtgctaattagtttaaaagttcttcacatacacacacacacacacacacacacacacacacacaaatacaaatacctttaatttttttttttattttttggtagagacagggtttcaccatgttggccaggctggtctcgaactcctgacctcaagtgatctgcctgccttgccctcccaaagtgctgggattactgtggcgagccactgtatccggccacaaataccttttaaatatatgaaagactcaacctcatccataataaaagaaatgcaagttaaaattacattaaaaggctgagcatggtggctcacgtctgtaatcccagcactttgggagggcaaggcaggcagatcacttgaggtcaggagtccgagactagcccggccaacatggtgtacccccgtcaccaccaccacttataaaccacctccgtggcctttttttaccaccccccacccccaaccaccaccccccaacaaatcaccccatcccctattccccccaatccccacacacctcacacacttacccccccacacccacccatcatcacctccccacccccaatcccccccccgattttctttactaatatacacccaccaccacccttataaatacccccccccctccccccattcctcaaataataccatatttgcccaccatactattatcttatatcctacccgctactatttccccatttacatacgacgccccccgcccccaaaaccatccccatnnnnnnnnnnnnnnnnnnnnctgccttgccctcccaaagtgctgggattactgtggcgagccactgtatccggccacaaataccttttaaatatatgaaagactcaacctcatccataataaaagaaatgcaagttaaaattacattaaaaggctgagcatggtggctcacgtctgtaatcccagcactttgggaggccgaggcaggcagattgcttgagctcacgagtttgagaccagtctggcaacatggcgaaaccctgtctctaccaaaaatacaaaaagttagctgggtgtggtggcacacacctgtcgtcccagctgttcaggaggctgaggtgggaagatcgcttgagcctgggaggtgggggttgccgtgagctgtgattgcaccaccgcactccaacctgcgtgacagagtgagatcttgtctcaaaaaaaaaaaaaaaaaaccaaactcaaaaatctacattaaaaatgataaactttattcactttttagattgatacagataaaaagttcaataacttagggagagtatggagatacaggtattcttttttttttttttttttttttgagacggagtcttgcactgtcacccaggctggagtgcagtggcgcatcttggctcactgcaatctctgcctcccaggttcacgcctttctcctgcctcagtctcccgagtagctgggactacaggcatgtgccacaacacctggctaattttttgtattttttttagtagagacagggtttcaccgtgttagccaggatggtctcaatcacctgacctcatgatctgcccgcctcggcctcccaaagtgctgggattacaggcgggagccactgcgaccggcctgagatacaggtattctaatacattgctggttggcatataagttgacaccacttacgtggaggacaatgtaatattatgtgaataaattcacataccccttgagccagcaattccatttttaggactttatcctgtagagatatactggctygatacaaagacttaggtataagaattttcattgcagtattgtttatattagcatatgactagaaacaagctaaatgttcatcgtagccatacagtgaatataatgcctgttaaaaaagaatgcagtacatctagaagcactgaaatgacattggtaagtaagaaggaaggtacaggacagtgtgtataatacaccacagtgtgtattaaaaacacagagagatacttggcatgcttgtataggcagtgactatcatgggaaaggtaaatagctggtaatgtggttgcctctgaagagggagggagattaattggagatcagggataggagatcagacttgtaacattgaactatttgaattatttttttcacatacatgtagtacctttgcaaaatacatttttgacactttttaataaactgattaatattatgaaatatcaaattattttttacttaagttggatcacaaggacgagtcataagttttgaggtacgaaaagaccaccatgatctggctaagaagaattacaaacaytggcgtgattcatggaaattaagtcatgtagaagagtggccagacaatgtggattttattcataaggacatttcaggagcaaccgaagacataaaatctttaacatttgacgcagtaagttytctaacgtgggtcctgtgttattactttgactataaagaagataggggtcaggcttcttttgtatgggcaaaggtcttccttcgtttgcttcatgtctatctctagggattgaaagaatattttcktttcatgccttttaatctcatggtgggatttgggacagagagacatactgagttaccgagttgggtgctgaagttgtcattgaatgtggggtaatgactgaaagctaggaccaaagactagttgagcatcatgaacctcagcatttctaggatgaatcatactttggaagcagcattggaagcatattgaacccggcacctaacctgaactgtgagatttgggggaataagtagcttccatttgacagggaataggcagaaggcatctttagttagttgaagtcaggatatcaaggggagtgtgttcattgaagatgtcgaggacagaggtgtttatcatgaacaaagctccagaaagtggagcagagacattgtgaggaagagaaacactgggaagttgacttagggaaaagaagcagagaagatgaaagtaaaaagatagatgacaagagaggatacattaagctgcgatcaaacatggtggagatctgggacatggaagtatttgctggctgaagagtttcagaattccttggtgatgccacttcacagttcatagcttcacactatggactgaggccttggttaggagtctttcttcctttccttaattggctgctggaaggatggactgttttggtgagaaatgaagcaaagttcaaagaggagagaaaatctttttttttttttttttttttttttttttttttggcaacagagtctcattctgttgcttagggtggagtgcagtggtacagtctcagctcactgcaacctccgcctgccgggttcaagcgattctcctgcctcagcctcccaagtacctgggattacaggtgcacgccaccatggccagctaatttttgtatttttagtagagatggggtttcaccatgttggccaggctggtctcgaactcctaaccttaggtgatctgcccatctcagtctcccaaagtgctgggattacaggcatgagccactgtgcctggccatgaaaatgatttttatcagcactggcttccagctctgatataactaaaacctatagttttagtggcacagcttcctgtacagaaagacctcagttcttttttctcatttatggcttgcatgttacagctcaataagggggaaagagctctgtttaggtcatccataggaatgtcaaaaatacctgcgagattaaattggtcatcagaattttgcttgatgagcatgaaacacaacaaaggattttaatgatatcattgaagctttgtagaaacctgctgaaccattcctgatctaaaaagaacactcttttttagatttattcagctgaatctctcttgaataatagtgccagatgattactcaatatgagggaatagagaaggagagggggtgtcagctgctgggggagagttatataccgttaggaccaaagaattatagttggtgttcataaataattataatacagaactgttaagtagaagctagatcatgaataatttccttttcttaagaacgtttctaaaaattgtacattggtaagagtactgcttgagggttggtgtttgatcaaagatcaaaaggcatatgttaaacataaatctctggcagggcacagtggctcacgcctgtaatcccagcactttgggaggccgaggcaggcggatctcctgaggtcaggagatggagaccatcctggctaacacggtgaaaccccgtctctactaaaaatataaaaaattagccgggcgtggtggcgggtgcctgtggtcccacctactcgggaggctgaggcaggagaatggcgtgaacccgggaggcggagcttgcagtgagccgagatcgcgccactgcactccagcctgggtgacagagcgagactgcatctcaaaaaagaaagaaagaaagaaagaaaaatacaagaattagccaggcatggcggtgggcgcctacaatcccagctacttgggaggcygagtcaggagaatcgcttgaacctgggaggcggaggttccagtgagccaagatttgcgccactgcactccagcctgggagacagagcaagactctatctcaaaaaaaacagaaaagaaataaacaaatatgtatgtatagatgtgtatttctgatactgtcattctcctgctgaaaaaatccggagcttttcttttttttnnnnnnnnnnnnnnnnnnnntagctgggattacgggcgcccgccaccatggctggctagtttttgtgtttttagtagagatggggtttcaccatgttgcctaggctggtctcgaactccagggctcaagcgatccacccgcttcagcttcccaaagtgctgggattacaggcgtgagccacggcacctgacccggagcttttcattcaaagacttctggtggccagatctgatctgaaccttcctttctctagtcctttatgtaacctgactccatacatgccaaccaaaatgatgctaaatgaataaaaaggtgttaaaccattaaaaaaaatagaaaaaagagcatgactaataaaagaattagccgggcgcaatggctcacacctgtaatcccagcactttgggaggccgaggcgggcagatcacaaggccaggagatcaagaccatcctggctaacatggtgaaaccccatctctactaaaaatacaaaaaattagccgggcctggtggcgggtgcctgtagtcccagctactggggaggctgaggcaggagaatggcctgaacccgggaggcggagcttgcagtgagccgagatggcgccactgcactccagcctgggcgagagtgcgagactccgtctcaaaaaaaaaaaaaaaaagaattaaacaaattttggaaacagcttaaccatcaaaagagaatagacacaatggaatactaacaataaatgtactctagctacatcaataaatctgaaagacttggtgtttggtggaaaaagcattataagagaatatgtgaaatgaccgcctacatgtaaaatttaaaactacacaacatgtattgtttgtagctatatacatatgttgtagaagtataaaatttgggaatgttaccaacttcaggacaatgactctttctgaggagagaaaaggaagggaaaggaatagagggaaataagtttggggtccattcagattggtccactgccgggctccataatcgccagtgtaaccttgggtaagtcacttaatctttccatgcctcggttacctcatgtattaaacaggaatgataatagtacctatttcatagagttgttgaggattaaataagagaattcatgtaaagtacctggtacatagtaagcactgaataaatgttagttatgtttttcatcattttgattttcttcctttcctcttttctctgcctgtttaaactctattctccctttaaagcttaaaggtcatctcctgtgtgaaatatcctttcatcatctagccagaggattattaccttcctctgaatttctgaaccactttgtttctggagtcaacaggcatttattaagaacctgccatgtgtcgtgtgctgtgctaagacaaaaattatacattcaaaagagcttttgaaaacaaaaaatgaataagaaatattaaaaaattaaaaaaaaaatagctgtgggccaggcatgatggttcatggccgtaatcccagcactttgggaggctgagatgggtggatcacttgaggtcaggagtttgagaccaacctggctaacatggtgaaactctgtctctactaaaggtataaaaattagctgggtgtgatggtgcaagccagtaatcccagctacttgggaggctgaggtaggaggatcgctggaacccaggaggcagagggtgcagtgagctgagattgtgccactgcactttagcctaggtgacagagcaagactctgtctcaaaaattaaattaaattggccaggcgcagtggttcatgcctgtaatcccagtactttgggaggccaaggcgggcggatcatgaggtcaggagttcgagaccagcctggccaacatggtgaaaccctgtctctgctaaagataaaaaaaaattagttgggtgtggtggcgcatgcctgtaatcccagctactcgggaggctgaggcaagagaatctctggaaaccgggaggcggaggttgcagtgagctacgatcgcaccattgtactccaacctgggcgacaggatgagactccatctcaaaaaaaaaaaatttaattaaataagataaaatgaaatagacatatgagcaattactaaaaagactcagaagtataaaacaccatggctgtagaacttggtatgaggagatgagtctgtaaatgcagtcatgaggggctagataataaagaaagttgtgtatatatcaagctggatagtatggacattatcttgtaagtaggagagtagactgtctagatttctgttttagaatagttctggagaaagaatggaggctgggagtctatgcagaaaggtattataatatttcaacaagatatggtgaggtgttgacctaagtcaatgtctgtgggattaatttcagaaacactggaggtagatttgtgagactttaattcaaacagaagcaccaaaaccccagagtctcaaaagagaattcaaggtaaagaaaatgatggcttcttgattaggctttgaaaaaagaaaatgatgactcttaagtttctggtttgagtaactggataaatgctgttaactgagaattgagcattcaagatttgcagttttctgggttatctgactttggtccttgtcaataatatagtaaaactacagtctgagaacccatttatgtcatcatgttgacccttgattgtcattgaaatcttgacttggatatttatttatttatttatttatttgagatggagtctcactctgttgcccaggctggagtgcaatggcgtgatctcggctcactgcaatctctgcgtccctggttcaagcatttctcctgtctcagcctcctttgtagctgggactacaggcacccgccaccatgcccagctaatttttttgtatctttagtagagacagggtttcaccatgttggccaggttggcctcgaactcctcacctaaggtgatccacccgcctcggcctcccaaactgcttggattacaggtgtgagccaccatgcctggccttgacttggatgtttaataggcatcttaaatacatgtccaaacctgaattcttatttcccccaagcttgctcctcccataatcttcatcattttcctcattagtaaatgacacctccattctttcggtggcttaggctaaaaactttggattcagttttctttttctcacatcctacagccaattctaattctaattggctctgtcttcaaaatatataccacttcttaccacacccactgctctttgctattacaagccactgtcatccttccttgcattctcagtgttttctgcatgtagattttaaagtgagtcagagtatacttaatgacagtgaattgtatacttaaaatggcaatgtttattttaccacacacaaaaatagttttttaaaaaagttcaaatcatgtcaatctttaaaattcttcagtggcttctcaattgagtaaagctaaagcctgcatgattctatgtaatctgtgtccaccaccttcgatgtcatctcttaccacttgcccccttttatctccactgcagtgacagtggcctcaacagactccccaagtagcctactacctgagtgtttgtattaaatatttgctgttccctccaccaggagctcacttctcccctacattttcatgggttaaacttaattttattttcttcaggtctcttcactgaccagtctatgtataaaatgacacctcctttccctgacctgtccctttctttccctctttctctgcttattttgtttgttttgagatagggtcttatcctgtcacccaggctggagtgcagtgacacaatcacagctcactgcagccttgatttctcaagcccaggtgatcctccctcctcagcctcccaagtggctggaaccacaggagcacgccaccacgcctggcagttttttttttttttttgagacggagtctcgctctgtcgcccaggctggaatgcagtggcctgatctctgctcactgcaactccgcctcccgggttcaagctattctcctgcctcagcctcctaagtagctgggattacaggtgtgcaccactgtacctggctaatttttgtatttttagtagaaacggggtttcgccgtgttggccaggctggtcttgaactcgtgacctcaggtgatccgctcacctcggcctcgcaaagtgctgggattacaggcatgagccactgcaccctgccattttttttatttttataaatgcggggtctcactgtgttgcccatgctggtctggaactcctggctcaagcaatcctcctcccttggcttcccaaagtgctggcattacaggcatgagttaccacgcctattctgctttataactgtttttcttcatgtcactcaccaccctctgtcctatttatttatatgttttcttatttttgtttaatgtctaccccttcattagatcccgtgaaacagactataagctccaactatatccttaccacttagaaaaatgtttgccatgtagacagtgcttaataaatatttggtgaataaattaataagatgtcccttgactgattagtactgtttttaaaagacacaaacaatctaatattttatcatttagtaaatagatatgccagcatatctctaagctttctggagttaatacaacagtaaatgttactttattttctattttgaccagatttattttttgtttttaattaattttttatttgaaaaattttcacttatctttgtacttactggcatcttctgtgactatagccatgtatactgcaattgaaacaagaataaagaggaaataagggatatgatttttttttttgagacagaatctcactctgtcacccaggcttgagtgcagtggtttaatcttggcttactgcaacctctgcctcccgggttcaagtaattgtcctgcctcagccttcccagtagctgggactataggtgtgcaccaccacacctggctaatttttgtattttcagtagagacagggttttgccatgttggccaggctactctcaaactcctgacctcaggtgatccacccgcctgggctcccaaagtgctgggattataggcgtgagccactgcctctggccaacaatgtgaatttctgttgccaaagctgaaataaagcatttaaatttataagttttggcaatagaaattcacattgtcagccaggtgcagcggttcacatctgtaatcccagcattttgggaggccgaggcgggcagrtcgcttgaatccaggagttcaagaccagcctgggcaacatggcaaaacctgtatctacataatatacaaaaagttagctgagaatggtggcgcctgcctgtagtctcagctactcgagaggctgaggtgggagggttgcttgagttcaggaggtggaagttgcagcgaggtgacattgtgccactgtactccagcctggtcaacagagcgagaccctgtctcaaaaaaaaaaaaaggaaattcacattgtctcaaatgtttaaatttttcatgttgtaatggcgtgttttacacttggcaatattgataatacaggcatacaggaatctttctttggttatattcatatatacatacatagccaaatcaatatttccatattaatatgcaaagtacaagacatatcattatgatttttcagtatcatcaagtactatgacaaattgttttttcttccctgagacaggatctcactcttgcccagggtggagtatgatggcacagtcataggtcactacagcctcgaactcctaggctccagtgaccctcccacctcagcttcctgaatagctggtactacgggcttgtgccactgcatccagctactttttttttttttcaatagagtcagagtctcgctatgttgcctgggctgttctcaaactcggcctcaaatggatcctcttgcctcagcctcccaaagtgttgggattacaggcagaagccacattgcccaactgtataataattaacatacccttttgggagtggtaaaatgatagttaataatactaccttctaaaaaatgaaatactttgattgctgtccaaaagtgtgtcatttcaccacaataagaaaacttatgctttatttaaacggaatcagactgatccagttctctttttcccccacacaggtagctttggatatgttaaatcctcatgttactttgcctgttttttacccacatcttaagcatggtggtgtatgtgctgtatatgtagtaaagtgagtaatataactgtttttctttgtaatgtaacttttaagtgcacttttgcttaagtatcaaactaaatttttttttttttttttttttttttgagacagarwmwmactctgtcacccaggttggagtgtagtggtatgatctcagctcactgcaacctccacctcccctgttcaagcaattatcctgcctcagcctcccaagtagctggggttacaggcgcccgccaccacgcccggctrattttttctatttttggtagagaaggggtttcaccatgttggccaggctggtcttgaactcctgacttcaggtgatctgctcacctggtctcccaaggtgctgggcttacaggcttgagccaccacgcccagccaaaatattcattttgtaactgaataaagtgtatatggcatcttatacaactgttttaaaatgacaagtcccaagttcatttatattactgtatatttatttagtgttttttttttttaaacttttttcggttttttttttttttttttttttgagacagagtctcgctttgtcacccaggctggggtgcagtgtcatgatctcagctcgctgcaacctccgcctcctgggttcaagtgattctcctgcctcagcctcctgagtagctgggattacaggtatgcgccaccacacccggctaatttttgtattttagtggagacagggtttcaccatgttggccaggctggtctggaactcctgacctcaagtgatctgcccccctcagcctcccaaagtgctgggattacaggcgtgacccacgcccaaccctatattactgtttaaatcattttttacataaatagtaatataagatgcatattttcttctgacaatctggaagaaatgttttaaaagtataatgtgaacagtaatgttaaattatggtctctgtgtttgtttacttagaattttgtgaaggtactttttatgcctcctaacttgcatatttaaaccctctcctgccttaatttaactatggtatttaaatgtgggcaagaggtatagggaacttaaataaatataatgttattattttagtagaaatgtaaatttttcacttttctgaaagcatcacacaggttattgaacttttagatggaattcgcacctgtgaacttgctctttcatgtgaaaagataagcgaggtcattgtcagagattggttggtttgccttgcaaaacagaaaaatggaattttagctcaaaaagtagaatctaaaatcaacacagatgtacaactagattctcaagagaaaattggagttaaaggtgagctgtttcaagaggatgaccatggtgagcttcagttttactttatgcatgcagtaatgaatggagaatgagttcctgagtatactgaccaatagattataaaaatattcctcagcaattttctatagaaaagtgtgatatttattctgttaagatgtataaggcacagaataatgacttttcctgccttttacttaaaactctgatacctttgaagaattgagctttttataatattcatattttacttgtcacaaggagcttggtttgtgaaataatttaaatgtattaaggatgttttatatttagatcactgattattaatgggacctgataggcaaatagctaatattccaaaaagcaacttctaagatgctgctggaattcttgaaagaactgagtttaggtctttgtcatatatacacattatttaggccatgaacaagttttcaagtatcagttgatttatgatataggcttatccatttggttatraaatcatatgtttattacataatcattgacaaatagtttctgtataataactggcagagtagctctaaaacatatgcaaggaaataaataaagaaaaaacttacaataaagagagtaactcatattttaacagttttgtgaaaaaratagaaaatattttatgtagcttatagtacatatatttttttacaacagaagaatcgcattctgattttccrtatggatcatttccctatgttgctagaccagtacactggcaacctggtcatacaggtgagtaatgttttcagaacatattaaatggtgttttttcttttaattaatataatgactttatgtttttcttctcttaaattagcttttcttgtcaagttgaggaaggtcaaaccacaacttaactgagtactccagatgacagtaactgactwgaagatggaaaaatatcaaaatagaactttatattgaaaatcactgcttccatagattggcatttttagctattactatgacttatataacttatacatataattttgaaaataacaactaaaagatgtataacatagcaaaactgcttaaacatcccattttgacacttgtcttgcagttagtttgacattttgtagttaatgattccaaattggtttagttgggccatctcattcttcacttcctgtaaaccactccatagatttgtctttcttcaagaaattagttttctttcctttatttgattgatggtcattgactactgaaataaaatatgcattttaagataaattttatgtatctgtccattttaaatacatcttataatggcttgtatatgtcttaaaaaataataaggaaatctgggctacagtaaataatggggggaaacttaagaatgatataatcaccttaaaaattgtaacaaaagatgtaacaggctcttgaatctcttttatcccctcagaatctttttaaccagcttgaaagaacattagaattattcagtgttactacacaaattaaatgtttgggggctgggcacagtggctcacgcctttgggaggccaaggcaggcagatcacctgaggtcaggagttcgagactagtctggccaacatggcaaaaccttgtctctactaaaaatacaaaaattagctggttgtggtggcgggcacctgtaatcccagctacttgggaagctgaggcaggagaatcgcttaaacctggaaggcgaaggttgcagtgagctgagactgtgccactgcactccagcctgggtgacagggcgagactccatcttaaaaaaaaaatgtttggggaatacattttggaaacatgaattaattacaaatgggacttattattcataggcaccagttatttagcacttaccacataccatacattgttttgaaaactttatatatgtttttcacttactatggacaacttatctttcaggttatccatattttacagataaacagtgacttagaatgattaggtctctgtttaaatatagatgttttataggtttttagttgtgtgtgtgtgtttttttttttgagacagattctcattctgtcacataggctggagtgcagtggcgtgatcatggctcattgcagcctcaatctcccaggatcaagcaagcctcccacctcagcttcccatgtagttggactacaggcacatgccaccacgcccagccaatttttgtggattttttggtagagacggggtttgtcatgttgcccaggctggtctcaaactccgaagctcaagcagtccttctgccttgacctcccaaagtgctgggattataggtgtggagccaccatgcccggcctgttttatgggctgtaaaatagtaatgccttggagggtaaatgctaccattcctagatttatctcttaggctagaagtatttaaaattatacatgtgtgtaaattttttattaaataacatattatagaacgtaggacattttaaagtaaaatctctgcctttttagagtttatagtctatgatagagcttgacattaatcacacagatgtaaaactaaaactgttataaattccccccaaagaagtacaaggtactatgagtaaccataatgggggactttgccctagcaagtgacaattgagctgagaactgaatgctaagtaggaattaactacagcagggaaaatgggaataaaaagtgatgctggggtagagtggaaaagactggatagatagatggggatgaggccatgcaagttctcatatgcccgtgaaggaattggtgtatcctaagaaaaatgggattccattgaagaatttaagtaaggggtgacatgtttagatctgtgttttgaaaatcactctggctgcatttagacaagtgattgaatcaggagcagagtattctggtggtatatttctgtatgtaactagctgaacatttatataataatgatgcctttatagcttttataacatttccagatacagttatacattgcttaacagtggcagtacattctgttaaatgcatagttgggcagtttcatcattgtgtgaacattacatagtgtacttacacaaacctaggtggtatagcctactacacacctaggttatatggtatagcctactacttctagactgcaaacctggataacatgttactgtactaactaccattcgcatttataagacaatggtaagtatgtgtgtatctaaacatagaaaaggtactgtgttgcagtacaggtctatgatgtcagtaggtgataggaatttttcagctccattataatctttccttccatccttcttcttttcttttctttttctttttctttttttttttttgagacagagtcttgctctgttgcccaggctggagtgcagtgacacgatcttggctcactgcaacctccaactcccaggttcaagcaattccccggtctcagcctcccgagtacctgtgattacaggtatgtgccatcacgcccggctaatttttgtatttttttaagagacagggtttcaccatgttagccaggctggtcacaaactcctgaccttaagtgatccatccacctgcctcggcctcccacagttctaggattacaggtgtgagccaccatgcccagccattataatcttaggggaacaccatcctgtatgcagtcccaccttgagtgaaatgtcattatgtggcgcatgactatatagaagctctgaagtgtttgtttgtttgtttgtttgttttgagacagagtctcgctctgttgcccagactggagtgcaatggcatggtcttggctcactgcaacctccacctcctaggttcaagcaattctcctgtcttagcctcccaagtagctgggattacagacacacgctcccacgcctggctaatttttgtatttttagtagagatagggtttcaccatgttggccaggctgatctcaaactcctgacctcaggtgatccacccgactcagccacccaaactgctgggattacaggaatgagccactgcacgtggcctgaagtccattttttaattccatcatggaatactcccttttcttctacccttctatttagctagtaatgaaattatgttattcatttaatgctttgaatgcctattttgtgtcaatccccaattgtctactttgagaaggggctggcttaagagccaagaaaagttctgcccttggctcctgtttcatggagaatacattgtttctgtttggcacatggtgctcagtagatgttgaattgaacaagacctttttaacagtatccattcatttcccctcacttccctttgtgtgtgtgtgtgtgtgtgtgtgtgtgtgtgtgtgtgtgtgtgtgtagttttcttctatttctcttctttttctttggtagttgtccattctagtcaatcaaggcccagcttaagctctttcttcagccttcctccaaacaataagtatgtttacagtctggtttatgggacagataccttctaatgttagccttctatgtctatgtctggctgtcctgtaaactaaagatttgagactgaccgaaaactgtcatcccaatgccttccagaggccctaccttttatacccagtaaatagtcactaaaactttcctgatgtctttaaacctacactggatcatgtttttgtttttgttttttgagatggcatctagctctgtcacccaggctggagtgcagtggtgcagtctcagctcactgcaacctccacctcccaggttcaagcaattctcctgcctcagtctctggagtagctggaattacaggcatgcaccaccaccacgcctggctaatttttctatttttagtagagatggggtttcaccatgttggccaggctggtctcgagctcctgacctcaagtgatctgcccgcttcagcctcccaaagtgctgggattacaggcgtgagccaccatgcccagccaagggtcatgtattgttttatctgttgacttggttgttctagagggaaatttaggtatacatagtatatagttctgcgattgtgggaggctttcattttgaacttcatattttcagaggcagtgggaacttctgaagtttctatggtcatgtaaaaggtattttaagttaatctgttagtggtgtctatgagaatttaactggaggaaaaaactgttaaatcagagctttcatagtaatacatatataaggtgattaatcgtagaaaatgagcagacaggtcgggcgcggtggctcacgcctgtaatcccagcactttgggaggctgagacaggtggatcacctgaggtcaggagttcgagaccagcctgaccaacatggtgaaaccctgtctctactaaaaatacaaaaactagctgggcatggtggagcatgcctgtaatcccagctactgggaaggctgaggcacaagaattgcctgaacccaggagatggaggttgcagtgagctgagatcgcaccattgcactccagcctgggcaacaagcaaaactccatctcaaacaaacaaagaaagaaacaaaatattatgaaagaacaaccagataagctggtaattcattggatgcagagagaaaatttatatatcgagactttttgacttacaatggagttatgtcccaataaactcttgtaacttgaagatatcattaagtcaaaatgcatttgggccaggtgcagtgatttacatctgtaaccccaccactttgggaggccaaggtgggaggattgcttgaggtcaggagtccgagaccagcaccagtctgggcaacataggaagtctctacaaaaaaaaaaagaaaaaaaaaaaaaaagctgggcatggtggcacgtgcctgtagtgccagctactcaggaggctgaggtgggaggatcacttgaacagaggaggttgaggctacagtgagctgtgatcacatcactacactccagcccaggtgacagagcaagatcctggctggtgggggaaaaaagcatttggctgggcacagtagctcactcttgtaatcccagcactttggcagacagaggtggaggattgcttaaggccaggagttcatgaccagcctgggcaatgtgagaccccatctctatttttaaaaaatgtttttattttatttttttcttttttgagatggagtctcactctgttgcccaggctggagtacaggggcatgattttggctcactgcaacctccgcctcccgggttcaagcaattctcctgtctcagcctcccgagtagctgggactacaggcacccgcaccatgcccagctaaattttgtattttcagtagagatggggtttcaccatattggtcaggctgatctcgaactcctgacctcaggtgatccacccgcctcggcctcccaaagtgttgggattacagatgtgagccaccgcgcccagcaaaaaatatttttaaaaagatgcgtttaatacagctaaccaccgaacatcacagcttagcctagcctaccttagtgtgctcagaacgcttacattaggctacaggtgggcaacatcatctggcaatgcggtacactgtcgaaaatcagttgtttactctcatgatttcatggctgcctggaagctgcagctcactgcctctgcccagcatcaagagagaccatgatacagctttccactgaatgtgtatagcaaccataggtaagtcaaggaccagctgtattttcaaacttctgtctgctattcagaaggcccttcccttaattctctgggcaaaacaggactcagtcaatgcccagctaatatcttactttgaaaaaccttcaccaaacctctcaccccacagaattaattctgaaatcttttgtgctcctcaatgttgatcatatacttagcacagcccttatcacattattaacttatatgccctaattataccttcattaagtgtaagaattttaaacctgggtgactagaacagtggtaatgacaaaaataagtaagaaaattcaaagaaggatttatttctgaggaaaaattacttggttttagattatttaacagttgtaatgttacatgcctccctatatgatccagggctaaagcttggcatatttttttttcccttggcttcactctaaaatctcatgggtcctcagataatacataatatatatctatgtttcacatggaccagcccaggcgtcataaagcttacaacagcatacagtaaggagaaacaatagtagtttagttattataaaaatatgttat

SEQ ID NO: 93920 - DNA, 51432 bp, Homo sapiens
  misc_feature (1)...(51432): n = A,T,C or G
cccaaagtgctgggagaattataggcatgagccatcatgcccagcccattttatttttaatatatcatcaattatttcttatacagatccattaggatgttgaatgctcctttaaaactttgttgtatttgtcggccaggcgcggtggctcatgcctgtaatcccagcactttgggaggccgaggcgggccgatcacgaggttaagagatcgaaaccatcctggccaacatggtgaaaccccgtctctactaaaaaaaaaatacaaaaattagctagatgtggtgcgcacctgtagtcccagctcctcgggaggctggggcaggagaatcacttgaacctgggaggtggagattgcagtgatccaagatggcaccattgcactccagcctgggcaacaagggaaactccgtctcaaaaaaaaaaaaactttgttacatttgtctttaaaagtcataaggcctagatcagtcttgtatgtgactagaatgtagctctatgggcagggttttttgtttttttttttttttgagacagggtcttgctatggtgcccaggctggagcacagtggcacaatctcagctcactgcaacctcctgggctcaagccatccttccaccttagcctgcgtagtaggtgggactacaggcatgtgccaccatacctgctaatttttgtagagtggggggttttaccatgttccctaggatggtctccaactcctgagctcaagtgatccgcccacctcagcctcgcaaagtgttgggattacaggcatgagccattgcgcccatgcaggtattttttttctcttttgttcactgattcgtatctccttatcgtagagtggcgcctgccacataggaggcctgcagatacttgcttaatgaatggcaagtgggtgtcaaaaatctctacttgtattactgttttgacaccttgacctgaagaagttaaccacaaataataaaattccagtttttctttatcctcatgtaactgcttttgtctcttatgacaagaatgctgaagtttcaaggagaaaattgatttgagtctgtactgccaaaataaatggtttgtcaaaactctggcccctactttgtaaactattggtaagtttaagaagtcagccaggcacggtggctcacgcctgtaatcccagcagtttgggaggccaaggctggcaggtcacttgagatcaggagttcgagaccagcctggccaacatgggaaaaccctgtctctactaaaagtacaaaaattagccaggcctggtggcacacacctgtaatcccagctactcgggaggctgagtttcttgaaggagcattttgcagctagcacctgacaggcatagtggagaagttgcctgttactgagaacaaacatcgcaagatcctcaggattactttctttcctcccctttctatagtctctattctgttttcttgatcttaatgtcacctttgtagtgagccacctcacatattttaggaaagttgtataatttgtgtaatattttgtctttcagaattcatccagtaagtatgagcacttaaaactaggaatcgaacttggagaggctgttgcctcatctagcacaagtatgtcataggcagtatggagaaagatcaactatcttttcagtaaggaacaaaaaagtctgatacagtggagaaaactattctagacagaaatttaatacagttatgttgttagaatgattgttctatttcttttgttgttgcttttgttttgttttctgagacggggtcttgctctgtcatccaggctggagtgcagtggcgccatcttggctcactgcagcctccacctcctgggtccaagcaggtctcccacctcagcctctcgagtagctgggataacaggagcgtgccactgcgcccggctaatttttgcatttttagtagagacggggtttcacctgatctcaggtgatccacccacttcggcctcccaaagtgtgctgagattacaggcatgagccaccgtgcccggccaattgttctatttttgatacttctcagagcttttaatctctttaacttaaaagaacagtcacccaggctgaatacgtggtctcagtgcagaattacacgaaagaaatnnnnnnnnnnnnnnnnnnnnnnnnnnnnnnnnnnnnnnnnnnnnnnnnnnnnnnnnnnnnnnnnnnnnnnnnnnnnnnnnnnnnnnnnnnnnnacttagggaggccgaggcgggcggatcacaaggtcaggagatggagaccatcctgactaacacggtgaaacctcgtttctactaaaaatacaaaaaattagccgggtgtggtggcgggcacctgtagtcccagctactcgggaggctgaggtagaatggcgtgaacccgggaggcggggcttgcagtgagccgatatcgcgccactgcactcctgcctgggtgacagaacgagactccgtctcaaaaaaaaaaaaaaaaaaaaatcatctagtcacagaaaacctgaaaataagttgacaagatgtaaactaatgggaactcttaaaattggtaacactgcttggaaaatgaatttagcatttataaccttttaaaactgaacatgtgcatgccctacaacccatcaatttcactttaaagcatttatggaaaaagtgcaccatggtgcattaacaagcaaagtagtcaaaatacttgattttaagtcgtagacattcaccaatcagaccaccagttaatcggaacttgaaccagctgtaaacaatatggccttgcagaggcgttccccatggcattcacagtagcaaaaggatccaaatgcccaaaaaaatgacccaaatgcccattgacaggagcattggtatattatggtatatttctagaacagaaagcaacaatgaaaatgattcacagtgttatgcattagcatggctaaatctatgaggaatactgaggttgaatagttcacaaataaaacttgtgttttaggatacgcaaagaaaagagaatgggaaacagtcgcctcctggggatcataatgggagaaggaggagcatacagaatctcaacagtattgttgatgtcctgtctcttggatgttaggttcatgtgttttggtaggcggtggcttcacaagtttttattatgtctcagcctccatatatgctacatgtattgttttgtacatttttaaagtatgtatatgatccgattcatatataattgtatctgtatacacaaacatttttattttaaaaagctggttaataagattacataaatgataatttcagaaaatgctacaggaattcaagcatggcacacagcctgcacttactaagcactcaaatgatgatgagctgattaatttaagctgggtctcaaaggatggataccagacagaaattttaaatgagagtgatgaagagagcacactacagtaatatgcaaggtcaaagaagtgggaaagttcaaaacaagtatgagtgtttctctcattcttactggataataggagatacatttaggaaaggagagttaggaaattagaatggggacaacctggaggcactgcaggacacagtgcaggagatgatcaagttatggacaatcaatgcttttttagtggggaaaagccatgcctagagacaaaggaataaattgttcagttaagtgttttgagttctcatccaatcccaggtcaaatgaaaagaggcaagaaggaagctaacaacacctactgtggaccagtgcactgctagtttgctcgctatcaaattcgccccagacgcttttacagagtaggtggtatcaccctacttttacatttaatgagaggtgccagggttaaatgatttgaccacgttcatacagctagtaaaatggtagtacctgaattcaaaccaagtgtatatgattctaaagtatattcacttttctccacacaccaacatagtttaaaaaacaaaacaaactcaggaatgagaacactcaagaaggcttagttggtagtaaccctttacttgaagtcaaaacttaagcaataagctgcttccctgatagcttaatgaatatttatgtgtatttgctggcttttatatgcaaattttacatgtttcctttgtaaagattttgggatcctaaagaaccttctcataactgtactttgtgcgttatacagccacttgcatttccttcatggcacaactcactgtgccttgtattttagttgtgtccatatctgtctagcttggaagctctagaaaggtaaggccatgttgtcttcatcattgtggtacttgccatgcctctgtatttttcatgtagcggacattaattgttcagtaaatattttatactcgaggctggaaattaatcatcacaacaccggtaccttgcaaaaacaaggggaagagcagagagaagtcaggaaggatccttagggaaaagctagaggaatgaagcttgaagcagccattttcctcaagattttcacaaccagttgatgcttcttggcccattctcccatttataggccagggagaaagagtcaaaggcatgtgtaaggaaaaataagttcccagttggccccctcctcgtacttgtaggtgaatttgtcattattgtgctgtgtgtggaagcacaagaaggaaggaattaactcgttcttcagaactgctgattgaggagctatttgctggaagtaccacaagtaggcagagccaggttgccttttaagagtaatcattttattagccaaaaaatctggaagcaatccaaatattgaaatgacttaaatggtccatccactctggaatattacgcagtcattgaaaacgtttcgaaagactagcaacatgaaaaaagccgtgatatggagaccaaaaaaaaaaaaaaaagatttacactgggtgtggtggcttaggattgtaatcccagtgggaggattgcctgagttcagttcaaggccagcctgggccacataggactctgctctacaaggcatgtttaaaaattaggcgggcgtggcggcacctgtggtcccagctacttaggaggctgaggcgggagaactgcttgaacccgggaggcagaggtatgcagtgagccgagatcgtgccactgctccagcctgggcgacagagcgggactcagtctcaaaaagaaagaaaaagccggttataccttaggagggacataaggaaaggatgggatcaaaaagctgtttagaattctttttatttgttcattcaacatgcatgtattaagcacccacgtagtcaaaggctaggacaaagccaaaaagattactgctgcagattcacagttacaatagaatggccccttctcacaagaagccaccgtattcacacgttgtgcttttctcagttcaagcggcctcttccttttgagtaaccagggtaaccacgctgtgcccgcgtgtgccgggcggggaggggaggccgcagccccagccccgggggcctggttgtctaatcgaagggaagtaaacggccccaacgcaagcctgactgcgagacgtgcccaagggaggtaggtcgaatgaagagggttgtgtgagttttgcgcgggcaggcgnnnnnnnnnnnnnnnnnnnnnnnnnnnnnnnnnnnnnnnnnnnnnnnnnnnnnnnnnnnnnnnnnnnnnnnnnnnnnnnnnnnnnnnnnnnnnnnnnnnnnnnnnnnnnnnnnnnnnnnnnnnnnnnnnnnnnnnnnnnnnnnnnnnnnnnnnnnnnnnnnnnnnnnnnnnnnnnnnnnnnnnnnnnnnnnnnnnnnnnnnnnnnnnnnnnnnnnnnnnnnnnnnnnnnnnnnnnnnnnnnnnnnnnnnnnnnnnnnnnnnnnnnnnnnnnnnnnnnnnnnnnnnnnnnnnnnnnnnnnnnnnnnnnnnnnnnnnnnnnnnnnnnnnnnnnnnnnnnnnnnnnnnnnnnnnnnnnnnnnnnnnnnnnnnnnnnnnnnnnnnnnnnnnnnnnnnnnnnnnccctcagctgccttcgcggcgacgacacacgcgctccccgcagcgggctctgggctgagggacctggcgagggaggcagtggccgcgcaggttggggctttggccgccctccgcccggcggcgtagcgggtgaaggttccaggggaaggacgggcagggccgataccggaggctgctcccgaagctcggccgtctgctcggagggagggccctgggcaggcgctcccgtctccacgtgtgcctgccgcctttattgtgggaggaatggagatttggggggtctttttgataaatcctacctccttatgtcccattaaacacctctttttgtccccaagatcgtctgccccagaattttgagatctgagctgctgtgtctcagtaccaggcccgtagctcatttctcagaattcacgaagattctcttacatgacatccagtaggactggagggcccctagcctcaatcttttaaaaagccttatgccgagttgggcgaatccttgaggccaggattcgagagcagcccacagcgaaaaccccgtctctacaaaaaaataatgaaaaaaaaaattaaccgggcatggtggtgcgcacttgtaatcccagctacttgggaggctgaggcgggagaatcgcttgaaccctggaagcggaggttgcagtgagctaaaacccgtctctacaaaaaataacttaaaaaaaaagtatcctggcatggtggcgggcgcctgtaatcccagctcctcgggaggctgaggcgggagaatcgcttgaacccgggaggcagaggtggcagtgatccgagatcgccttatagctggggttagctggttttgttttcttggcaaggtgacgataagtaatactggagtgcttactatgtgtcaagtgttttacacatgattttatttaatatttaaaactgatttactggttaaagaatatgggactttgatgtcagttctgcattcaaattctagctttatcacttactatgagcctttgggaaatttcttaacttctttaagcctcaaatttcttatctagaaaataaggataaaataatacctaccacacagagatgttttgagaattaaatgagataatgcatgtaacacattcatcagtgtctggcacatattctctgtgtgtgactgcattcataaggaagttaaggcttacttgcctgtcctgactgagttgccaatggatattgctattaggtttttcatataggcaaatgaatccccagacaacttctgcttgtttcatattatggctgggaaccaccaccctttatatcaccccccagagaagaggttatttcagatgcctctagaatttttgtgatttacttaccaaaaaaaaaagaaagaaagaaagaaagaaaatcccaaacatcctattcaagtatgaatcctggtatgatttttttaatgttcatggagtccatataaaaattcactgaaggaggccgagcatggtgtctcacgcctgtaatcccagcgctttgggaggccgaggcgggccgatcacctcaggtcaggagttggagaccagcctggccaacatggcgaaaccccatctctactgaaaatacgaaaattagcggggcgtggtggcaggctcctgtaatcccaactactcaggaggctgaggctggagaatcgcttgaacccaggaggcggaggttgcagtgagccgagatcgagccattgcactccagcctgggcgacaagagcgaaactccgtctcaaaaaaaaaaaaaaaaaaaaaattaaaggattttacctgatgagcacagtttctcctacttctccttctttccctatctcttgcagttcctaaaatggctcatatttttaatttggttttcgttcytttcctcttgcttgctctataagaactctcattctcttagtatatctaagtgaagagcaaaattaaaagatacccttaggtagaaattgaccaagactagcattgatagcttctctccttcagcttgttgtatgtaccttttctgccagtgtttgcttattaaagacaatgaagctccacttggggaatttcagacattttcttctcattcagttttctgaaattgtatgggaaatatcccaacacatacataagggtttagaggaatagtgtaaagacgcctactgtggatatattttacctttttgattgatagaaaatttgcattatattttatgatatatccatggttgttttaatataaaagcactattttaggttacttagcattgagtaaaacttatcttctggaatatgtgccacagttattttgtgttctggtacattccacccaagtctagccccaacactcaaatttgaagcagaattcttagccacggtactataccactgataactccatactagaatttgagaatcctgagtactctttagtttcttctatctagattttttttttttttttgagacggagtcttgctctgttgcccaggctggagtgcagtggcatgatctcggctcactgcaacctccgcctcccgggttcaagcaattctcctgtctcagcctccccagtagctgggactacaggcgcctgccaccatgcccagctaatttttgtatttttagtagagacggggtttcaccatgtcggtcaggctggtctcaaactcctgacctcaggtgatccgcccacctcagcctcccaaagtgctgggattacaggcatgagccactgcgcccggctcttctatctagatttaaggctgctcttactttgaaaaaaatatgcagatgaggcctccagctgtctcccagatgaggtgggcaggaaagagcagaacgttcttactcaagtctcaaggctcaatttatcacctactcctctttctatggagtttataacccgcaccccaagtacataattgccttcaatttggcaggactttaggatctaggaagaaagatgggatgagaggagcaattagataagtatattcctctgcctagttcttcaaaatgtagccctgygctatctaatatggtagccactggccacttgtgtctattaaacacttgaaactgaataatttaatttttactttaaaaactgaaggagcatatttttctcctacaaattacttcatttttaaaaataggactgcatttcacttttactgttgaaaaattagtatcagaacagatttgtatataagcatattcatctaaagtaacaaaaaaaagaaaaaaagattgagatatgctgtaagaggaaaatacgcagcagatttcaaagacttagaatgtgaactatctcactgatttttatattgattacatgttaaaatggccttttggacatattgggttacataaactttattattaaaagtaattttatctgttttgttttgtaaggtggctctaaaaatacaaaattacatatgtggcttacattatattggacagtgctgttctaacctcgctaaatccaatcttattttccagtccttccttcagaagggaaatttctgagggtcaggaaggggaatctgtacctcactccttgaacaccaaggaaggtatggctgcctgagtcactgtgaggttgcattcagaggttctcagtagggtcctagagtagtttcctgtgttgcctattcatacctcaatttcccattatcctagaaatatttgaccacaaaaataatactaagtgtagtaattatgtgaactaatcaccaccaaagaaggtgatgattatgtatattggtaaatattgatagattaactgtctcagattttattagattatgacaacatacattcatatacacttataatcagtcactcaaatagctttgtcatacacttacaactttaaaaattagaacaggccaggcatgatggctcaagcccataattcccacactttgggaagctgaggcgagaggatggcttaagctcagcagtttgagagcagcctgggcaacatagtgagacctcatctctacaaaaatttaaaaaataagccagatgtggtggcatacacctgtggtcccaactacaagggaagctaaggaaggaggatcacttgagtccaggaggtcgaggctgcagtgagccgtaatcatgccaacgtactccagtctgggtgacagagcaagaccctgtctgaaacacacacacacacacacacacacacacacacacacacacacacgagaaaaaaaggaaaacagaaaagtaagtaaaataaaaattagaccaatttatgaaaagccttcaaagcacatctacattttttgctagaattgctttcaacttttcaataaataccaataaatgcttattgaataagtgaattttataatatatcaaggaatttaccaataaagagatatggggttttgtgggagggggggtgctttgtaatttaatacttgataatacattctggaaatagttgtccttgtttataaaaaatttgaggtggcatataacaacaatataataaaattatgtcaattcaagcagaatagaaaaaattagaaaattagccggaaaaaagaagactacaaataaattatgaagtcagcatcatttctataattaactttcaaatttggtcgagttctgcagccaaagcaaaatggcatacagtatcttcttatttgggaagaggatgtccgtttgttacccaaaagaagcatagcttttcctagcgctgaatttcaaaagcaatttttaatgggagtcactgtcacaaataacattttaatggcaagtttagtaacattttatatgactgcatatggtagtatcatccagttagttgtttatatatgaaatgaatgtgtgtgatgaataattgtatgttttatttttacaggaatattgggaaaccaaaatgaggcacaatcagatgtgttgtgagacaccacctactgtcactgtttatgtaaaatcagggtcaaatagatcacatcagcctaaaaagcccattactctgaagcgtcctatttgtaaagataattggcaagcatttgaaaaaaatacacataataacaacaaatctaaacgccccaaaggaccttgtctggttatacagcgtcaggatatgactgctttctttaaattatttggtaggtttaaaatattgtaatagtggtaattataaagtactaaaaacctagaatgtaaacatctaaatgtttttattctgatcaaagaggatatcattatttttgtattaaatttcccatctccaaccaaatttgtttttgttttacttagtctttttttttcaatgttgggtttttgtttgttttgtttccttatggattaaaaattcatactcatctagcttctagactacttaaatccagatgtcaaatgtaaattctgggcaattcaacttcatagcccatggcatgagttttatttgacctaaaataaaatactacataaagactcaggtgagctaactgacccagtttgactgggcctaaggggtttcccaggactttctctgctaaacccaagaaaactaggaagcttggtcacactagagaagtttcaggataacagtttgggaacattgttaaaaattaactatgctttatcatgtccatataatgaaactgagtttgaatttgtttaggttatgagacagtgctactttgctgataatttcttaacattggcaaaaagaaacttctttatagtactgtactcctaactaggaaagagagggaatttttttttttgaggtagggtaataaggtaaacagattagaaaaaggggtaggatagatgagttctgaaaaatatttggagtaatgaatcaagtcaagtagatgctacagtctggtagattgtagcttgcttgtttctagaggaaggtcaggcgcattaaagcaagctagttacgatttaaagaaaagcaaaatgaaaagatgaaacaggaaaaaatgtaaggaatataagtagaaaaagatataaagatgcttccccatcagatttagaatgttaataaaagttccccttcttttcattaagagcagaacaaaattattacctgcaaacttttttagtacccaaaactcatcatcagaaacacgggaaaatacctggctgtaccattttaggtaacttaagaaattataaatagagcctgggcgcggtggctcacgcctgtaatcccagcactttgagaggccaaggcaggcagatcagctgaggtcaggagttcaagaccagcctgaccaacatggagaaaccctgtctctactaaaaatataaaattagccgggtgtggtggcacatgcctgtaatcccagctacttgggaggctgaggcaggagaatcgcttcaacccgggaggtggaggttgcggtgagccgagatcgcaccattgcactccagcctgggcaacaagagtgaaactgtctcaaaaaaaaagaaagaactataaatagaattaatgggccaggcgcagtggctcattcctgtaatcccagcactttaggaggctgaagggggcggaccacttgaggccaggagttcgagaccagcctggccaacatggtgaaaccccatcaggcgtggtggtgcatgcctgtaatcccagctacttgggaggcggaggcaggagaatcgcttgaacctgggaggtggaggctacagttgagccgagatcatgccactgcactccagcctgggtgacagagcaagactctgtctcaaaaaaaaaaaaaaaaaaaaaaaaaaggctggatatggtggctcatgcctgtaatcctagcactttgggaggccaaggcaagtggatcgcttgagctcaagagttcaagaccagcctggggcaacgtggtgaaaccccctctctacaatacaaaaaaaaaaaaaatttatctgggcatggtggtgcatacctgtagtcccagctatctggggggctgaggtgggaggatctcaaacccaggaggttgaggctacagttgagccaagatcacgccactgcactccagcctgggtgacaaagtgagaccctgtttaaaaaaaggaaaaaaagttagcaaggcagaaattcttattctcaggaaatcagtagttattcttggaactttccgtatgactacattgatgatattttagtgtacacaaatgaatataaagaagttatgcctttttacttaaaatgaagaagaggagcctggcgtggtggcatatgcacctgtagttccaggtactcaggagtctgaagccagaggatcacttgagcccagaagttcaaggcccacctgggcaacatagtgaggccctgtctctttaaaaaaaaaaaaaaaaaaaaagagaaagagagaaagggggaatggaaaaacagatttttctagattacattctgacaactattaatgtattttgagattatatattttagccctttagaattgaaatattttacctactttctagatgttattatttttaacaatgtgtttgtttgttgatctttttatcctaatagttttttcaaaatgttaattataaataatgaattatgaatcctttttatatagacattttcatatgtatttgagtaatagaaagtggaatagagataaataggagagaagaatgcaaaactaaaaatactgttggatattcagtaaaccaaacacttctaccattctccaatctgagccatatgttaaggcaaatcagatggcttgatgaaggataaagcagtagtttttcgtacagtctttgcaatggtaaatacaccaaagaactgaaaactccaccttaggcaacactggttcattcatttttgttttatttctaagcaccatgtataatctcttgacatagaaattaattcttcaaaaggaaacattctgyttttaaaagacaagttatagctatcttttgttgtagatgacgatttaattcaagatttcttgtggatggactgctgctgtaaaattgcagacaaggtaaatttggtaacagtataacaattaaccagcattataatgtaactgaaccattagagctttaatgagaccttataagaattttctatcttattagttatgattaagaaaagagctagtggccaggtgcagtggctcacacctgtaatcccaaaactttgggaggctgaggtgggtggatcacttgaagccaggagttggagaccagcctgggcaacatagtgagacccccatctctaaaaaatttaaaaattagccaagtgtggtggcatgcacctgtagttccagccacccagctgaggtgggaggatcacttgaacccagaagttggaggatacagtgagctttgatcaattgtgccactgcattccagcttggacaatagagcaagactctgtctctaaacaaattaattaaatttaaaaattaaaaaaataagagctagcctgcactgctccttcaaagcagaagctttacacatgaatttctggaattagcatatagcatagattcagtctatacttaaggaattgtagaatattattgattacatttaaatgaccttaaatttgtatttgattgaaaacagaaatcaaaacaggtgtggcagctcatgcctgtaatcccaacactgtggaaggccaaggcgagaggatcacttaagcccaggagttccaagaccagccttggcaacatagggagacctggtctcttaaaaaaaaaaaaaaaaaaaaaaaaaaaatatatatatatatatatatatattttatcctgaggcaggaggattgcttgagccagggaggtcaaggctgcagtgagctgtggtaccaccactgcactccagcctgggtgacagagccagaccctgtctcaaaaacgaacaaaaaccaaagaaccacaaacagaaaatcagtatagacttaatacattttgatcagttattaccttttatcaggctgtggagaaaaaatattctgagatttactttactaaggtagtctgcattttagtattttgtaagtcagagaaaacaaatctcagtaatttgtagggtaaaattagtttaacatgttgtttaggaatcagtgtttcataaaagaatgtctgacttacacactgggagcagcgatgtttctatattctttagattttgttgaatggttaaaatttcagctttgtcgctcatacctgtgatcctagcgcttggsatgctgaggcgggcagatcacctgaagtcaggagttcaagaccagcctggccaacatggagaaaccctgtctctactaaaaatacaaaaattagccaggtgtggtggtgcgcacccatagtcccagctactcgggaggctgagacaggagaattgcttgatcccagaaggcagaggttgcagtgagccgagaccgagccactgcactccagcctgggcgacagatcgagactctgtctcaaaaaaataataataataaaataaaatttcagctttgtatttttcaatttttttcttttagaaaaatatttctcgtgctaagaattttcagctttgtaaatgccattttgtaccaagcagtcatatttgaaaattaagcgtgactttacatcactactagccaacagtaaagggaatgagtggaaggttagcttgtgattaaatacaaagtactggggtgaagatttttatttaagcttaagatgacagggatacactagaagaaggtttataaaattttttaaatttcattttggaaaatttaaaacatacacaatttgaagtaaatagaatagaacaaagagcctccatatgcatctcatctagctacaatagatcaactgtggctgttcttgtttcttctaatgcctctcaccaaaaacgattattttgaagctgatcccagacatcctaacattttatccataaatatttcacaatatatcactaaaagttaagagctgttttaaaacaattacaatgtcatagaacttttaaaattaacagtaatgctgtaatatcaaatatacaattcatgtggagttatgatgtgattttttttttttctttttcttttttttttttttttttttgagatggagtctcactctgtcatccaggctggagtgcagtggcgtgatctcagctcactgcaacctccrcctcccgggttcaagcaattctcctgcctcagcctcccaaatgtctgggattacaggcatgtgccaccacgcccggctaatttttctgtatttttagtagagatgggggttttaccatattggccagcctggtcttgaactcctgaccttgtgatccacccgcctcgacctcccaaagtgctgggattacaggtgtgagccactgcgcccgtcaggaagttttaaactttatggttttaaggtgcagtaaagttgttgtgcagaagggggcagtgttggaaaagtaactacctggagtactgtcttaacacgatctcaagagtactttactggaagttactgtgaaaacttggtatcacctttgtggcaaatcctgttacaataggatgaataaatgtcttacgagagataatctgatacattattataacttgtttttaatttgaacagacagaacctggcatatgtgctaataatcaggctagagatgtatctttctaataatacatttaaaacacattctccccatgaaaatacagccatgttattctaatttctgaagtcatttggaaatcattttaaaaagttattttaaaaagtgagtatggatgtctgtaactaaaagggtttagaaaaattatatatacacatacatacacacaaatagagatagcaaacatggcaaatttggtgcatctaagtgaggatgcatggctgttcattttgctgttatttcagtttctgtataggtttgaaatttaaattagataaaagtgggattttagctcaaactattggcaataataaaatttaggagtccattctagtttataatgatataataaatagtcaagaattacttttcactgttcacatggtggattacaggaatccaaaaattaagtacacaattctataataagtaacactttattgttttagcttattcatcagaaaattttaaagttaactattttaaagcagttttatttatgaaagcaaaacattaatattaatttttaacttttttccttatagtatcttttggctatgacctttgtttatttcaagagggctaaatttactataagtgagcataccaggataaatttctttattgctctgtaagtatactttctactaagtgattgttgtgttatctattatatayattacaccttatttaaaacagaggctatttaaaaccttatgtatatctttgaataggccttcctgtataaatgctgtatgttttttactttaataggatatttttatgtttttttcacttatcatgctatatgcctaagatttcctttttatttatttatttatttttgagaannnnnnnnnnnnnnnnnnnnnnnnnnnnnnnnnnnnnnnnnnnnnnnnnnnnnnnnnnnnnnnnnnnnnnnnnnnnnnnnnnnnnnnnnnnnnnnnnnnnnnnnnnnnnnnnnnnnnnnnnnnnnnnnnnnnnnnnnnnnnnnnnnnnnnnnnnnnnnnnnnnnnnnnnnnnnnnnnnnnnnnnnnnnnnnnnnnnnnnnnnnnnnnnnnnnnnnnnnnnnnnnnnnnnnnnnnnnnnnnnnnnnnnnnnnnnnnnnnnnnnnnnnnnnnnnnnnnnnnnnnnnnnnnnnnnnnnnnnnnnnnnnnnnnnnnnnnnnnnnnnnnnnnnnnnnnnnnnnnnnnnnnnnnnnnnnnnnnnnnnnnnnnnnnnnnnnnnnnnnnnnnnnnnnnnnnnnnnnnnnnnnnnnnnnnnnnnnnnnnnnnnnnnnnnnnnnnnnnnnnnnnnnnnnnnnnnnnnnnnnnnnnnnnnnnnnnnnnnnnnnnnnnnnnnnnnnnnnnnnnnnnnnnnnnnnnnnnnnnnnnnnnnnnnnnnnnnnnnnnnnnnnnnnnnnnnnnnnnnnnnnnnnnnnnnnnnnnnnnnnnnnnnnnnnnnnnnnnnnnnnnnnnnnnnnnnnnnnnnnnnnnnnnnnnnnnnnnnnnnnnnnnnnnnnnnnnnnnnnnnnnnnnnnnnnnnnnnnnnnnnnnnnnnnnnnnnnnnnnnnnnnnnnnnnnnnnnnnnnnnnnnnnnnnnnnnnnnnnnnnnnnnnnnnnnnnnnnnnnnnnnnnnnnnnnnnnnnnnnnnnnnnnnnnnnnnnnnnnnnnnnnnnnnnnnnnnnnnnnnnnnnnnnnnnnnnnnnnnnnnnnnnnnnnnnnnnnnnnnnnnnnnnnnnnnnnnnnnnnnnnnnnnnnnnnnnnnnnnnnnnnnnnnnnnnnnnnnnnnnnnnnnnnnnnnnnnnnnnnnnnnnnnnnnnnnnnnnnnnnnnnnnnnnnnnnnnnnnnnnnnnnnnnnnnnnnnnnnnnnnnnnnnnnnnnnnnnnnnnnnnnnnnnnnnnnnnnnnnnnnnnnnnnnnnnnnnnnnnnnnnnnnnnnnnnnnnnnnnnnnnnnnnnnnnnnnnnnnnnnnnnnnnnnnnnnnnnnnnnnnnnnnnnnnnnnnnnnnnnnnnnnnnnnnnnnnnnnnnnnnnnnnnnnnnnnnnnnnnnnnnnnnnnnnnnnnnnnnnnnnnnnnnnnnnnnnnnnnnnnnnnnnnnnnnnnnnnnnnnnnnnnnnnnnnnnnnnnnnnnnnnnnnnnnnnnnnnnnnnnnnnnnnnnnnnnnnnnnnnnnnnnnnnnnnnnnnnnnnnnnnnnnnnnnnnnnnnnnnnnnnnnnnnnnnnnnnnnnnnnnnnnnnnnnnnnnnnnnnnnnnnnnnnnnnnnnnnnnnnnnnnnnnnnnnnnnnnnnnaaaaaaacaaaaaaaaaaaacaggactagaagaaactgatttcttttttctttttcttttctttctttcttttttttttctttctttttttttttgtgacagagtctctctctgttgcccaggctggagtgcagtggcattatctcagcttgctgcaacctccacctcccaggttcaagcaattctcctgcctcagcctcctgaatagctggaactacaggcgcatgccaccacgcccggctaatttttttttgtatttttagtagagatggggtttcactgtgttagccaggatggtcttgatctcctgacctcatgatacacctgcttcggcctcccaaagtgctaggattacaggcgtgagccaccgcgcccagccaaagaaactgatttctacttgtattcaggagatatattttccagtgcacagggaaaaatgaactcaaaatttaggatgattgctaaatataatagtattaggtaatactgagtactatgtgcaaggcaccacaaaaaattttaatgtagtattaactcatttaattttccctatgaaataaattttttattatccccattttacagatgaggaaactgagaggaagattaagtactttctaagaacaaacaagttagtaagcagcaaagcaggggcacaaactcaggagtggttatcaatgaccaaattcagccatcaaccactaagttaaattgctgtttatatatctcagtattgtattgtatctatgttgatgcaatatttattttgtgttttttttttacctgagaattaaaaacaaaccaaaagaagctttagtttaaatcttactagatgcctgaaattgaattcgtttaacttgttttataaagttattaccagtagagcactattgagtttatgcaatacaattatctgtaaggttgtactgcatgttgtattatgtaagctccatattaaaaataacatgaattataatttccattttaagactaatcatactttttgtatggcctcaatagttctcctcgttaaatattttctcagccatagttctaaagctcaagttcttttcctttctatacagtcttataatgtttcctttctatgtattcttataagactctgaacttctattatcattcttccacattacctttcacaattatttgtttcatgcttacttgccttctttacttaattgtaggctccttatgggcaaggaacatataacattttatttcatctttcaattactaacatataggaggttcttaattttttttttgagacagggtctcactctgtcacccaggctggagtgcagcagcatgatcttggctcactgcaacctctacctctagggttaaagtgatcttcttgcctcagcctcctgagtagctgggaccacaggcacatagcacsacacccggctaattttttattttttatttttttttaaagatggagttttgccatgttgcccagactggtctcaaactcctgacttcaagccatccttcccaaagtgctggaattacaggcatgagctgcacacctggccttctggctgcttttaagacctctttttctttggtgtttggcactggtttctttttaataacttacttgggatttggtaacctttctgaagattaaggattgatgtttttcgtttttgttttttgagatggagtcttgctctgtcacccaggctggagtgcattggcaccatcttggctcactgcaacctctgccacccaggtttaagcaatccttccacctcaatctcccaagtagctgggactacaggcacagaccaccatgcctggttaacttttgtatttttagtagagacagggtttcaccatattggccaagctggcctcaaactcctgacctcaggtaatccacccgcctaagcctcccaaagtactgggattacagacgtgagccactgagcctggcctgaagattgatgcctttcaacagacaactcagaaaattctatccactgtctcttcaaatatttctcttcctctgctatctcctttttctccttttgaaaccaattaaacttgttatgcctcgctcggtcttccccatcacttatctttgaaattttctttttctttctttctctcttttttttttttttttttttttttttgagacagtctaactgttgcccaggctggagtgcagtggtgtgatctcagctcactgcgatctccacctccctggatcaagggatcctcccacctcaatctcccgaatagctgggaccacaggcattcaccacaacacccagctaatttttgtatttttttgtagagatggggtttctccatgttgcccaggctgggtttcgaactcctcagctcaagcactccacctgcctcagccttytaaagtgttgggattacaggtgtgagccactggacccatccccatctttgctattttcttttttcttttctttcttttttttttttttttttttaagaaggagtctcgctctgtcgcccaagctggagtgctcagctcactgcaagctccgcctccgggttcacgccattctcctgcctcagcctcccgagtagctgggactactggcgcccgccaccacgcctggctaatttgtttgtattttttagtagagacggggtttcaccgtgttagccaggatggtctcaatctcctgacytcgtgatccacccgcctcagcctcccaaagtgctgggattacaggcgtgagccaccgagccgggccaatctttgctattttctatctgtgtttctttgggctgcattttagatcatttatttagacttatctctcagttcactaattttatcttcagcttatgtctaatatgctaatttcattataaaattttccatttataaaagttctattttcttctttttcaaatatacttttccatgtatcgtattatctttactggaaatagttattcttacgttctgtgtctgttccattactttcagatttcagggtctgttactgttcttggtaccttgttcccttatgtgttttgtaatatttttattgtaagttgcctgtttttcttggaaagtcatctgtgagacttgtactatttccaatgagaaatctaccccatcctaatcatggtgcctgtgttatctaatggtttttttttctctgagtacttttaagatttactctttatcactggttttgagcaatttgattgtggtgttcactggtttaattttcttcatgtttcatgtgctttgaggttcattgaacttctttgtaggtttatagtttttattaaatttcaaaaactttcagctgttactccttcaaatgtcttctgtccacctcattttctgtctgccctattcagattacagtgcattgaaagaatccttcattgttattgatactggccttcagagtctccaattccgcctgtttcttgaagtcccacatcaaactgatgctgtgtttattttttcttatttttttcttttttcttttttctttttgagacagagtctccccgtcacccaggctggagtgcagtgttgcaatctcggtggctcactgtaacctctgccttccgggttcaagcgattctcctgcctcagcctcccaagtagctgggattacaggcgcaggccaccacgcccagctaatgtttgtatttttaggagagatggggtttcactgtgttggccaggcagatcttgaactcctggcctcaagcaatccgcccaccttggcctcccaaagttctgagattacaggagtgagccaccacgcccggccctcatcttgtgtttatgatttttgtttcttttttctctgtgtatttcatcttgaatactttctattgtgtcttcaattcacagatgttttctctgtaatatttaatctgccattaatcccaatcagtgtatttttcattgtacacattgtagttttcatctctaaaagtacattttcaatatgtctacttaactttttgaacatacagaatagttataactgttccagtgtccttatcttttatgtcaaccatgggtatcagtttggggttgattttgattagtcgccttatgatgagtcatgttttcctgcttctgtgcatgcctggtccccatcaagcattcagcagaatgctgagtttcatatgtgtataagaaaattacctgaatctgaggaaagatgttaagaaaagattaggaggaatactgcctaacattcacatacggctgcaaatagtggctgttcccaccagccaggctgaaaagattcataattcatggagcattgagaagagtactcaggaaggtcttgcctcagtagtgaggaataactagccccagactgaacattgttccagatccacctaaaaaaatcataaaagcaacatctgaaagaatcagactatttcaaagtaactaactgcatcccagaacaaagctcaagatttgtaggaataagaaatacctagaacccaacaaggtaaaattaactacatgtatctctatttttgaactgcatttctttaattaacgttgaacacctttcatgtgtttataaaccacttttatgtcttggtgtatgtgaactacctgtttctgtcctttacccatttcttttttgggttgtgatcttctttgttaggtatctggctaatacagttgaagaagatgaagaagaaaccaagtacgaaatttttccatgggctttagggaaaaactggagaaaattgttccctaatttcttaaagttaagggaccagctctgggatagaattgactatagggctattgtaagcaggcgatgttgtgaggaggtaagaattttaaaatgctttatatatgtaatctttgttttctgtttatcttattatccttgttttttaacgtgcttctaatgttttggtattctgggtttttttttttttttctaatatgtggagtagaccattgatcattaccatgaatacaacttgtgtattacaatgttgctgtcttattatcaccataactaaaaactgtcaaccgggcaagccctgctcacgcctgtaatcccagcactttgagaggctgaggcgggtggatctcctgaggtcaggagtttgagaccagcctggccaacatggtgaaaccccatttctactgaaaatacaaaaattaggctgggtgcggtgtctacattctgatgggagtgatccaataaaataaaaaatgtgaaatgctggaaaggggacaattactggaatgtgatgtccttgagaaagcacgaaaagatgagatctagcgcacaagtatagggaatggatttggataggagcaaagatcgttctttcacagtaacaaagggaaggcagaatataggggtacgcatgtaggtaggatagacgataagatgtgagcacgtggacagtctgttctactgcttctcttttctcagtaaaagagagtaatgcatgattgttgtaattgaagtgtgaggacagagatgggagatattagaagtgtactagattttttacttcattacatttacaggttattgtttagacaatagataagcaaataaataattacaaattttattcagtgctacagaaagaaacaaagtattgtgataaggataatggaattcaattcatttaaataaggtgacctttttgaaaaggaaaaacagttccattattttttttaatggtgccaaattttaaannnnnnnnnnnnnnnnnnnncgggatcccggcgggcgagcggggggaacggagagaaagcccggctccgtacaaggcaaacgggggggcacatctattgtcagaggcagcctacgtctatagtaagtgccgttttttttttttttttttgagacagagtcttgctctgtcacccaggctggagtgcagtggtgcgatctctgctcactacaagctccgcctcccgggtccacgccattctcttgcctcagcctcccaattagctgggactacaggcgcccgccaccatgcctggctaatgttttgtatttttagtagagacggggtttcgccgtgttagccaggatagtgtcaatctcctgaccttgtgatccgcccgcctcggcctcccaaagtgctgggagtacaggcgtgagccaccgtgcccggcttatagtaagtacttttattttagtgtatttcttctgtctaaaggatcatcaatatattgaaaaagggtgatatgaacaaaccaaaatatcttatttaggattacaataacactggagttgaataataatttctgctcaataaagtatgtgaaatttcaggttcccaaaattgaaacactatttaacacatatattaaatggtatacaatttaaatattctttaaaatcataactcttttcacaaagaatatattgtttccttaatgccaaatcttttaggataaatcagcaagacactaaaaatttaataatcagttattttaccaaatgttctgstttttaataaagtcactatttcaaaccacagaaaaattctagagtagaaaattaaatggaaagcagtggtcactgtaagctctagtattagttaagaaaaatttgataaatgttgatatacttgcaaatcttaagatttgatagaattaacttattcattaatatacattgatttagtgagcacttagtaaatacataccagaaactatattatttcttttaatttaaaaagggcaggcaggcatggtagctcacacctgtaatcccagcacttttggaggctaaggtggcctggatcacttgagtccaagagttcaagaccatcctgggtaacatggcaaaacactgtctccacaaaaaatacaaaaaattaggtaggcgtggtggtgcacacctgtagtcccagctacttgagaggctgtggtgtgagaatcacctgagcccagaagattcaggctgcagtgagccatgattatgccactgccctccagcctcagcaacagagcaagaccctgtcccaaaaaataaaaataaaaaaggcttgaagcaaaaatagcagtattacatctattaattctaggcagtagggatatggatgtttgttatattattcctaatgctttttcataattttaaaatttagcaacatttaaaaaaattaatggaacttgtttttcctcttcaaaaaggtcaccttatttaaatgaatttaattccattatccttatcacaatactttgtttccttctgtagcactgaataaaatttgtaattatttatttgcttatctattgtctaaacaataaactgtaaatgtaatgaagtaaaaaatctagtacacttctaatatctcccatctctgtcctcacacttcaattacaacaatcatgcattactctcttttactgagaaaagagaagcagtagaacagactgtccacgtgctcacatcttatcgtctatcctacctacatgcgtacccctatattctgccttccctttgttactgtgaaagaacgatctttgctcctatccaaatccattccctctacttgtgcactagatctcatcttttcttgctttctcaaggacatcacattccagtaattgtcccctttccagcatttcacattttttattttattggatcactgccatcagaatgtagaattgctctaagatatccatcaataaaaacaaaaacaaaaactttatcccccagctaccactacatttctctgctttgcctcccttataaccaaactccttgaagaattgcttgtattctatctctacttctgttctttccattctgtttgaacctgttatataaagtatttttcctatcattctgtagaaacttgtcaggccaccaaatatctctatatggccaaatcccaaggttaatttgtattcctcaatctactcaatttagcagcatttgacactatccctcatttcttcctgaaacactgtcttcacttggttttgaggataccaggtttttttcagtcatttttgccagttccttttcacctcaccaacttcattagagtgccccagggctcagacttaggatctcttctcctttctattggtattaacttattaggtgaccccattcactctcaaggctttaacactaacaactaataatttcttccaattccagatctgcataccaaatcgcctgttggtattttttgtctaattgatacctcaaacttaacgtgcctaaaattgaactcctgactccttgacacagacctccagatttgctcctcctgcagtcttccacatattcataagtagcaactctattgttttagttgctcaggccaaaaaattatttccatttacccttctttttcttatatttgtaccttgaaaaaatatccagcatcctaccatttctcaccacctccaccactaatactatacttttattgtcacctcttgccttgattactggcataagtttccaaatagtctctcccacccccaccttttttttttttttaaagacagggtcttactctgttacccaggcagtagtgcagtggtgagatcatggctcattgcagccttaacctcctagactcaagcgatctcctgccttagcctcccaagtagctgggactacaggcatgtgccaccatgcccagctaatttattttttgtagagatggggtctcgctatgttgcccaggccagtctcaaaatcctgtgcctaagcaatcctcccaccttggcctcccaaagtgctgggattgcaggtgtgagccaccatatgcagctataatctattcttcatacagctgccagagtaattttttttttaggtaagtcaaatcatgacttctctactcaaaagcctccagtgtcttccagccttacatagggtaaaagagaaagtccctgtcatggtcctacatggtctatcagccctcctcccttatctctttgatttcatctcatatctttgctcttccactcaagctacaccggcctccttacctcaaagataccagttacactcccatctcatggtctttgcacttactattcccataacctggaatgttgttccccaaatatcagtatgcttcacttcctaactacgttcaggattctgcttaaatgtcacctcagagagacctttccttatcaccttatatagagtagtatctccctccatggaatagaagtgtccagaaatataccgtcacaattatgttcaattgaattttgacaagggtgccaagaaaattcaatggggaaaatgtagtcttttcaacaaatggtgctatgacaactggatatctacaagcaaaagaatgaagccgaacctctggtttataccatatataaaaattaactcaaaatggatcaaagacctaaatgtaaaacctaaaaccataaaactcttagaagaaaacataggggtaagtcttcgtgaccttgaattaggtttcttagacatgataccaaaagtaacatgtaacaaaagaaaatataaaatagacatcatcaaaattaaaaccttttgtccttcaaaggataccaagtgaagagatgacctataaaatgaaaaaaattttttgcaagtcatctatttgataagggtcttgtatctagaaatataaagagctttacaacttaataataaaaagacaatcaatttaaaaaatgggcaaataatccaaatagacatttctccaaagaaggtatgcaaattgctaaaacacacacacacacacacacacacacacacacacttgaaaagatgttcaacatcattagctgtcagggattgcaaatcaaaagcacgatgagatattacttcacacccactatgatggctataaacaaaacaaaaataaaagtattgaagaggatgtggagatactggaaccctcatacacttcttatggaaatgtaaaatggggaagttgctttgcataacagtctggcaattcctcacaaggttaacatagagttaccatatgatccagcaagtctagtcctggctatatatgccaaagggtaaaaacaaaactatgtccacacaaaaaactttaacatgaatgttcatagcagtattcataatagccaaagtacaaacaacctgaatgtccatcagctgatagaatggataaacaaaataaggtatatccctacaataaaatattacttggcaattaaaaggaatgaagtacctggttcaagctacaacgcagataaccttgaaaagattatgctacataaaagaagcctgtcacaaaggacgacatattgtatgattccatttatatgaaaggtccagaatggacaaattcaaagacagaaagtagattagtagttgttatgggctgagagaagggagaaaatggagtgtgattgctttatatatagagtgatgaaaatgcttcaaaattgaccgtggttatggttgcttaactctgaatatattgaatatcattgaattgtacatttcaattgggtgattctaagrtattttaattacatttcaaagctgttaaaattaaaagtagttcctcccactattactctgtattccctttctcagttccaattttcctcatagcactcaaccatcatgtaacagactgctttttacttatttatcttgttaataaatttcctcccactaaaatacagattccaagagagcagggtctttattttgcatttgtttgttttgttttgtttttgtttttgagacagggtctcattctgttacccaggctgccagctgcagtgtgcaatcgtagctcactgcaaccttgaactcctgggctcaagcaatcctcccaccttggcctcccaaagttctgggattacagatgtgagccatagtgcctgacctttttttttttttttttaagacagagtttcattctrtcacccaggctggagtgcaatggcgtgatcttggctcactgcaacctccacctcctgggttcaagcgattctcctgcctcggcttcccaagtagctaggattacagctgggattacaggcatgcgccaccacgcccggctattttgtatttttagtagagacagggttttcaccatggtggccaggctggtctcaaactcctgatctcaagtgatccacctgcctcagcctcccaaagtgctgggattacaggcatgagcgcccagccttattttgttcttattctatctccagagcctagaacagtgcctggcacatagtgggtagtcaataaatatttgttgactgatcaaatgaatggaacttccaattctttttcataccttcttatccattaaatagggaaacaataaactataaaataattattcactgagctcactttgcactgccgcttactccagtggcagatagagaagctgttttttggctgttccaacaaggtacatttgaatcctgtaggcgtatagaaaaggtaactgcctagtagattttatcctgttctgttaagtgttcactggacaactactttatgaataacacaccaagttcagtgccctgggagtttattgtaaagaagtattatatcaccccattcccattcctgaaatagcaagacatactgttgaaaatgtaactgttctatacatttgttactgaaagcctggcatactgccaaacgaaacatttctttagtcccatatcctaaaataacctcaagttaagatagtagctacaaactagcttataataataatactttacatttgcacagtgctttacaaattatgacttttacagaaattatcacacaaatagctgtgggggtggtggcatcctcatttcacagctaatgaaactgaggaccgaggaggctgggatttactcaaaatcatagaagttgcagagccagaacatctaatgacttcctagtgttctcttttttctgtgacatctagcctccatataaacctctcatattggttagtttagaaaatgcatttatttcttgtcttgggaattaaatagccgcagtattccctccatttcacagatgcaaaaactgtggcttagtaagattgtgatttgtccatggccatgaagttaataagtagcagatactaataacttagtgctctttgaattatacaccactgacataagaaagaacatgtgctgtcttttcaaatagtgagttttgtaattgtctcttttctttttttaatcttggctgcaaagaagctaaaagccaggtattatccttgaccacatcaactctattacattttattactggcatgtctgctttccccttttagtcgaaatttcccttttgggtctaagctcaatgaaattttttccccttttttctcagctgcctcattcctttttggaaagagatgggttgtgattaaattggaaaatatatatagggcttctccagaaaagagtggactatttctttgtttattctgattttatcttcttacctgatgatcttatcaacaactcctttaaggtgggatttatttacattggtgatggcttaatttctaaactggttcacacattagggaggatgcctatctaatgagagagttagactacacttccagcccctttcatgcatcatggagggtagcaatttaatcaagaagtttttctctattcccgttaatactctggccaagatgccacaatatcatcatagctgagttcttcactatctattacttgattccagattaggaatttagaaagcaatgagataagtagtgtgttttgacagaataatccaatgacagtatgcaaaagagatccaatatagggaatgtattggaaactgctaaacttgctatagctggaaacaaggttgtgaagaaaattgatagcagtgctgaagaaaatgaaacagatgttagaaatgttaaaaaattataattatcattacctggtaaccagttggatatagggtacatgggagagggaactgtaagtttcaaatatatataacaggaagagtaatgggttccataatggaaatagggaagcctacagaagcaaactggattctttgggaagataaggaatttggtatatagacatgaatgtaaggcagtaactggatataattaaatgaatggtcaacaggtatggtaaaagtcattacgtataaatgatgcttcgagtatttaagagattcaaggtcaaagtaatattaatactttttaagaactttccaggcactgttctaagtattgcccatgtattattaactctcacaattcttagatctagctaggtaatcccagataagaaactaaggaacagagaggttaagtgacttcttcaaagacacacaataagtaaagcagcactccagtattcaggcctaggcagtctgactccagagtcagtgctttttttttttttttttttttaattttttcatgcctatccctgtctgctccccattcctccccattctcctccctgccagggagaggagaagctgactgggttggttttgacagtcagtgcttttaacacctatattatactacctcttgagatcacagacaggtagagtatatacacagaaaaacagagggccaagtatcaaattttaggaacactgacccaaggcaccccccaatcactaaaaatgacaaaagaataagataaagtaaaaaagggggatgtttctagtacatcaactgctactagtgtttcagagaagtccgtttcatagaatcacagcattgggggactgaaagtgacctattttctcatataaaagacaccctatggcccagaaagttgtgtaatttgcccaaggtcatagaagtaacggatttttttttttttttttttgagatagtttcactgttgtcacccaggctggagtgtaatggcaargtgtaagctcactgcaacctccacctcccaggttcaaacgattctcctgccttagcctcccaagtagctgggattatagacatgcgccaccatgcccaactaattttgtatttttagtagagatggggtttcaccatgttggccaggctggtctcgagctcctggcctcaagtgatccgcacacctcagcctcccaaagtgctgggattacaagtgtgagccactgcacctgccagagtaacagaattaagatgaaaatctagctctcttgaccctggtagttttatttttaattcacttatcacagtaaaattctaattatatgattatatgtgtataaaatatatgtagacatatttaaaaataaccatgattgtgtattttcctaggtgggttagtatgtggagagactatgatgaacttattgcaaaaataacagtttttggctgagcgaggtggctcacgcctgtaatcccagaactttgggagggcgaggagggtggatcacttgaggtcaggcattcaagaccagcccggccaacatggtgaaaccctgtctctactaaaaatacaaaaattagctgggcatggtggcaattacaggagtgggccattgcacctggactttctaaatgttttgaaaatcactgctctaggcaattaataaggctctgtccagctctcgaatgttacagttctcatttactttgggtcattgatgactgtaactaaagacttttgcttagaatgcttagaagttttagatttcatgaggttagcacatatgtacagttccccagcttgacttaaataattgtcatttgccagatcctcactatgtgatgattttactcatctagtcctcagaataatcctgtgaagtagatgatatgcccattttagagatgaagaaattgagtcccagaaaagttaaataacttgcccagtattatacagctagcaagtggcagtgccagggtaagaaaccaagtgtacccggactctaaagcccatgttttatttaacaaaccttatagaacaatgcctggaagatagtgaggctttataaataatgcctcatctgatcctcgcagcaaccctctaaaatagacatttattatctccatgctgacaaaactgaggaacagcgaggttaaataacttacctatgttcttattcaccatatctcttgtcataattgcagacattttaagattaccataacacacatagctgggaaccttaattatttttatttttacttttattttttgagacggagtctctctctgtggcccaggctggagtgcagtgacgcgatctcggctcactgcaagctccgcctcccgggttcacgccattctcctgcctcagcctcctgagtagctgggactacaggcgcccacaaccacgcccggctaatttttttgtatttttagtagagacggagtttcaccgtgttagacaggatggtcttgatctcctgactttgtgatccacccgcatcggcctcccaaaatgctgggattacaggcgtgagccaccgcgcccggccaattaactttttttaacccaatacattccaaagttaagaatcacatattgttttggagtaactgtattatctttcccaaacttagaatattcagaattaaaaaataaataccctgacaacctggaagattgcttcagtcctatttcctgtttaaaataatttactttgtcaattattgtcttaaagatccaagcaatgagtcactttttagtaatattgccttatctggaagtgctttgttttttaaatcagcaatttggatttttatcttcactttagagacagttgttcttgagttataagttttgaactcaattttagtaaattttgaaatattactaaaattctaaaagttagctttctattataggttatggccattgcaccaacccattatatctggcaaagagaacgttctgttcatcacagtggagctgtcagaaactacaacagagatgaagttcagctgccccggggacctagtgccacaccagtagattgttcactctgtggtaaaaaaagaagatatgttagactgggattgtcttcatcatcatctttatccagtcatacagcaggggtgacagaaaaacattctcaggactcatacaactcactgtcaatggacataataggtgatccttctcaagcttatactggttctgaaggtatgatttagtaatatgccagaattagatttatgcatgttgtttactragctctagtcagtcctttctggcggggatacataataatttatatactccaacaatatgagttaaattaatcttgaaactttctcccctttcagttactttttgtcttgtgtccatatttgttttgtggtgacccacctaaacagatttttaatgtgacctatgttaagttgaaaactaatgcaccataagcctcagtattttaagagcctgaatcatttttttgaaatgtttattttattcaaaagggtttcaagaagaaaataaatttacttgtaatctcaccttccaactattggtttccttctgtatacttttctaacaaaattagaaccatactatatatctaggcctgcttttttcatttatcacgaagtattttcccatgtcattattgagtcctccaaaaccagttttttttttttttttttttttgaaacagagtctcactttgtcgcccaggctggagtgcagtgggacaatcttggcttactgcagcctccgcctcccaggttcgggtgattctcatgcctcagcctcctaagtatctgggattacagacatgtgccaccatgcccagatagtttttgtgtttttagtagtgagggatttcaccatgttggccaggccggtctcgaactcctggcctcaagtgatctgccttcctcggcctcctaaaatgctgggattacggacacgagctaccgcacccaggccaaaacctgatttttaattctgacatggtataagtaccataatttctttatatatttcattttgttgggatttaagtggctttcagcaatagartattaattagaaaagaaccttattagctgaaaaaatacaactgcaccataatttcactcaaattatttttatatatagtattatctgacatttcttttctagaaatgtctagaaatagtactagaataatattctactatcagtgatcctttttacttacaaagccttccagattttcacccatctcaagacagggtggacagatttttcatggtcctttctaattctatcatgagaaattaacacacctgcattatttcaaaattttacctatttgtttttaccacaaagatattaatagtggctactgaagctttactaaaggagaaactagactctaagrttcttgaaggtaggggttatgcctcagtcattgttccatttcttggccatagtaatcactcaacaaatttgcacgacagtatagtctcttccttttcaacaccttcaggcatattttttattatgctgaggcaagaggatcacttgaggccaggagtttgagaccatcctgggcaacatagcaagaccccatctatttaaaaaattgtcttttagcatccctcctttcccagcttcctttactctttgatccttataataggtaagctttactgaatgtttacaatgtccaaggcaatatataatgcattttatattcataatatcatttaatattcacagccaactttagggtgaatactatacctccactcagcagataaggaaactgaagcttagagaagttaaataatttgcccaaggagctggagtgacatgtgaacccmggtctctgactccaaactagagcctgaattcctaaatattatggtctactgcccttttgatgcaatcctgctgttggcagtgaaaataagctgccacggaagccttctagcagactactaaggaggtggcgaaagcattaagatctaagtccctgatgaaaggctacatgaagtgagctgggagagaattccaagaatttgaacagatatttacagaaagcaaaacagaagcagttatacatattttattcagaccaaccactgtaggtatcaacagtaataacactccacagtataggccttgacatctcaacaggaaatttgagtgcacctggggaagaaggggctgtgccagtcagtatactttggagaaaaaataaaggtctttgagggattgtggatgaaaagtggggtattaacttaggggagttgtagaaggaactgtgtgctttcatcctttcactgggtgaaagccatgatttaggatttataggtcctatacaggaaggaacaagtatttacccatagccattttattctgagtattaacccatggttaactgtaaaactctttgtttcaggatgtcagagtgtaagcaatataaaggaaaagtattgattgtacacatattttaccagtaaaaatatacattcattttcctccaatagttttaatggagagtgagctcactgggagtagaggggagagtgcaggataataggaacacatgatgctacaggagtgggataagtctctcactgcctaaacagctgctgatttagtgacctctactagcaaaattttcttcctccattccacctaagattggaatcatctgatagtatgtggttgcaaaaactgaattcagcattctccaagaaagacacaaaaagtttatgctctgctttagacttctatgcgaaacttagcatagatggtgatcagtgcttccacctttctttcaaacacaagcaaacaactcctcaatttgcaggtaaagacatgttttcctaccttaaaattttttttgttaaaaacaacacattcaaataaaagttttagataaacatgtttatgacatttattaagaacaaaatatttttcaatttgacaaggtggggtaaaaatactgtcaaaaatttgacttttggggccgggcacggtggcttgtgcctgtaatcccagcactttgggaggccaagagggggcggatcacctgaggtcaggagttccagaccagcctggccaacatggtaaaaccctgtctctattaaaaatacaaaaattagctgggtgtggtggtacatgcctgtaatcccagctactcaggaggctgaggcaggagaatcgcttgaacctgggaggtggaggttgcagtgagctgagatggtgccactgcactccagcctgtgcaaaaagagcaaaacttcgtctcaaaaaaaaaaaaaaaaattgacttttgggaaagatagatgaagcattcttttttttttagatgaagcattctttacatatttatatacatcacaatcaccaatcacacgctagatacttaatctcatttaacatccaaccccctaagaaatcttgaagtggcattattatattcattttactgatgaaaaaacaaactcagaaaagtcacaccattaccaggtaaaacaataacagaaacaagatgggaacccagttctatctgaatatataacatatttttataataactaaactactattgtttctccttactgtatgctgttgtaagctttatgacrcctgggctggtccatgtgaaacatagatatatattatgtattatctgaggacccatgagattttagagtgaagccaagggaaaaaaaaatatgccaagctttagccctggatcatatagggaggcatgtaacattacaactgttaaataatctaaaaccaagtaatttttcctcagaaataaatccttctttgaattttcttacttatttttgtcattaccactgttctagtcacccaggtttaaaattcttacacttaatgaaggtataattagggcatataagttaataatgtgataagggctgtgctaagtatatgatcaacattgaggagcacaaaagatttcagaattaattctgtggggtgagaggtttggtgaaggtttttcaaagtaagatattagctgggcattgactgagtcctgttttgcccagagaattaagggaagggccttctgaatagcagacagaagtttgaaaatacagctggtccttgacttacctatggttgctatacacattcagtggaaagctgtatcatggtctctcttgatgctgggcagaggcagtgagctgcagcttccaggcagccatgaaatcatgagagtaaacaactgattttcgacagtgtaccgcattgccagatgatgttgcccacctgtagcctaatgtaagcgttctgagcacactaaggtaggctaggctaagctgtgatgttcggtggttagctgtattaaacgcatctttttaaaaatattttttgctgggcgcggtggctcacatctgtaatcccaacactttgggaggccgaggcgggtggatcacctgaggtcaggagttcgagatcagcctgaccaatatggtgaaaccccatctctactgaaaatacaaaatttagctgggcatggtgcgggtgcctgtagtcccagctactcgggaggctgagacaggagaattgcttgaacccgggaggcggaggttgcagtgagccaaaatcatgcccctgtactccagcctgggcaacagagtgagactccatctcaaaaaagaaaaaaataaaataaaaacattttttaaaaatagagatggggtctcacattgcccaggctggtcatgaactcctggccttaagcaatcctccacctctgtctgccaaagtgctgggattacaagagtgagctactgtgcccagccaaatgcttttttcccccaccagccaggatcttgctctgtcacctgggctggagtgtagtgatgtgatcacagctcactgtagcctcaacctcctctgttcaagtgatcctcccacctcagcctcctgagtagctggcactacaggcacgtgccaccatgcccagctttttttttttttttctttttttttttgtagagacttcctatgttgcccagactggtgctggtctcggactcctgacctcaagcaatcctcccaccttggcctcccaaagtggtggggttacagatgtaaatcactgcacctggcccaaatgcattttgacttaatgatatcttcaagttacaagagtttattgggacataactccattgtaagtcaaaaagtctcgatatataaattttctctctgcatccaatgaattaccagcttatctggttgttctttcataatattttgtttctttctttgtttgtttgagatggagttttgcttgttgcccaggstggagtgcaatggtgcgatctcagctcactgcaacctccatctcctgggttcaggcaattcttgtgcctcagccttcccagtagctgggattacaggcatgctccaccatgcccagctagtttttgtatttttagtagagacagggtttcaccatgttggtcaggctggtctcgaactcctgacctcaggtgatccacctgtctcagcctcccaaagtgctgggattacaggcgtgagccaccgcgcccgacctgtctgctcattttctacgattaatcaccttatatatgtattactatgaaagctctgatttaacagttttttcctccagttaaattctcatagacaccactaacagattaacttaaaataccttttacatgaccatagaaacttcagaagttcccactgcctctgaaaatatgaagttcaaaatgaaagcctcccacaatcgcagaactatatactatgtatacctaaatttccctctagaacaaccaagtcaacagataaaacaatacatgacccttggctgggcatggtggctcacgcctgtaatcccagcactttgggaggctgaagcgggcagatcacttgaggtcaggagctcgagaccagcctggccaacatggtgaaaccccatctctactaaaaatagaaaaattagccaggcgtggtggtggtgcatgcctgtaattccagctactccagagactgaggcaggagaattgcttgaacctgggaggtggaggttgcagtgagctgagactgcaccactgcactccagcctgggtgacagagctagatgccatctcaaaaaacaaaaacaaaaacatgatccagtgtaggtttaaagacatcaggaaagttttagtgactatttactgggtataaaaggtagggcctctggaaggcattgggatgacagttttcggtcagtctcaaatctttagtttacaggacagccagacatagacatagaaggctaacattagaaggtatctgtcccataaaccagactgtaaacatacttattgtttggaggaaggctgaagaaagagcttaagctgggccttgattgactagaatggamaactaccaaagaaaaagaagagaaatagaagaaaactacacacacacacacacacacacacacacacacacacacacacacacaaagggaagtgaggggaaatgaatggatactgttaaaaaggtcttgttcaattcaacatctactgagcaccatgtgccaaacagaaacaatgtattctccatgaaacaggagccaagggcagaacttttcttggctcttaagccagccccttctcaaagtagacaattggggattgacacaaaataggcattcaaagcattaaatgaataacataatttcattactagctaaatagaagggtagaagaaaagggagtattccatgatggaattaaaaaatggacttcaggccacgtgcagtggctcattcctgtaatcccagcagtttgggtggctgagtcgggtggatcacctgaggtcaggagtttgagatcagcctggccaacatggtgaaaccctatctctactaaaaatacaaaaattagccaggcgtgggagcgtgtgtctgtaatcccagctacttgggaggctaagacaggagaattgcttgaacctaggaggtggaggttgcagtgagccaagaccatgccattgcactccagtctgggcaacagagcgagactctgtctcaaaacaaacaaacaaacaaacaaacacttcagagcttctatatagtcatgcgccacataatgacatttcactcaaggtgggactgcatacaggatggtgttcccctaagattataatggctgggcatggtggctcacacctgtaatcctagaactgtgggaggccgaggcaggtggatggatcacttaaggtcaggagtttgtgaccagcctggctaacatggtgaaaccctgtctcttaaaaaaatacaaaaattagccgggcgtgatggcacatacctgtaatcacaggtactcgggaggctgagaccggggaattgcttgaacctgggagttggaggttgcagtgagccaagatcgtgtcactgcactccagcctgggcaacagagcaagactctgtctcaaaaaaaaaaaaagaaaaagaaaaagaaaagaaaagaagaaggatggaaggaaagattataatggagctgaaaaattcctatcacctactgacatcatagacctgtactgcaacacagtaccttttctatgtttagatacacacatacttaccattgtcttataaatgcgaatggtagttagtacagtaacatgttatccaggtttgcagtctagaagtagtaggctataccatataacctaggtgtgtagtaggctataccacctaggtttgtgtaagtacactatgtaatgttcacacaatgatgaaactgcccaactatgcatttaacagaatgtactgccactgttaagcaatgtataactgtatctggaaatgttataaaagctataaaggcatcattattatataaatgttcagctagttacatacagaaatataccaccagaatactctgctcctgattcaatcacttgtctaaatgcagccagagtgattttcaaaacacagatctaaacatgtcaccccttacttaaattcttcaatggaatcccatttttcttaggatacaccaattccttcacgggcatatgagaacttgcatggcctcatccccatctatctatccagtcttttccactctaccccagcatcactttttattcccattttccctgctgtagttaattcctacttagcattcagttctcagctcaattgtcacttgctagggcaaagtcccccattatggttactcatagtaccttgtacttctttggggggaatttataacagttttagttttacatctgtgtgattaatgtcaagctctatcatagactataaactctaaaaaggcagagattttactttaaaatgtcctacgttctataatatgttatttaataaaaaatttacacacatgtataattttaaatacttctagcctaagagataaatctaggaatggtagcatttaccctccaaggcattactattttacagcccataaaacaggccgggcatggtggctccacacctataatcccagcactttgggaggtcaaggcagaaggactgcttgagcttcggagtttgagaccagcctgggcaacatgacaaaccccgtctctaccaaaaaatccacaaaaattggctgggcgtggtggcatgtgcctgtagtccaactacatgggaagctgaggtgggaggcttgcttgatcctgggagattgaggctgcaatgagccatgatcacgccactgcactccagcctatgtgacagaatgagaatctgtctcaaaaaaaaaaacacacacacacaactaaaaacctataaaacatctatatttaaacagagacctaatcattctaagtcactgtttatctgtaaaatatggataacctgaaagataagttgtccatagtaagtgaaaaacatatataaagttttcaaaacaatgtatggtatgtggtaagtgctaaataactggtgcctatgaataataagtcccatttgtaattaattcatgtttccaaaatgtattccccaaacattttttttttaagatggagtctcgccctgtcacccaggctggagtgcagtggcacagtctcagctcactgcaaccttcgccttccaggtttaagcgattctcctgcctcagcttcccaagtagctgggattacaggtgcccgccaccacaaccagctaatttttgtatttttagtagagacaaggttttgccatgttggccagactagtctcgaactcctgacctcaggtgatctgcctgccttggcctcccaaaggcgtgagccactgtgcccagcccccaaacatttaatttgtgtagtaacactgaataattctaatgttctttcaagctggttaaaaagattctgaggggataaaagagattcaagagcctgttacatcttttgttacaatttttaaggtgattatatcattcttaagtttccccccattatttactgtagcccagatttccttattattttttaagacatatacaagccattataagatgtatttaaaatggacagatacataaaatttatcttaaaatgcatattttatttcagtagtcaatgaccatcaatcaaataaaggaaagaaaactaatttcttgaagaaagacaaatctatggagtggtttacaggaagtgaagaatgagatggcccaactaaaccaatttggaatcattaactacaaaatgtcaaactaactgcaagacaagtgtcaaaatgggatgtttaagcagttttgctatgttatacatcttttagttgttattttcaaaattatatgtataagttatataagtcatagtaatagctaaaaatgccaatctatggaagcagtgattttcaatataaagttctattttgatatttttccatcttcwagtcagttactgtcatctggagtactcagttaagttgtggtttgaccttcctcaacttgacaagaaaagctaatttaagagaagaaaaacataaagtcattatattaattaaaagaaaaaacaccatttaatatgttctgaaaacattactcacctgtatgaccaggttgccagtgtactggtctagcaacatagggaaatgatccatayggaaaatcagaatgcgattcttctgttgtaaaaaaatatatgtactataagctacataaaatattttctatytttttcacaaaactgttaaaatatgagttactctctttattgtaagttttttctttatttatttccttgcatatgttttagagctactctgccagttattatacagaaactatttgtcaatgattatgtaataaacatatgatttyataaccaaatggataagcctatatcataaatcaactgatacttgaaaacttgttcatggcctaaataatgtgtatatatgacaaagacctaaactcagttctttcaagaattccagcagcatcttagaagttgctttttggaatattagctatttgcctatcaggtcccattaataatcagtgatctaaatataaaacatccttaatacatttaaattatttcacaaaccaagctccttgtgacaagtaaaatatgaatattataaaaagctcaattcttcaaaggtatcagagttttaagtaaaaggcaggaaaagtcattattctgtgccttatacatcttaacagaataaatatcacacttttctatagaaaattgctgaggaatatttttataatctattggtcagtatactcaggaactcattctccattcattactgcatgcataaagtaaaactgaagctcaccatggtcatcctcttgaaacagctcacctttaactccaattttctcttgagaatctagttgtacatctgtgttgattttagattctactttttgagctaaaattccatttttctgttttgcaaggcaaaccaaccaatctctgacaatgacctcgcttatcttttcacatgaaagagcaagttcacaggtgcgaattccatctaaaagttcaataacctgtgtgatgctttcagaaaagtgaaaaatttacatttctactaaaataataacattatatttatttaagttccctatacctcttgcccacatttaaataccatagttaaattaaggcaggagagggtttaaatatgcaagttaggaggcataaaaagtaccttcacaaaattctaagtaaacaaacacagagaccataatttaacattactgttcacattatacttttaaaacatttcttccagattgtcagaagaaaatatgcatcttatattactatttatgtaaaaaatgatttaaacagtaatatagggttgggcgtgggtcacgcctgtaatcccagcactttgggaggctgaggggggcagatcacttgaggtcaggagttccagaccagcctggccaacatggtgaaaccctgtctccactaaaatacaaaaattagccgggtgtggtggcgcatacctgtaatcccagctactcaggaggctgaggcaggagaatcacttgaacccaggaggcggaggttgcagcgagctgagatcatgacactgcaccccagcctgggtgacaaagcgagactctgtctcaaaaaaaaaaaaaaaaaaaaaaccgaaaaaagtttaaaaaaaaaaaacactaaataaatatacagtaatataaatgaacttgggacttgtcattttaaaacagttgtataagatgccatatacactttattcagttacaaaatgaatattttggctgggcgtggtggctcaagcctgtaagcccagcaccttgggagaccaggtgagcagatcacctgaagtcaggagttcaagaccagcctggccaacatggtgaaaccccttctctaccaaaaatagaaaaaatyagccgggcgtggtggcgggcgcctgtaaccccagctacttgggaggctgaggcaggataattgcttgaacaggggaggtggaggttgcagtgagctgagatcataccactacactccaacctgggtgacagagtgagactctgtctcaaaaaaaaaaaaaaaaaaaaaaaaatttagtttgatacttaagcaaaagtgcacttaaaagttacattacaaagaaaaacagttatattactcactttactacatatacagcacatacaccaccatgcttaagatgtgggtaaaaaacaggcaaagtaacatgaggatttaacatatccaaagctacctgtgtgggggaaaaagagaactggatcagtctgattccgtttaaataaagcataagttttcttattgtggtgaaatgacacacttttggacagcaatcaaagtatttcattttttagaaggtagtattattaactatcattttaccactcccaaaagggtatgttaattattatacagttgggcaatgtggcttctgcctgtaatcccaacactttgggaggctgaggcaagaggatccatttgaggccgagtttgagaacagcccaggcaacatagcgagactctgactctattgaaaaaaaaaaaaagtagctggatgcagtggcacaagcccgtagtaccagctattcaggaagctgaggtgggagggtcactggagcctaggagttcgaggctgtagtgacctatgactgtgccatcatactccaccctgggcaagagtgagatcctgtctcagggaagaaaaaacaatttgtcatagtacttgatgatactgaaaaatcataatgatatgtcttgtactttgcatattaatatggaaatattgatttggctatgtatgtatatatgaatataaccaaagaaagattcctgtatgcctgtattatcaatattgccaagtgtaaaacacgccattacaacatgaaaaatttaaacatttgagacaatgtgaatttcctttttttttttttgagacagggtctcgctctgttgaccaggctggagtacagtggcacaatgtcacctcgctgcaacttccacctcctgaactcaagcaaccctcccacctcagcctctcgagtagctgagactacaggcaggcgccaccattctcagctaactttttgtatattatgtagatacaggttttgccatgttgcccaggctggtcttgaactcctggattcaagcgatctgcccgcctcggcctcccaaaatgctgggattacagatgtgaaccgctgcacctggctgacaatgtgaatttctattgccaaaacttataaatttaaatgctttatttcagctttggcaacagaaattcacattgttggccagaggcagtggctcacgcctataatcccagcactttgggagcccaggcgggtggatcacctgaggtcaggagtttgagagtagcctggccaacatggcaaaaccctgtctctactgaaaatacaaaaattagccaggtgtggtggtgcacacctatagtcccagctactgggaaggctgaggcaggacaattacttgaacccgggaggcagaggttgcagtaagccaagattaaaccactgcactcaagcctgggtgacagagtgagattctgtctcaaaaaaaaaaatcatatcccttatttcctctttattcttgtttcaattgcagtatacatggctatagtcacagaagatgccagtaagtacaaagataagtgaaaatttttcaaataaaaaattaattaaaaacaaaaaataaatctggtcaaaatagaaaataaagtaacatttactgttgtattaactccagaaagcttagagatatgctggcatatctatttactaaatgataaaatattagattgtttgtgtcttttaaaaacagtactaatcagtcaagggacatcttattaatttattcaccaaatatttattaagcactgtctacatggcaaacatttttctaagtggtaaggatatagttggagcttatagtctgtttcacgggatctaatgaaggggtagacattaaacaaaaataagaaaacatataaataaataggacagagggtggtgagtgacatgaagaaaaacagttataaagcagaataggcgtggtaactcatgcctgtaatgccagcactttgggaagccaagggaggaggattgcttgagccaggagttccagaccagcatgggcaacacagtgagaccccgcatttataaaaataaaaaaaatggcagggtgcagtggctcatgcctgtaatcccagcactttgcgaggccgaggtgagcggatcacctgaggtcacgagttcaagaccagcctggccaacacggcgaaaccccgtttctactaaaaatacaaaaattagccaggtacagtggtgcacacctgtaatcccagctacttaggaggctgaggcaggagaatagcttgaacccgggaggcggagttgcagtgagcagagatcaggccactgcattccagcctgggcgacagagcgagactccgtctcaaaaaaaaaaaaaaaactgccaggcgtggtggcgtgctcctgtggttccagccacttgggaggctgaggagggaggatcacctgggcttgagaaatcaaggctgcagtgagctgtgattgtgtcactgcactccagcctgggtgacaggataagaccctatctcaaaacaaacaaaataagcagagaaagagggaaagaaagggacaggtcagggaaaggaggtgtcattttatacatagactggtcagtgaagagacctgaagaaaataaaattaagtttaacccatgaaaatgtaggggagaagtgagctcctggtggagggaacagcaaatatttaatacaaacactcaggtagtaggctacttggggagtctgttgaggccactgtcactgcagtggagataaaagggggcaagtggtaagagatgacatcgaaggtggtggacacagattacatagaatcatgcaggctttagctttactcaattgagaagccactgaagaattttaaagattgacatgatttgaacttttttaaaaaactatttttgtgtgtggtaaaataaacattgccattttaagtatacaattcactgtcattaagtatactctgactcactttaaaatctacatgcagaaaacactgagaatgcaaggaaggatgacagtggcttgtaatagcaaagagcagtgggtgtggtaagaagtggtatatattttgaagacagagccaattagaattagaattggctgtaggatgtgagaaaaagaaaactgaatccaaagtttttagcctaagccaccgaaagaatggaggtgtcatttactaatgaggaaaatgatgaagattatgggaggagcaagcttgggggaaataagaattcaggtttggacatgtatttaagatgcctattaaacatccaagtcaaggccaggcatggtggctcacacctgtaatccaagcagtttgggaggccgaggcgggtggatcaccttaggtgaggagttcgaggccaacctggccaacatggtgaaaccctgtctctactaaagatacaaaaaaattagctgggcatggtggcgggtgcctgtagtcccagctacaaaggaggctgagacaggagaaatgcttgaaccagggacgcagagattgcagtgagccgagatcacgccattgcactccagcctgggcaacagagtgagactccatctcaaataaataaataaataaataaatatccaagtcaagatttcaatgacaatcaagggtcaacatgatgacataaatgggttctcagactgtagttttactatattattgacaaggaccaaagtcagataacccagaaaactgcaaatcttgaatgctcaattctcagttaacagcatttatccagttactcaaaccagaaacttaagagtcatcattttcttttttcaaagcctaatcaagaagccatcattttctttaccttgaattctcttttgagactctggggttttggtgcttctgtttgaattaaagtctcacaaatctacctccagtgtttctgaaattaatcccacagacattgacttaggtcaacacctcaccatatcttgttgaaatattataatacctttctgcatagactcccagcctccattctttctccagaactattctaaaacagaaatctagacagtctactctcctacttacaagataatgtccatactatccagcttgatatatacacaactttctttattatctagcccctcatgactgcatttacagactcatctcctcataccaagttctacagccatggtgttttatacttctgagtctttttagtaattgctcatatgtctatttcattttatcttatttaattaaattttttttttttgagatggagtctcatcctgtcgcccaggttggagtacaatggtgcgatcgtagctcactgcaacctccgcctcccggtttccagagattctcttgcctcagcctcccgagtagctgggattacaggcatgcgccaccacacccaactaatttttttttatctttagcagagacagggtttcaccatgttggccaggctggtctcgaactcctgacc

SEQ ID NO: 93921 - DNA, 239879 bp, Homo sapiens
  misc_feature (1)...(239879): n = A,T,C or G
gagggatgtcacttgggagcaatgttgggtaatgcagatatgttatagcccacagtttaccaatgaactcatcttgctgtaggcagttcgtgcaatttctctgggctccacttttctcaatcacaaaatgaggagtattgaactacattagagtctaaggcccctcctaatataatctggtgtactctttaccctttgtcctagcttggtagatctgttcccacattagaagatggaaaccaggaaaacttcagtacttatggaaacactggtggctggagtagaggttgcaagctggcaagcagcaggctggattcagactgcagacctgtttatttagcccatccaatgttttggtgggctggtggtgggggtgattgaattaatcgataacagttaaaatccaggaggtttcacatcgtcatctggacttatgcttttgttgaggctggaaaactctggcaacactttactggcactggcaatgatgagttggagctgattccttgctagtccagtgtgggccccgctactccctactgtgtcctcaatatgaaggttgaatagcagtttcattgttgtcattgtgtttatgctatttttcccccaaccctatctcatttcactcattcatgttactttcatggcccatgtaggtatgtgggtgagaggaagaggttgttggaagaatgattggagtctggtgtcaggaatcccttgcccttcaaagagacagtgtgctgctatctggctgcttccatgagctgcaaagtgggtaaaacatcttcagttgggtggataggataagactgtcattgactgatatgcgcaacctaattacttccttagttacttaaagctggcttcatttgtccaaattgtctcttctttggataagcatcttgactattgtttacttagaataatgccccacatgaacagagtatcccaagttcagcacacatacaaaacaacttaaatagcaaacccacatttttactcatctaagaaaagcaatcttccttctagaaccatcaccagaagtcctcctgttgattagagtggcctctaatttattgtctaaaatagaaatttcttgaaagtaaaatgaggcagtataataattatgccagaaaaatcagaataaaccaggaatttcccaagcaaactggggcataaagccaccctgctcaatgtgcaatatctggtagtgacttgatgacaaaatctgctgtcggtcactagagattatactggattgtcccaggtccactcctggggtatgcttggctcctcttgctgctgaagtcctagccagactggagaggccccatcacagttctattccttcttggatttgagctctcctgcccacttctacctttcactgatgcctctaagcttaagcctaacaggaaagactgtctttgtcagagataatgcaagtggctctcagatttggttgtctgaaattggggacctggggagtgacatctgtccttagatccttctatttcttctgcctgtgctgccctctgtcagagtctcctctagataattcaagggaaataattttctttttctttcttttctattttttttttttttgatgatggagttttgctcttgttgcacaggctggagtgcaatggcgtgatttcagctcactgcaacctccgcttcccrgattcaagccatcctcctgccacagcctcccgagtagctggattacaggtgcctgccaccatgcccggctaattttggtattttttaaaagagacggggtttcgccatgttggtcaggctggtctcaaactcctgacctcaagtgatctgcccgcctcggcctcccaaagtgctgggattacaggcgtgagccactgtgcaggtctcttttacttttctttaggcaaactgggtcacaccttcatgctagaactttgcatattctataggggctggggggggggtgggggaaatttctcagatcaccacagggcaccatcactgaagatcaaaccactttacacaaccagcaaagacatatcattgtagcagtattaagttttacacttggcatttgggtgagaaacaaagaaagtttggggcatttcaaacaataaaagaagcaggcttttgaaatgcaaagatatagatccctttcaaggaatcgaatataagaataaaaggagggagaggagttgagggtagtgggctggtgaaaggagttgtttaatggaaagagaaagatccagaaaggtgactgtcagatcccttagataaagccacccatctacccgtcaaagatgagaggaaaatccagctggctttattcttttgacaaagattcactgatgtggcagaaagatgaggtaaggggttggtaatagctcatcctcattcaccacgtggtttaaactattccatcactcactctataagaaagccttgcaggaaacccaggacatgcggttttgacaggatctatagtggcraggaaaatggagaggaacacagaggaaaggggagctgatgtattatttacagtggagaacytgaacagagtcaactgcaggagtcagcccaaagacttgtatctgtatgactgtggaataaagacagacagatctttgaattttcactgccgctctttytgctgctgggccagcatgtgtgcgactcatcttctcactgtgctgcaatctgccctgctactgcttacctttccctatggcccagaagaggtaaagacctcaacagaaacctgtctgggcctctgtgggtgaaatttcgttaggttggcacagagggtgtctcgctgattgtgacaggtctaataagcgtgcagatggcaagaagcacacacacagccactcgcgcacacacagcctccctgaagtcatgcagtgggcagagaggagggactcagagaatctgatccaaaaggaacaaaggctgcagcctctgcagtgggctgagcgagaatgatggggagacggctacaggaaaygagaagcgaagtgtgagaatccacagcaaaagccgccacagagcatatgcatcggacttcacagcttcctcctgcttccagcttgcrtttgctycatatgctgctttacactgctttccgggccataatgggtttcattccatagtttttatactaacatgaatgactcacatctgctccagtacccaatttgctctctaatgtcttcggctgtgaggagagaacagcttacacagaactcgccaacaacaggagtggtaaagaaggtcctgatccaggacaagaaaggtcagaaccctaaatgcgtcagctgggagggtctttgagagaacatgacattgccgatgggaaaccacagacccagaggaatgaggagcttggctcaacaatatcaagactgaggaggtagatctgttttaggagatccaggagaaccaggagagtcctagttcagagtgtatttattttttttcatttcctgccatgttaagtcttttgctaggagcttttcctccccatattggctgtgataagaaaaaagtaacttggattaatcgccaatgatagctaatcccccgctgggatcaaccatactctgcattacttaagcttgttattttatttattcattttttgagacagggtctcgctccatcacccaggctggagtgcagtggtgagatcatagctcgctgcagcctcaaaatcctgggctcaagtaatcctcctgtcttagcctcccaattggctgggactagagacacctgccacttcgcctggctattttgttgttgttgttgttgtttagagacaagctctcgctatgttgcccaggcttaaagctggttattaaagcgtttcaaatatattcctgagcatgggggacccctggatagactgggttcctggagagacctacagaactaggccccgcatggacactcacttcacttccagatgtttgaagtcccacttgaaatctacttcagtcctaatgatatttactggtttgacaacccaaactgatatctgatatgatctctggatggatcagctaatgacacctagcaaaactggattcccttgacagcttccataggcccaggaaatcttcctcacttgagtagaggacaaaataatgatttgagaagaaaatcattcctggaaggaaattcccactctctgagacattgcagtccctgcacggagctgccttcaccccagggcctcagtttccccatatgccaaacagtcagaatgaggcacctcagcatctcagcagtgtggtgagcagcgtggtggtgctgcaccatctcaaaagcttggcggtgttcttgtgtaactgtctgccatctgttactcagaagcggcattacaaagcgctgagcaatggactcctgtgctgcagcttctgcctggagccaacagcagctcagcagcttgcctgggggtcccctgcagagcctgcagcagaacgctttgcaggcccgaaactgcaggtcccgggtgaggctcctgaaagaggtccaaggtgcttgggatgctgcagaggtgagttctcttgctgctccccctacccctcccatgatgatcatctacctgggcctttgctgggacaaagcattggctggggagcctactcccacctttcagtgttcagagttctgataaaggcaaatgctagatcaaccctggggttctgtgtgatggtctaagagcgcaggtagatcttgaaagggctggcaacagtgctcaccttttctgggctgtttaatttcaactgcggttcccaaccccaaacatcttatctacagtccagtcaagaactctctgaggttgaggcaggacttccctgtggctgaaagataaggtaccaaaaacaggaggctttgagtagacgcctccatttctcagtacatgtctttggggagacatcttattgaagaaggaattccagagccctgatttacagctgtctcacctgtgcggaggtatgggagcttgccctacactgagctttatggggagagaggggcagggagaatggtggctgccacagtgggtgcatcgttctcacctccccaagaaactcgatgaagcaagcaaccctccaacaaaaatggcatggttcccgctgcctctgctccccagacagagcaaggtttccccactttgagtggtcagataacaccagcaccttgcattcagctttcaccactactcatttgcttgtcagaggaggtattttccctccattttacagatgaggaatcgaagactgggagaaggtaaatgacttacccaagactcacacagtgagtgtgacagctaggtcagtactctctggtcagtgatctggccgtgattccagcctacttgagcctacatgggaattggagttagaatttgctttgcttctagatccaagcggttttaatctgcaagtgggagggggatacaattcccaaaggcccttgggaaaaggggcttttgaaagatcaccctctgcacccagtatcctcctgcccagggtcactttccaagaatcccaagtggttgttccaactttggacctcttttcttgcaagcacaaagccctgatgcttacagggagagaaaacctttatgggagataattgcgccttaattttttaaaggatatctttaaagttaaaattagaccagctcagctttccttccgttaagcagaaaaagttaccaggcacctgcaggcaggcatagaaacaccctggggagttggctgaccgcggccttggccctcagtagccaggcaagtgaaccgcgggtttggggcagcagccctgccggcgccctggaatcccagccttggctgtggtaggacgagcacattgggggtgggaccccggcttcagcgccacgtgcagcccccgcgatgagcgggaaagtcctcccaggcacagcgccgcctggcgagggccggcccttgggtcccagctggcagctgggggtggcgggcatcccgagtgcaccgctcccgccccgccccgccttgccccaacccacgatggtctgggagctgcgcccagggcttggcgctggcggccccgcaacagcaccgagygtttcggtcggcgggcggcggtagcgccccctctcagagccccgctcactcccacctgggctcgctccgagtcggcctgtctgtcgggcccgccctccccgctcactccctccgccctcgtgctcctcccggggtgcttggcacagcctcggattcctccctctcgctgctcgagtcagtttccctatcggcggcagcgggcaaggcggcggcggcggcggcggcagccgcggtggcggcgtggggaacatctcggcagccaccgcgcttctcccgctggagcgggcgtccagcttggctgccctcggtccttccctgccacgtttcgggtcgccctgcaccccccacccaggctcgcttctcttcgaagcgggaagggcgccttgcaggatcctgccgcccctccaaccggatcctggktctagagctccccagagcgaggcgctcgccaggactcctgccccgccaaccctgaccgccggggggtgcccccgggacgtagcgccgcggagaggaagcggcaaaggggaccatgcggcgcctgactcgtcggctggttctgccagtcttcggggtgctctggatcacggtgctgctgttcttctgggtaaccaagaggaagttggaggtgccgacgggacctgaagtgcagacccctaaggtaggcggcttgccggcgcgctggcgctgagcggtggcttgcgggagggcgcgcagcccgcgtgccgggtttgcgggctcccgggaaaccagggcgagggtctgggtgctgcgagcaggtaacagccgccggatgtggctaccwtgtgatgtttctggattttaaaacgctcgggggcatctccggacccgcggtgtgcatgagtggcagtgggtgtgggtggtgggcgcgcgctcgcctgcggagcggggctcccaacttgagctgcgcgcgagggtcccggggcggagggggctctgcggacgggcggcccaggggctggcggtctccgggcgctgccagagagtcgccggcggtcgggtcgggccagcgcccgggcgaagtgtggcggctgcgctgacctccttcccgcagctgccaggcccgacctggggaggccggaggccgggtgcgccgcgcgcgcctgtgcgttgcgggcgagcgccttgcagcctcccgggcggctgccacccctgttctctaactgttcccgaccctctcagctgcattggaagttgaatgtgcccagaacaccacgaaagagcctgtaaaaacagacgccttggtattggcggggagttgaggaaatgggaatccaagtggcttttccaactcctgctcagtcagttcctgtgagggagccagaaggttccccctataggctcactcttaccttcagattcagagccctgtagggggaaagggaaaacttccccatggctctccgaaggttcactgaaaatcagttgacaaaaggcagatcaataggagaaaaggcataataatttatttgatcatagtttttcgtgacatggtagccttccgttttctcttcacagatttggcccggggacacggaaggaggcctctgggggatttcctggccagccaggcagtctttataaactgggtccagaacagtcgtctaggggtctgggcaaaagccttggaggagcttatggtcggaaatgggagactgaaaaacaggaagatgtgggcgggaggtggcgtctcaccagttaagtacagtacagagggcctactgtgtgccaggtgcatagtaggtgccttcctcataagtagttgtaggagttgggtggtaatatgcttgtttcatagatcaggaaaacaggttcagggtctttaagtcacgtaccttaagtcgttctactggtttgaactccagcctccacgctcagggtttccagtatatcaagttgcctctcggtttcccctttttaaccaagtcttctagcacttatgttctggaatcttgccaatgctttgtcgatttcaacaagcatttatttagcacctattgtgtgctcaggcagtgtgttaggtgctatgggtagagagagatagaatttactctctggggggagaggagttcactcatcattggaccaggatgtgaggtgtgcatagggctaagagggttcagtgcactgggtgtcatgggagcctgaggtctccctggaggaggaggacataacagagctgagctgagaaggataaacaggtttgtcagtaggtagaaagggcattccaggtagaggttaactgcatgaaacaggctcagaggaatgacacagcacgttgtgtgagtttggcataatttgagcacaaagtatgtggaggttggagggataaagtttagggaggtgtgtaggggctgggtggggtagaatcttgtgggtgtgaggactcttggagagggtcaggcagtgaggtggcgaggccagattgatgacttcaaaccacctttaatagcaccagatcacttttctcactcagcccctgcccatagatctggagagcttttcttctttttccctaggtggttctgctccctgtgatgtagttaatgatacctgcagggacatgaactttctctgttttgcttcgaccctcattaccttaagcttgcttattcttagtttacaccagggatctgggacaagagacctgtttctttctttgtgcactctttgtccctcctcctctcctgcctcttcttatcctggcgtgtgctcagcacacatctatcacaggcagctgtatgccaggctctgtgctgggtttgggggctgctatgatgagcacgctgtgtccctgtcctttggcatgggggtggggggccacataagttgcaggatgaggcagaattaccaacaaatgagtggtactttaaggtggggagtggtttagtagcagaagtcaggacattgtactgtgcagtcacaaaagaggaggttttctagttttgaaccagttgctctttgtcttaacatcttgttccttcttttcctcattttctgtatccttctagaaccatgaatttttatagacttagaaaatcttgacacctcttactattaggtgtcttcttttttttttgttagtatttttcttcttcctgtttttcccttgtatgtatgtcgctctgtatcttagtgtgtatgtacctgagaagagaggaagaaagacagagactccttaggtaacgccagaacagttttattccctgtgactttgtatgacaagtccaaatttatatgacatgtccaaaggagcacagtggtaccgaaacctggctgcatgtcagaatcacctggtgagctccattaacatgcagatttttgggcttactacagagattatgcctctgtgagtttgggagaaggttctagaattactgtttttaccagggttgcatgtgattctgaagcagcctattgatgggtggcatttgggagctagatgaagaataccaagtctgttgatcgtggtttggttggctgcatgtaaatatggtcaaatgattttcttcttgagtgtscttatggacctaacccatgtaagcctatgcatgcatgttaaataacagccaccagcatttctatagggctttacaaattcacagactccatttacatatattagttcatttaatactcacaactgcacaagggagacaagatagtacttttatgcagatgacattaaggaggtgaaaaatttggcccaagctaaccaagctgtccaagtggcagcatcaggacaagaatggaatgggatccctcctgaaactgcccactgcttgctttttccatgccgttaaacccagagactgcctgaattgacagcaggaattccccacccgcttcccagagctcccttggctcatccctagatcctcacccttggagagctcccagggggtttgtgtaagggaggtgctaaggcaggagctactgcggagggacatcacccctgcccttggaaggcaccatgtggggcacaggaggctcccctcactggatggagcacaccctgatgaggagagtccctgtgttgggtggttgcagaggcgttggtttaggaggccatttgccagggcagagattgtttcttcaacagtaggaattcggatgggacttccatctatcatagggaaaaaagttggtttttgagtgagttccgtgctgtaggttttcctagcgtgtaatcatggggacagctctttgccttggacatgctgaagccttggagaggttttcttcctgctcaggcctctaggcatcttcccagcatgggtgagggagtcagcttttcttccaaagcaagaggagtgggctcccttcctttgaatgtattcagagaagttgggaaaggtgtagagattggagagagctgtattaagggctcctggtctggggaactacccgacccttagattctgtggagcagattgccttcggagaggcaggttctggttctgggccatcaggcccttgttctcttttcctcgtggtcttaggaaatgtctccactcacctagtgacaggatctccaaagagggcgggatgaaatgaaatctctggtcgctgggccccagtgcaagtgaagtgaagaaggcatgctacactcctggcttaaggaaatttattagacttttttcttagtttcaagaagggctgattctttctattaatagctcaagtaaagagttctttaaatttgactttttaacgttaatttcattcttttactgcctcccccccaattatccagcaaagctctaatttctaactgaaaaatcctgtaacaaattgagtgttttaattcagactgtatttgaatggtaaatactatgccacttaaaagtagctgaaaaatgttttaatttcttctctccctatcatttgtttgccatttggagaatcatacaataactgactaaaattttaaaaatatcagcaaatttgtctcttatttctaagaaactaaatatagtccaggtgtttagggcttagtaaaagcaaaagaattgtaggcctgagggtaattttcaaggaaggtattggaaatgtaaaggctttgaataaaatgcctctggcccatgtaagtgtattggtgctgtactagaaatacaacaaacaccattagaaaatagcttgtctttctgtaacatttgcatcccaccaatgccttaagtatatgacactgttattttattcctcatttagtagataatttctctcattaaaaaaagtcataaattttagagagagaccctattaatctactcatacttggtatgtgcatattggactctgtccagggaattttgtaactgtccaacgggttcttgttgcccgcttcctagacagagccaatgtatcaagacaggggaattgcaataaagagtttaatacacgcggagtggctgaatggaagactggagttttattattactcaaatcagtctccccgaaaattcagagactgggtttttttttaaggataatctggcgggtagggggccagggagtgggaagtattgattggtagggttggagatgagatcatggggagtcaaagctgtcctcttcctctgagtcagttcctgggtgggggccacaagaccagatgggccagtttatcgatctgggtggcgctagctgatccacccagtgtaggatctgaaaaatatctcaagcaccaatcttaggtttcacagtagtgatgttatccctaggagcaactggggaggtttagaattttgtggcctccagctgcatgactcctaaaccatcatttttaatcttatggctaattcgttagtcctacaaaggcagtctggcccccaggcaagatgggggtttcttttggcaaacggctgttttcatttttgtttcagggttcttcccaaagttagtgcagcctacacccaggattgaacaaagacagcttggaagttagaagcaagatggagtctgttaggtcagttctctttcactgtcaattttctcattgttgtaatttttgcaaaggcaatttcagtgtgactctggcatgaccagaagtagcccatgatgagatgcatgctcatcctttcagttgctgtgtgggtgcctgtacaaggtgctgtgctttctttccattctaaggcagttcccaggagcaggtgtctgggtggtggtacacagctggctcctgcagaggctcttgtgagtgactgagaaatatgcaaatggcaggttgggatcccaggtagtcaagaaatcatatgtggtcacttcttagatgtcaagaagctttttctaaaacaaaaacaaaaacaaaaccactgagcctctatcccatgggtatggtgagaaattcaccgtgggtcatttttggcctattctgggttgtcccaaggcccrgagtccaggcctctggttgtcagcgctgagtcagtggcggatgtgctgtgtcccagcttcctttcactctcctagcccactctctcccccaggtccctgcaggaggccctgtcccagggacctgcagatggaatctcttttagtcaggctggggagctctatctctccctaacctttgtttcccaaagtgacctgatagtttttggaaagaaataccaggaattcctctctcaaacttccccagaggcacagaatgatacctactcaaatcagagaagacagaggggcaaagcaggaagggaagatccattaatggccctgtcacaagcctccccagtctgtccagagactaacctttttcagggctgcccatctggttgtatcatttaaaagtgctaatttccactcatcagaggtcatttataaactgaacagggacggaataaggctgccgtgggctgacgcctgaagcccaggattcctgcacagcttggttttcatgccatctgattttacctcctgtgcctacatcctacaccatgcctccccatcccagctttctraagtggtcttattcattgtcagacacccaggaaccagtttttgaagaccttcattgcttgagcccttgtttcatttctaatgtttgcagttttgtcactcttctatagcatcccaaagtccccaatgcattttttggaaaataatctgaattagaaagcagggccagatccccagctcctctcctgggggagtctgtgaaccctgccatggcttttgaatattccaccccagagaccyagaatcgtagactcaccatctgtttggggaagtgagtctggacatgcccgtgccctctaccactggctgcaggcccctgccacttgcctgtatttatcctgggctgggtgtgagcctttttcctcacagggtcctcagagactcatgctgcacacaagcggcaggagatagagagagtcccaccttctctagctcccatcatgtcaagatcaagtgtgttttactccccgagtttcctgatagacatggcagccagtgtggccactggcagtgccaggggtgactgagattcctctcttcctggctcagtctccttgactgtgaaatgggagcagctcactctagaactgtctgacccccacttgcttaccagcagtctgagtcttttcaggttagttatgaataactgtgaagtgagaccttatggctataaataattatactacagatactctgtgtctattacttttaattattttaccagaaatgctagattaaccaaaaaataaatcagtctcagtcctcagatgttgagctgattaagaaagaacccctttgggataccgaagaacatgaacacacacatatacacacacaggcacacacacaggygcgcgmrmacacacacacacacacacacacacacacacacacacacacacacacacagaggtaccctggggaattctgcaggagctcctgcaatgtgctggctctggtattttggtttttcagaataaatggcctgatgtgaccttctgaggtgacagtctttgcatttggcagtggctgctgccatcccagggcctaatgagagctagaggctgacagagggatagaggaggggacatctctgtggtgtgggaggtgtgtgccacctagggcatcctctttcctcctgatgttctgtccatgctccatcctccccttcacattcttcttctgtcccctgaaaagccagcctggctatacagccccagggtcctgggaccagggctccagtggtggctggccctctgccctctgctctgtagaagcccaacacttccctgcaggccccaaggtcaggagcagccacctctgagagcaccgctctggacacaaagctagttctttcctgaaggaaggaggttgccactctggcctttstatcagcaggagcccttatcgctgggaatacagagccatctgatcccctgcatcctggacaatgctggtttcaagtacaaagccttttctgcgtgccatttcctggagacaagatgaggcacttaaaaaataattaaattctccttatgtcacttgtcttcttaactgtaagcactacagagatctttcaaggaaatgcaggagagcagggcacactcacatgtctctgccctgggatttgaatgcccagatgaagagaacaaccaccccggctgtcttcttcctaatgatcctgctcttgcaacccgatctgcatgcatgctaggcaaggasagagcctgaaacatctatagaactagtagggccactctctcttgacgagctctctccaaagaggttaactgtctcttttctctgtttgcactatggtttggaaataaggattttcttccttagttgtctgggctgaagatttatgtagcttctcttattcctcagagaacagtaatcattgatgtccctcccaccccccacctcccagccatagagactggtccaatcaatatttatgtgcccatctctcgcagctgcaacatgcaggcataatagatgccagattccttgatggccactgaaaaattagctggtgcctgtatttcaggcttattgtttcctaggatctcagggagatcaggccacgtggtctgtggattaattaaggcacccagataattggctattaatagatggccaattgatggctgccagctgggtgctgaattgactaatgtccttatggtgggcaggtggtctttatcagaagaggagctagctgaaagactttactaattaaagggtgaatcaggaaaagaagataagaggtagcttttttccccaccacttggtgtgatgttttacagtttacaaagcatttatatccacagttgcctcatttgatccttactgcgactttgtgaggtgagtgttattattattctcgttttctgaactgtgatgaatctgaggtgatagcagggtagggacttgggcaagctagcctaatcagcaagtgggcttcaactcgctcttttgactgtcacgcatatgctgtttctgttagagccacgctcaacttcaggtgagattcctttgccagggaagatgaaatatatatgtgtatgttatatgtttgttttcatatggacaaaaagctagtgcacttgctgagaaaagatgccctccctctgctgaaacaccagcattgctttgtgtgttttttttttttttcaattttattttttaacttacagaagggaactggaaaagggattaagggaaatacagagcttgtctctggaaggccaccagagggtctggaggactttgggttttcttctaggaaaggccaagtttaacccatgcttgggccagtcagggccagtccacgggaccactgctttctggagtggaaagagctgggactgtaacggcagactcggtggtgcaagaagtggagagaggctctccgcccttccccctccccacaagtaccccacatcaggttctgactctggcctagccaggagcccacgctgccctgctactacctccctcctgggcctgcagggtttgctggcaggacaggaggctgtgctgttcattcctaggctgctccaagttagaaatcagcagggttgtggagttaagacacaaactgtttgagtccctttcttgatgaatgtggtccttaaactataggaagcaatttccttccaagaggaaaaatgtcatttgaaagaacctaacacatcctatttgaaatgcaagcaagtgcctggggaaatgactccaggaagtgactttagaagatatccaacgtcaccttaatgtagagggtgccctgcctgcatctctaatgccggggtgtcctggccatgcctctaatgtgggggcaccctgccatgtcttgctggttagccttgaaaactgatggacaactcctcagttctgtctcgttggtggcctgctggttctacccagtacagggaccagactctttgtggaggatttggaggttgggtttgagttatgtaggctctgcccacatatgtggttaaacttaggaaagcgtaagatcaggaggctgctgatgtcttcctggatattttgtctgcagttccagtaagctcctgggcccatggtggtgtttttgtgacatggcctaaacaataaagttggtrctctgctctaagatcccaagcagaaacatgacttttttactcttgtccttttcccccgagcatggcaatgttaaaggacactgcatttttaaaaactatgtgtggaataagaatgaaaagaaatgtaaacctagatgaccctgatattttccctctccacttggaagccctgatggttttctaatcgtttgctcagatcaactctctataattctccctgcctgtcttaaaactgaaattatgatttctgctccagattttagcttttctcctaaaattgagtgtatattttggtaaacttcttggcagtgtctactaaagctaaacatatgtgtacatctatgaccctgcaattcaactcctacatataaacccaacagaaatgctatgtattttagggaatgtcatgcacttgaattagagcaggcaaactttttctgtcaagggccagtaagtatttttgttttgttttgtttttaggttatatggtctctgatgtgactattcaactctgcagttgtagtttgaaatacaatatgtaaatgaattagtgtcactgtgttccaataaaactttatttatggaagcagatatttgaatttcatatatttttcacatcgcatgaagtattcttcttttggtattattttgaaagatttataaatataaaatcctttcttagtttgtaggatgtactaggacaggtggcaggccagatttgacccgcaggctgtgtgattgcatttatataaagtacaagaacaggcgaaattcatctctggcattgtaagtcagttcatggttacctgggttggggtaactgactggatggggacaggacattttggggcactggcactgttcagtttcttgattggggggctggttacacaggtgcgttcaccttgtgaaattccttgagtacatgttcttttctctttgtgcattctacttcaataaaaagttgaaaaagaaagatctgaactgagtgtgtggctcctgactccaagttttagcacctcatttagggtcagagcctagcagtttccattctttatatagccactggtttctgtttcccaaataagtctttggaaaaggtcttggtttgaaagttacccacgtcttactcccttttatagacagagagacatttagcaactgctatggcacaagcaccagctaaccaaagtatgtgctggatcataggaagatgatgggtcgtagagtggaggggcatgcaggacaatgggaactgcgagtaggactttggctggtatagtagccccatggtacatctgggatgaagtctacctagagttataggtaagaggtgaaagtgtgattgcagagaatagaattatgtgatgtgagtgagctactggcttgtagaacactcgcttcttgtttctgcatccagaagaacaggcagagaactaacaatctgagcctgtagtaagtgttgggtgctttctgagttagtcatctattctttttaacaacactgcacggccggcattcttaggttggtttttcatgtgacgaacaccaaggcttaaggaagcttggtgacatatccaagatcatgctgtttataagtaagccagggatctagattccaaaccaggtctgtctgcctccagagcacccaccctctttcaacttccatatgctcaccccaagcttccttccctcccctcacagccacgttgagtctgtgaaagggaggacttgaatgtatttttccctttgcaacttgcctttagaacctgggttcactgtgcttcccagagtgaacagtttagatcagaaattgttggatgaaatagtcttacatcagaagctatctctttcaggatgagtcattttaaaacaatgtttaaagagaaaactttacaatattttcagagaaatattttgtgctttcaccgctatctgacatccccttatgaatgctgtcctgccacagatgactgggaatgtgtctggtcctagggttaaactttaaaaaaggaagtctccaaagtatcacatttttgagagtgttaaggtgctttaggaatacctgaagactgattaaagagaggacactgaggaattaaccaacagatgctgaaaatacaaaggccatcatgaatggctaaaaactgcagcatcacccctcagagagsaatcgtcctgtatttagcataacaccacattatttggttgtttgtgctgaggagttgaaagctatcatgtgccaggaaaatactcagcatggagcagtaattatggatcagctgataataaaggatgtattggattgactgctaattagattattagctgcaaaaacaaatacctgctattaaccataaataagctgcacttatgatattttctacgttttacacttagtcctttttataatgtgcatttcttttctttctgtgccaagacttcccattttccccagtcatactgagcatatttgtgggtcaataaacaytgagccacaattaaagtgttcttttttccttccattctcctgaagaatggggtgagaaagctgatatgcattgagcgccacgtgtaaggtccttggtgaagtgtagtctgttttctcagggaagaaataagggctctttcaaggctggatccagatctttcctatgggcacagagtctttgtgaggggtaagatctctgtgaaatcaatgctgctattaattgccaaagaaatgaccatgttgctcttctttcttgtggcattttcaggtttggtccttgtttttcaaggtggctgggatgagcccttgggcgcctcaggtgcctgtatcacccactcctccctaccaaagagggcatcttcctacaggtrggttgactgtgtgtccccaggagtgtgaggtgycagctgcttttctgcccaagcaggccctgggtactgtgggtaggatgatctgccagagctcctgggcgcaccccaggatgtctggagrgagaagttgcatccagcaggaggctctggccatgctctgaataagtggcgcaagtgactgtcaagtgtcctgcattcagtgctagtagaagacctggtttgtggcctccgttattggccaggagtccacgtagaaagaagaggcttccaggggagaggtgaatgtgagtgccttttaggagaaatgctgggtgctttatctgtatcagttattcattcctcacaaccaccccacaaggtgggcaggctgagattcagcgactgctaccagtacagtcatactggttatttaaggttggtgcctttctctttaaacagtgcctgggaggttgcagtgagccgagattgcaccactgcactccatcctgggcaatagagggagaccctgtttcaaaaacaaacaaacaaaaacaaaaaaacagtgcctgaaccatgctaattgttaacattttctctttgcaatattatctctggagggtgtatcgattacctttatttttaccagtgagggagttgaggttcctaaaggtccaatatcttgcccaacacaacaagggtgacatgatcaggggaggaaatccaaccttacagaacaacgcctggtaaatttaaatgcaattgtcaaacgtttatccccatgtatccctgtaaagattctcttcttcccctcagcctcactttccactttgactcaaaagagaaaagacagctatccattttgcatttcctcccaccatgaataattggtggaactaagaccggacgtaggatgctagagccctggcaggagtgccactggggcagttggcaagcaggaaagatgggtgaactccttggaggtttccccctttgagtgcctgtcaagcatggggagacagagcgggcaaaatcacctgccccaggtcactggatcaagtttgtccgaacatccggcaaacccatatggggtgctgctgtgtgggaagccctgtgtaggaagcgggggtgaattctgagggagtgtggagtgtgtagcagtggctctctgctggcccctccctcaccacttctgattcccgaacactgtgttcctcttagatgtattgctgtattactggaaagatacaactgtgtctctggggatgctgtttaatggtggaaggaactgcaaratggatagctgtcttttctcttttgagtcaaagtggaatgtgaggccaaggggaagaagagaatctttgccggggtacatggggatacaagtttgagacaattgcttttaaatttaccaggcgttgttctgcatggttgaatttcctaccctgatcatgtcactcttccgttagctcagaaaactgtggttgaagtttaatctcatccttaaagctgtttcactaaaataggaaactgttattccacagggctgcttattagaagaagaaggatttagggaggtcttttaaagtcattttagtgatttttttgaaagaagcatttgccgcaatccacttgtccccaaagcatctgctgtttcaaagcataacactagtggaagcataacaggaagggaaagccagcatcaggatagggaataggctgagcaacccacttttatttagtcagttgaggacacctgtcgtgggttctataygttttgggcaccatggaccaggtagcctatggatcaactgcaacccctactttctccactgtttttgtatggcctgtgagctaagaatggtttttatagttttaaatgatcagagaaaaactccaaggaaaaataatatttcatgacacatgaaaattattaatacatgaaattcagactccatggtccatcaataaagtttttttttttttttttttttgagatggagtctcgctctgttgcccaggctggagtgcagtggtgccacctcggctcactgcaagctccgcctcctgagttcatgccgtcctcctacctcagcctcccgagtagctgggactacaggtgcccgtcaccccgcccggctaattttttgtattttttagtagagacagggtttcactgtgttagccaggatggtcttgatctcctgacctcgtgatccgcccgcctcggcctcccaaagtgctgggattacaggcgtaagccacagcacccggcccaataaagttttattggagccgaattcctttacgaattgtctatggttgcttttaggctacaatggccaagttgaatagttgtgatggagactgtgtgacccacaaaacttagatctttacaataaaaatagaaaataatttgtatatttttatagaaaacaaaaatttatagaaaatgtttatagaaacatttatagaaaatgtatagaaaaaatttatagaaaacacccctgatgttttgtttctcagtgtggctcatgggccagaagggttagtgtctcttataattcattagaaatgcagaatctcagaccatttcagacctactgattcaaagtctgcatttagtaagatccccaggtgatctgtgtgcaatcaaagtttgagaagccctgcattagatgatgtgcttgctcacgaaaagcctgtgtgaatcatactccacaagaccagctctacattcagtgccacttgtctttattttcttggagttaaatgcgattccaagctcccattcccccatgtgggsatggggattcctctactcacggcttcacagcgattctggaggcttcctccatgccaggtaatgtgggaagagcttgtagtcttccaggtatcaccatcacggctgtttcatcattgactgtgcccttcacgttctgcttatcccgggctagtggcttccctgtggtacccggagccccctgtgtccagtggccggccttcctaggggcatcacacagccattttaattgggctctgctaccttctgggacacccaccactctcaggactggctgtatcccattctccttccaagctggaggaattccctctctctctagtcctcaaaggcattgccctttttttcaccctctgggctatttattccttcaaataacactggcttttgtaaatgatagaagatggcctatttcctggtatctctgctttaggcttaggaataccatcttcctggaagccaggaagcatttggatcttggttatctgctgaggtcaggggttggggcagggcagaggtgggagtgggaggtagatggaagtgagaacaaatgcaaacaaatatcccattatcctagcacctctacgccatgttatgatgcagttgaggggacatgactaacaccatctaggacagtactgaatctaggagatcttcctgtagaacaggaggcaggttctgtgggagcttagagaaagggagattattgggcggcagtgggcagcgaggtcttcctaaggtggcaggactcagcatgagtgactagagatgaatagaaaccaggagtgggccagactgcggaaaagttaaaaaataaagccgtttgcttatttttgttctaaaaccagagtgtgtcagatttccccagttgggaatattatactccactcactggggactttgttcagtaaatgttttgggtttaagggttttattgtctatagtatgtccattgctcttaaaggggcaattcagtgaaatttgaacttggcattccctttctcttacccttctggcctaaatgagcgttgctgtgtatgttctgyattcctcaccaggcttgattctggcttttctcgaccacctgttttcaattttaatttgtgtagctgctcttagagaaattacctgtggggaagtcatcttgcctgtctagattccttacagatgaagccttggcagggccatggccaaagtcacttagaatgcccttggacaggcatgctgggctcccgagttcagaaggtctgagtccatgcacattggttggagaaagtgaactgtgaagacatccctgctgatgtgaccagggcctggaagaattctttcttgtgtacaccaagcacagaggctggcagatttgcagatgttatttgagatgtgtgctgatccactgcacctctttccaaattgctgtcttaggaaactaaaccaggaatggtcctaacacagtggacatggaaatatactcattatgcaccaagtttaaaacaaagaggattcaaaattgtgtccatggctgggcgtggtggctcacgcctgtaatccyagcactttgggggccgaggccagtgggtcaccagaggtcaggagtttgagaccagcctggccaacatagtgaaaccctgtctctactaaaaatacgaaaattagctgggcgtggtcacacacatctgtagtcctagctactcaggaggctgaggcaggagaatcacttgagcccaggaggcagaggttgcagtgagccaagatcgtggcactgcactccagcctgggcgacagagtgagactctgtctaaaaaaaaaatgtgttcatggtaggatactaatttgtttaaaacaagatatatacgttgaaaaaagttgtagagagaaaatcaaaatggatgatttacgtaaatgggctattgtctgtgtgatatttctcactgcaacttatttatctatcttttcactcaccaccctctgcttcaccccctttgagataagcaacataagaatctggatatgtgaacttcaatagctttctctctgcattgtgtaaccagtttgtaaacatgtataaacatttacagatctgttttggttgttattaaaaaggagagtgagagattgatcacattatatatactttgcatcttctctttacttaagtatatattctagaaatcctactggtcagctagctcattatttttaatgactgcataatattctgcagtgtggatgtaacttattttattcagctatttccatttgatgggtatacactttatctctcatctcttgttgctacagacagagctgaaataatctatgtacacatattcttacatgttagagcttttgcttctgaagtataacttttgaggagtgggaattctgagtcaaaaggggtctgtaatttttatattatgtatattttaagattgctttgtaaaacaatctacattttcgttagcaaagtacgagagtactctttccccagcatcctctttggtataaatgtcgtcattttcgttttgccaacctaaagagtatgaaacaggatccaattgtaattttatattcctccgattaccagagaggttgagtatgttctcatatgtttattgcatgtaagaatcttgcccttctatgaggggtctattcatatcctctccctatttttctactgtacggtttatctttttgttgccaagtaaaagagctctttgcatgttattgatagttctttattagtcatatrtgttgcagatttttttctgattaatttgttaatactgttgactttatggtatatattgccatataactttttggctttgaaaaatacartcgaatatgtcttttcaaaaaatagctcatgaatgccctgtcttgattaaaaagatcatcgtaagtcctagattgtacatagaatatcccaaatttccacttttatatgatttttttttcttaaacttttaaatcttaggtccatctgggatttatttttatgtcaggtttgaggtagggattcaactgtattttcttccaaaatgaatagtcatttgtgtcaacatcattaattaaataagccatcacttcccccactaattaaaagaccactttgtcatataatttcccataaatattgggttctagttctgggaactccattttccatggacctctttgtcttttactatggcaatrtcatactttttaccagaattttcttattaaatccagtagytacttctcaattagtctattgaatttcctaagtataaaaatcacatcattatcaaaataagtaaaatttgtctctcctttttgagatttatcttgactattttattgtcttattttgttgcattcatgagaactttcaaaattaaatgccgtggcagtataaggactctcttgattttgatgcaaatggctttagtgttcattatttactgctcacctttattagatattctatatcacattttaacttttgttttattcttgatttactttgagtttttattagtttttttggatttttatcttttgattgaatcatatttctcttttattgatgcagtgatttattttgattttcttgttttgaatcatccttgcattcctggaatgaactctatttagttacagtttatttttatttatgctactggcttgtatttgttgacatttatttrgaattttaacatctattttcataagttggatttgtttatagttttttttggtactttggttttagatttaggtgtgtattgctttgataaaatgaattagggaagttttttagcagatgagratagtttaaataactttcgccgatttattctttaatgatcatataaaactmagctgtgaaattatctagttctattgacttcttcaatggtagccctttagtcaccttctctatctctgccatgatacgtctaattactcaccaaattctgatgtctcgttgtttgggcacacagcaagattgcatttcacattctcccttgctttaagtagcatgtaactaacttgggtccaataaaatggagtagaaatgatgggttctatttataggccacactataaaacctcccatgcacgatctgccatattcttctccttctgccagataatgygggtgacaagactctagggatggcagggccacatgatgtaagatgttttggtctctaaataactgaatggaagaaagcttccctattgtccagaacacctacccaagactactgtgtaagcaggaacttctgyttgttagcatagcctatcttccactattgcatatggtaacaggtcttttcacgttttctactacttctttggtcagtttgggtagtatccattttgttagtaaattaacccatgtcttttaggttttaaaattttaccaaagttgcacatagtagtctcttctaattctgtgttctacacctatggtcatatctccattcacgtttccaatcatacatattttatcctttcttaaacctactccatcttatagatgttttcaaagagccagtttttgcatttatgtaccttcctattacatttcatttgtagtcattaattttaacttttcttgctagtaatgctctctatttttgaatattcctgttttagaaataattagggcatatagggttgtacatttctttcgcatgcagccagcctttgctgtgtcccatacattttgactggcttcctcttcagttcttactagactatttatatttttaattttgattttctatttgtctgaagagctactcaggtaggagcatgtttctcaatttcaaaatccttaggatttttgatacttttaattttggattgtattgaattatgagatgagaatgtggcctatcaaatctctacttttcaaaatttttaagtttttattaatggccaattacataatcaatatttaaagtgtcttttggacatatgaaagaaagcccctgaatattcttttttttaattttttttttctgagatagagtttcgctcttgttgcccaggctggagtgcaatggcgtgatctcagctctctgtaacctctgcctcttgggttcaagtgattcttctgcctcagcctcccaggtagctgggattacaggcatgcgccccacacctggctaattttgtatttttagtagagatgaggtttctccatgttggtgaggctggtcacctgacctcaggtgatctgcctgcctcggcctcccaaagtgctggaattataggtgtgagctaccacgcctggccaaatattctttatttgatggttatatagttctctctatatatatgtattagataaatattcttgattcaacttatccttgtctttcttggtttatgtcattttttgagctactggatctgttcaatcctgaaatcatacactataattttattttaatcaaaatctcctactatcaagagttttggctttataatattttagtgctattttgttttgttcttagtgatttatattttaataaattgtgccttaacattcaccttatctggtgttaatatcgtctgtcctgctttgttttcatttgcatttgaccatctatttttaatttttctttatggcataaaatgtttcttataaattacgtataactctctgttgacctgaatacatatttttatttttcaatacaatctgataatgtttgtattttaataagaatgttcagcttataaaaattagtgaaatagtagatataattgaatatatactatttattttatttttatctttctccattttattacttttgctggtttggccaattactacttcaatttctctttccctttttaatttggacatcttactataccatctatgctgactgttatctttctttccaggacattcaaaggcatatttctatgcaatcaagatatcaatgatgattttacatgcccctccttctgccaggatgttttactcacccattcattatcatcctaataaatatattttggagacaggatctgtctctctgtcacccagggtagagtgcagtggtgcagtcatagctcactgtagcttcaaactcctgggcccaaaagatcctcctgcttcagtttctcaagtagctaggactaagttgtgcaccaccatgctcagctaattaattttttttattttaaaaatagggtcttgctatgttgcccaggctcacctagagtgatcctcctgcctcacaggcgtgagccactgtgcctggcagcagcctagtaaattgagccttttatgagtactttttcttccttacacttgcataccctgtgggcagatgggcctttagaagacttttattcaccctaccttccactacccctaattactgggctttgctgagataatttaacacttctagaactaaatgttcagattttctttgcagaatccctcctctttttcaggtattcttatttgtcacttccattacctgtttccagtcactttaatattacctaattagatttaactgtgcagattgcaaggttcatcacacctctgttttctcttcttttcatctcacccatcttgagatttttgtttgagttcatttattttttgatcagaatatcttcttgagacagggtatgtgggttatgttttctatgaactcttgtatccgcaaatattctacaaattagacaggtggataacatctgcctcggacacttggcaatgtatggatggttttgtggttcgtttgggattatttttttttttgtaatttttttgaaacagggtcttgctctgtcacccagtctggagtataatggcatggtgatagctcgttgcaacctcaacctcctgggctcaagtgatctttcctgcctcaacctcccaagtagttaggactacagacatgtggcactctgcctggctaattttatttatttatttagtagagatggggtcttgctaggttgcccaggctggtcttgaactcctgggctcaagtggtcctcctgcctcggcctcctaaagtgttgggattacaggcatgagccactgtgcctggcctggatggttttccattgtcttctggattccagttttgcagatggtgtatgactgaagtcataatactttttctttgttagttacctgttctctctgtttggagctcatgacattttctccttatctttgggacttaggaggacaccttgctgtatgtcatttcccatgtctcttgcaagaagctcagttccatttgcagactcaggtctttcttcaagtcaggtaaattctttacttccatttgttaaattcttgtctcttttgtatttgttcctttttcccyttctgggattattgttattcacaagctgggtttttagagtctgttctygaaatttctttttgcccctgatttttatttctttgtatttttgctcttgtgtgtgcgtgtgtgtatttttctacttgatcttctaagccgctaatttaggtctctacagcaaccatccttttcatcaactactctgctgagctttttagtttgaaaaatcatgatttttattcccagaaagtctttcttgttcatgtgctgtaattgaataccgttaagtgctattattattttttgtttgagttgccctttgtctcctttagcagctctgtttcatcaacagcttctccttctaagtgttttgtttgctcatgtctccagcttctggtcctctttgtgggtggctttttttttttttcccacttgttgcagcttaggaccagctgccttcaggcaaagtcagcagagaatggtgatgtgtgtaagaagtaaagaaagaggaaagaaacacgaaaggtggctcgtcagttaagacaggtttattttagagaaaacaaacctgagaagagcttctggtgcagttaggtcagaggcacattcttttacagactaagagtttttaaggattcagggtgggggagtttattagaggcttaggctgcttttgtgtctctttgttgtgcttatctgggagggagagttgtgtgtctgttcccatacattgttctgcagctgcaggcatatccccactgcttttagcttccctatcttagtgcacctgaagggaaaggaatgtgcttattaaggcccactgttgtactggggcccattgtatgagggtgaaatttggcagttacccaagagactttccccccacctccctctgtgcctgagttgtcttacttgtgttttactgtctgctctttttggctgcttgtagttagaagtgatttccttgaaaatgcatgaggctagaaagggaactgaacttaaagtggtggtgtttgtccaagatgatgattctcctgctctgtcagtgtgttgcagtctcagctcctatwccttgtaggagcactaccaccagccaggctgttggttccttgcagcaccagaaggaataccctgagctaccctagctccaggctacagaggactcagtaggcctgttcagcttcccatcccttcctctgggccacagagacaggagatcccctcagaacattcttgacgactggagttgccttcctcccaggggcctctcctactctgggccaagctttccccaggattcagggacaactgatcttgctcctgtgtctgttcttagatgccattctccaggctctctctcaaccctgcaatgaccttctccacccagcccggcagatcctgaggtctcgcttagactccacacctgtgtgctgctctcagtggctccctgcagttgaattggtgctgagagagacaccactagctatcagcaggggcacattcaaaccaccattatccagaattgcttcatcaatttctgaaatttcaacagtgaatgatagaaacttccaagcaaatattcttttaaaatttagatttctttgaaatctaaggaaaatgagaaggtttctatcttgcatttacttctctatcctgccacagtctaagagaggggtttcagtgttagtttgaaaggattttattcattgggaagtgtttctagaattttattagtagctgcatataacaccactgctgcagaggcctaattcatctagactggaattacttccttactgggatcacttggggacttctaggtttaatccatcacaaagtaagagttccagaagcacatggggataagattccataacatgagaaaggaggacttggtgaagcatgaggatcaaagtgagaatctggagatagcaaggagaaggtttgaagtgacgtcagggcaggctgcaggggactgtgggcccatgacaatgatagtggatctttgtcatacaggggatgggggacaaagtggatcctgattcactgggaaatcagttggccaagatgttatcatcaaatatcctttccaatgagaaggactggaatatgacctaggtcatggatgttggcctttttctttgacgatcgtgacatctaacaataattgggtcatgaggagggatttgagagatcctcattttttagcatgtgtttcataccaaacagtgtgcctggtgctgtcccatacatctcctgtaatcttagccaagactttttgttaggcagcattttcacagtttaccatgaggaatgagattctgagaagctaagggtctatgaatacgaggtcagtaaatgctatgggacgtctcacaagctgatcaggaggttggctccgatgtaccagtgttgttggcaagcacaggtttttgtccaggactggttcacacggtgcttaggctaagaaagcagccactggctgtttgctctcctgtgcctggagctgggctcattgctctctgggaggggcattttggaagacacttctgctgcatgggcaggagcagaaagacagctgtgaccaccagcctttcccaggggacagttttttatggcattggcaattgaaatgggagctcagttcccagactttggagggtcctcaatggaacaaggagggatacaaagaaaaaaaaaaaaaaaagcaagtacacagttttagtgggagaaggcatccagccccatcactagaggcaacagctgtctgtaggactgtcctgttggtgaccgtacttctgatggcctatttaaaacatcaaaaaataaataaaatatgaaaaagaagcaaacaagatgtagtaaaaggaggaaaggatcaaattgaaattcatcttgcatagaaaaatatgactaacatcggataaggacctttgtgtgaaaaaaaaaatgttttaagcaaatgtctgtttacctgcagcatctcactttattttaaaaggtaaaaagctttaaaaggctgaaaagggatgatgcatgtcagactgtcatagcgatgacgccaggactccctataagggtgggttcagggctgagctttttttgcaatttgtggtggtttgttatagtttattttctgcttaatgggttgtagtttaaagccatgggtaaaagccacacagggggcttataggaaagtatccctagttaaaccagcctggtaaataagcagttagtcctccctgcctctgccttttggctttcctgttgttgattcagtgaacaaattagatttcacaaatgtttagcaaacatctgctgtgtgtccagtgctgtgctcagcattatggcaacgaagcctaagccctggcccttttgcctggagacttgcgaagtcctgcaggctagccaccccggaaggtccctgtcctggtgtcattgaagcttgctgatgaagaatccctgggtctttgtccttgatccctgcaggcttgtgccctgcaggctgggtagctcaacaggtagcagcccccatctgcatcctgggtagtctgctggggcttcacagctgcagcagggaggattgtgttctctgcctcattccagctgctgtctttgagaggccagagtgcctgttgttttaaatcctctagctctgctgaacaaccataggggtaggagacagtgtgtctaactctgtcttacaagtggggtacctgattgagggaagaccagaatacttgactcccaaatcattcagagatttggagttagagttcaagttcccaccatttttctcaacccatctgagtcaggatgagttatagctttaaaaaatctgacttttaagaatggtttcacgtgaatctagtgcctgtgtgagagttgataatacgtgtcacagagtcagtttctcccactcagagaaaaagaccaatcagctttacattaattccccccagttttagaacagatggttttctgagcacttagaaaaaaaaattgtggtgattgctacagggcaggcatggcttgcccaagaaccaagcatgccgtgtgaaccttggttcttctttcctgtggttgtttccctgggaggtcagggaaggacataggaaggctgacatctcgcccatttgctgccattctcttccctagtgctctaagtggctgctgtgccaggatatggccacagtcttcatgcaagccagcaccatgcttggtatttcttggtaggctctgattttgctcattggaggttgccttctgggtaagaaaggtgattctttctttctgtgactttttaaatcttcggcttattcagtttctaaggtgcctagtgtttggaagtcatagcctttggaatcactcattgtctacaggtgggacaaccattgatgtgcttagccagagaatagtgaatagagtgcgtagaaacaagggtccggaggaagctgtgtgctctctgcatttataatacacggatttaggaggtaagaaagggagaaggaaggatctggtgtggctattcggaggcctggaatattttttcaaagaaaggcagtatagaaattaaaccagtttttgaaagatgaggctcaaagacaaggaaagaatggatttgtttttaacgatttcaagtagaattgaggctgttcctgtgattgttggaaataaaattggttagaaaatgatgtcagcagagagtggggactgtgaaccaggaaaataaatgagctctgaaatcaccttctattttataaatattgtttctggagctgagaaaattgagacagattattcctttttctctctcccaagctatgggtggaagaagccctgagtatcccatttggaccttgtgaggagcatctcatcttgtcctggcgcgctaagtagctttgtctgcatttagacacactccatttccctttcaaggaccactatcagcagtagccaattacaaacacacctcataacacattattgagacacactgcacgcaaataagctagagagatgtttaatgattgtaccacatcgcgtccattacaatctgtccgcactgccgcaggacggtggggccagttcctgtgtgagtgtctctatgtctgtgtgtttatgtgtatttcattttcactgcatcctaattagacataattcgagccaagccagtttatactctcaaggaaggaaagggagcatcatttcacattctgacagactccttttaagccagacattccttgtctttagttttctaaaagtatcagtgctattagcagcctgaattcatctgagaacaagggatgaggcattttccaactcaatgggtggcttccttctgttatctgtttctcgtggagaagtaaaaggtgggcaattcagagaaatgttacataggcagtcacttcctccactctttcatctgctgtcttggttttgcagtgagagtttgctgaattttattttctctgccatttgccactgctgttggttttgaagtaatggctgcatttggccacagtaactaacagctgcattccaggcctgggtgaagtggcagctgattcaccaagcacaaggcctccctttatggtgttaggggttggaatctgggaatgagataacagctgtgctgagcaagaggttaaccagaatcctcacttgttgaggttagaagcctttgagttgatcaggtctacttgccctctccgtggttgatgttgagactagggagaggaagttactttctcaagagtatcagctggttaatggcagaacttacttagaacctgacttctatgcccatagtccaagctcttttcagtctgcctgttccaacctgtgctgtgcttgcctttgtaaaatccaaagctcagtagggagcagggagctgccgacaggaatgctgggtgcctgctagaccctccagccatgacagccatcacagagcatgcatatgattaatgcttatatagtcctcattccccaaggacactgtttgtgtgctacagagtcttctgaaaaagggcatatgatttcaaaggattattttatcaaaggattgtttttatcctcattcttttggaaaaaccraatgcccaatgctccaaccagtgttacctttcttgcattttgctcttgaagatctgggccttccttgaaggagtagcatagggaagagagaacaaacccttgtgtttgcctttaagtcagctagagatgttttcagcctgatggaaaattaaactgggttaggtcttctagagcccgcctgtgtaattgagcgggtgacgtgtccagcctccctaactcggaaaaaacttactgttcacacttcattcatacgttccttagtccttggcaagcaaattgcttttgaagaatttatgtttccatctgccacttctattagtaagggcaatatttgtgactgatgtagtgatggtggagtcctggggccctggtgatttgatgttgtccatctgtagcctgaaacttcagggttcatgtggggtcagaggcaggagtctggccttggtatttcctgaattacactgcctggctggggagcctatgtttgctcacagccaggcagatggtgccaagtagtggcgtgttcttactgctacttttgcagccagccagagatatgagacaggacagctagctaattggtattttgaagaatctgctgtgtgtttcagcgtgagtgtgtgggttgctggggaggtggtgagagtctgaggtgtggggtaagatcctagtcctaaagaatcagctgtttttttggctgatggtctatgggagagcagccctcaagctttaggggaaagttaaaggagaaacaggaccgaggtgaaatcatcagcaccatggaaagcaccatgttgcttgacgtttaggaaacccttcataatggcaaacagacttggcctcatgtctgtgccttccctactgttctttgataagaagaagctaatgagaaggacagcatttttttccttcccattctgctaatagagagactgagtctcaagaggtgactcgtttgagatgtagtggtgaatcagtggaataggcaaataggacttcctgtataatgtggctgctgtacaagacaacctcttctgctcttcctcctggataccattacagtctccttgttgctggacacaacagcaaagagaacaatagaaaactccgaaatgccattttcagtggaattagaggatagatacaatctgtggaatgtgtaatgtgtgcaagggctgtcctgagcaggagggtttgggagaggccatgagggggaagtagaggtttaggagagtacctggtgggctcaggaatagcaggtggcaaagagtgccagaaaaaatacacatcctggatataaggggcatcctgaagaggcaaagcaacatctcttatttgtaatcaacgcaaataaggactagggtgagcaaaactgaagaaacgtacctcctgggcctgctttgattcagagaagcagaggaggtgcatttatacaaaggatcatccagaagacacctawctgcaagaaacaatgtttttggcagcaaataaaagaggcttccttctttccttccttaacatgtttgttgagatataacatacaggaaagcacacaaatatttttcagtttgataaacttttgtgtaaccactattcagatcaaggtacagaatcttttcagcagcccagaaatctccatgtgcctctttctagtcattagctctcctccacaaagaaagcttacttcagtaatgaaagtctaccctgggmcctccttccatcctcagaacttcctgcaaagaaatgatccaagaaagcccatctcatacaacaataagtaataaaaaagaaagtaggatcattggtagattagaagcaatgatattagggggaagaatgtcagcaagagccacgaaaattacccccaaataaggaacattcccaggaaaataatttcagggagcagatgaaaagtctaatcaagtatttcacagtgaatttaaagaactcaacaaagcaatcatttctgtgaagaaagacccaacttgcagaggtaaatgcttgggaaaggatgacaaaatggcaagaggtggtgaaatgtgagctggcagaactcaaggaggaaataaaagaaaaaaaggcaaattggtctcagaaatgaagatgaagttggaagaatctcaagggaaaatagacactgtggaaaatgcagtgtggaacatagatgaaaggtgaataaatgaaacataaataagggaagcattaataaagattagagagaaaatgattgacatagaagacaggcagtggagagccagcagaagcataattttagttcttgaaagaaaacaaaaaataacagacataaaaaatagacacacagaaaacacacacaatggaacatatttaaaatattaggaaggctttcatgatctaaaagaagacttaaatctaaatgttgaaagagcacgaatttgggtgttgggcaaaattatccagaacagctcataccaagattatagccttgggaagttttagacacgaaagatagggaataacccctcccctccccttgcctccttttccttctatgaaagcagggtagaaaagtgggtgtggaggtggtgggcaggggacatggctagaatggttggaagattggttaagagaaaggataatttattgagcaagtaaataaatataaagaggataataggmaccgtgttttttactgtttgaaaggggatttctaaacatggaaagaaggaaggctagaaaagtcctagcatgctggattggaattagaagtgtcagtatgtacatatatacatacatttttttcttaactccttcgtcygaaagcagtggaactccagtarcaatgagtgcatggtgagtactcagaccttggtttctttttttctttttcttttttttttgagacagggtcttgttctgtcactcagactggagtrcagtggtatgatcttggctcactgtaacctctgcctccaggttcaagygattcttttgcctcagcctcccaaataggtgggattacaggcatgggccaccacacctggctaatttttgtatttttagtagagatggggttttaccatgttggccaggctggtctcgaactcctgacctcaagtggtctgsctgccttggcctcccaaagtgctgggattacagagatcttggtttctaaatagtgccctacactgcaagttaccagggggcctcagagaagtggctaacttaagggatagggcagaaaaagtataaaatgaacctgaaagaccttgtcttgccagaaagtcaggaaatgctcaagaaaagatggggatgtgtcaaaaggacacaggagctggcttgaaggactttccactgaccaattgagaacaatatgagcatcaaagtaaatatcaaataatcagagtattagattacaacctattgaataaaataggaatctgtaaatccatactgttataaataagtgaatgaatagatacatagacaagtaaataagtaagtgcaagagaagagactcttccttaccgaaaaatgacaactgataaatgtagagagaatgatggagatacatattcaccacttggtcaccgtaactgtggtaattggtagagattggtagttgctgatgggtgctgtcytgtgggtggaggtttcataagaaatagcatattggcacaatattagtaaagcttcccacaaaagtgtaaccaaataacatggaaacatggtaaaatttcagtggcaaaatttggcagacaccaacttgaccagatgatgaaggttaacatcactagtggtggacaggttgagctagtgtgcccctggatgtgatgggctgagaagaacacagcatcatttctgttgtgccaagaatgcatggcttgtatctggttgtgaggaaacatcagatggacacaggctctacagaaggaaaggyctrtactgtttcagactttcaaagatttgagaaacagagaaagactgaggaattcctccagactggatgagactgatgagagatgacaactaaatgcaacatgtgttggtagataggatcctggacctggaagtgaaaaagagacattgttgggatatttcagaaattcgcataggatctgtggactgggtctgtgctgtatcattgttgattttttgacaaggagtgctgtatggtgactatataggagaagggtccttgtctttgggaggcatgcactggagtatttagagatgatgggaacatgtgaacaaaaatgtatatctgtttctatcttctgtctctacaaaaatggggaaaatatagcaaaatataaaatgtcaccatctagaggatttgtgtggaggaggtgtaagaatttgtactgttcttacaacttttctttaggtttgaaatgacttcaaaattaataaagaatggtgaagtaaacaataaataaaaagagagacagaaagaaagactccattgggaatccaggcaaagagatcaagtcacttatgaggagaaaaataccaggttggccacagttttttctgcagcaacttccaaatacccagaagacagcgaaacaacatctacaagataagcaaagaaagaaagtgtgagccaacgatttatatccattctagccatcttttaagtacaaagacaattgtaagacaatttttggacatgcaataactcagggaatattgttcccatgagcccttcctgaacaaattagtagagggtgaacttcagtcaacaaagtgaagatggagggtgagcattgaatatttttaactgtaaaactaaactaaaactaaaagtaagacaagtatgaggattagaagaacagaggagaatgtaagtgttctgtgccctggtgatgtagaaatgacacagccaacaaatattgaaaggcaaagggggaaaaaggaagttctctgaatgcctcattctataatagcagggagtaaaaaggtataattgagagctgacaaatgaagtaatataagcataattatacttaataaatggtagacacttagaaagaggatgttattgactaaaatcagktggtggaagtgagacagtagcattgccagagtaaattgtgcctaggggctatgtaatgtgtgtgtgtgtgtgtgtttccttcttctctatacgcagctgccattgtgttaacatctctgtgcactttcacaactggctgtcaggatgtacgtctctttctctctccaccccaatcatgccttttctatgcttctgtggaaagaacagtgaaagggaatacaccaactttatctttgcttgtaatgtagagttaataagtcttgtctagagacataggttaagattattatatcatgttgtaattacgaatgttaccactagaataaaaacacaaaccttcccagaagaatcacactggaagaacaatcacagaaagacgaaaaataatgccaagaaacccagaagacataatataaaatgagatctaggaataagcctatttgtcatatctaaatataaatgaatttaacttactttttaagaagagtttcagaaaggatcgcacaccacaacccaattctaagttgtttatagagatgcccctaaaggaaagtgatacaggaaggttgaaaataaaaggatgagtgaaggaacaccagccgaatgctttaaaatgttaatttaaaatagagatataaaaagtagtagttatgaacttgcattagacaaagtggaattcagattaaaatgcattaaataagataaaggaactatgtataaaaggtacatatcacaatgaaaaaaacagcagtattgaaaacacagaaattttaggagatgcaaggagaaaatagacgaaaacacgctggtaacggatcactttaatttacatgtctcagtctccagatacctagacaaagaataaaaatcaatatggaagctctaattaacataggtaataaagtagatctggttgataaatagcaaaccctgtagattaaatgaagaaaatatatctttcaagggtctatgaaacattcacaaatattgaccatctattagggaacatagataacctcaataaatcccaaaaggtagaaaaaatacaatattctctgattacagtgcaattaaactggaaattaatactaaatcataaaaccaaaagcccatttaactgaaagtaaaatccaaacaaaacaaaaaatactcaatgcatggctgaaagaggaaaagaaaaactgaaattgcagattttctggaaaacaattaatgaaatcactcaatagcagaacaaatgttatatagctaaagcagtactcagaggaaaactgatggcttaaatatatacacaaaagaatgatcaaacatgaattaatcatctaagtcaagaagctatatcagaataaaatgaaatattgcagaaggaaagcagaaaaaaataaataaarwagagattaatgagttagaaaacaaagcagttaaaataaatttcaaagctggtttgggggtgtattagtccattttcatgctgctagtaaagacatactcaagactaatttataaaggaaagaggtttaattgactcacagttcagcatggctgggaaggcctcaggaaacttacaatcttgggggaaggggaagcaaacatgtccttcttcacatgaagcagcaaggagaagtatgagtgcccagcgaatggggaagccccttataaaaccatcggctctcatgagaactaattcactgtcacaagaacagcascatgggggaaaccaccactatgactcaattatctccacttggtccctcccacaatgtgtggggattatgggaactaaaattcaagatgaaatttgggtgggaacacagccaaaccatrtcatggggaaaaaaacaacaataaaataaactactagttaatctaatcaagaaaatgtgggagcaagtgcagatgcatacaataaggaatgatatgtggagaacagtggcataaacaggaaactaaaggaatcaggagactactttgttcagctctatgcaaataggtttgaaaagtggatttttttcaagaaaataaaaattacccaaatgggcccagaaaggaatccaaaatttctaaggcagaaatttttttaaaaaatttaaataggtatacattcttcaaagaaaaatgcastagtccagagcatagaactctgttctagagcatagaaaaagaagagaaacaagcataacttttaccaaaacctgacaaagtaggcacacatggaaatccaaagactaatcccacttatgaatatcaattcaaagatcatttaaaaagtagcaaaataatttcagcagtatatttgaagactaatccatcataatcaagagggttttattcttggagtgcatatatggttttatattagtgaacattaagagaaaaaagatattatcttcatagatactgaaaagggctttgagaaacttcaatgatcattttaaaattaaaaaatacactcaagaaagcttgactggctaaggttattctggtggtccctgactcatgatgctttgatacaatcttttgattttattatggtaaaaaaagaatatgcattcaatagaaaccatactttgagtacccatgcaaccactctgtttttcactttcagtacagtagtgaataaattatcggagatatttaacactccattataaaatagggtttgtgttagatgattttgcctaatcatacgctaatgtaagtgtcctgagctcacttaaggtagtcttggctaagttatgatgttcagtaggttaggtggattaaatgcatttttggcttatgatattttcaacttatgggtttatcaggacgtaactctaccataagtctaggagcatctgtatagttcaggtatttttttttttaacaggctaaaacacatccatctcaggctataagccagcattatgcttattgaggaaacactaaaggaattatcactaaagaacaaggatctatgctattagtaytgttactcctcattgcacaggtgatamttaccaatgcaattagacaagcaaaaacagtaaaaaagagagggaagaggcagttgttgctgtatgaagatgctgtgattgcatggctagaaaacaaaagataattaactgaraaactgtttcaaacaataaargaattccataaactaacaatgtgcaataattagtaaacataaattaatacttttcacatatacaaacaccaaacagaatacagtaagtcctcaacattgaggataggttcttggaaactgcaactttaagcaaaatgacatgtaacaaaactggtttttttctcatcaaagttataacaaaaagatgttgaaggaaatggtattcaaggacttattgtacatcattgtgcttaaagtcacagtttccaaccacctatcmatgatgttaagtgaggacttaccgtatatttttagaggaagagccatcacttacaataacaacaagaaatgtaaaagaactaataataaatttaaacaaaaaatatccagggtctatatgaagatttaaaaayrctactaaagtatataaaaggatcctgaagcaaatggaaagattgctcatggatggaaaaacaatagacatcattctatttaagttaatttataaatcaaacacaatctaaataaaagtatcaatagataattttctaaaactagttaagtttgttttaaagttcaaataaaaaggtaaataaaaatagaaaaattctgaaaaaacccatatgaggtgactggcgctactagatattgaatttattatagtgtgtcatttattgaaactgtgtgctacagagacatgcacacatagttaaaaggaaccaagtggttagtccagaaatagatccaaatgcatatgatcatttagtatttgacaaaggtagcatcttaaatcattgaaggaaaagattaaatatgttccactgggatatctggtagccctgtgggtgaaaataaaattgtatccatacctcacaccatgtatacaccaagataagattccaaatgaaaacgaaatgtaaaggtaaaagcaagactatgaaagtaccagaaggaaacacacagggtgcctttctaaccaagacttaaatcttgaaaccataaaataaaaatctgatataactgagtaaataaaaattgaaggaaaaaaatcttctaagtagcaaaaagaatctacataagtaaactgaaaagacacatgacaaaggcctaatcaacttaaataaagagttccaaagggtcaataaaaatgaatttcaatccaatagaaaataataggcaaaggatataaacgggcaatgcacagaaaaagaaatatgaatagacctaaatttgttaaaagatgtacttaacattacctcatcaaaactcaaagctatataggaatagcatattttatctatcagattgcaaaatgaagaaaaaagggcaagctgcacaatagtgtgtattctatactaacttatatataaaaagtggaggcattgtagaattagaataaattcagaacmacatgggtttgaactatgcagattcacttatatacagattttcttgtgcctctgccacccctgacacagcaagaccaacccctcctcttcctcctcctcctcagcctactgtatgtgacgatgaggatgaagaycttgatgatgatcctcttccgcttactgaatagtaaatatattttatcttccttgtgattttcttagtagcattttctcttctctagcttactagttgtaagactacagtatataatacatataacacatacayatgattacaaaatatgtgctaatgggctgtttatgttattggtaagtcttctggtgaacaataggctatcggtagttaagttttgtcaaaagttatgtgcagattttcaactgagcaggagattgattcccctaacccccacactgctcaagggtcaaccgcatttatacttacatctatttgtataagaaattctggaaagataatacaacagactaacaatggtttcccttaagggttgtgacatgaactggggatgggcaagggtagaagggaaatgtttcattgcatgcctttttaattttgaaccacatraatgtatyttttaaagggattattatattaataggattctgacatagtcactgaggtattcatgtcagaagatgatgcacatcctcttgtcctccacatacagaaaagtatataaatgcttctatgccaacccagtgaaattgcccaaaggctttcccccgctaataagccatgaaggatagaggcagaactccttagagcccacagtgagttttgcaggtaaaatcagcattatcttgaatcactaacctttattaggcactggagtgtttgtttgcagaatgcagtacatttgctgagtatgcagtttggatctcccctgataatatgtatggatctggatcaagtgttaaatgcttgttttgcagctttttaatagagacgtagaatgtgattgaggccagcttgagattactcagttcccaattataatgtaaatttgagaagttctgatcaagtagagcatagggcacaaaatggtggaggtggaacagatcrtggaaattaactaggcaaacatccccatttcagcagttagtaaatactccagcctgggtagaaggtactcagctagttagtgctgagcttgaactagaagctgaggttctgagtgccagttctgggttctttcccatctgttcatttcccatgacacaaaagtcttggccagtcagtacagtcttgctctacaaacaggacagggatcttcagcatcaggggagtgagggccacctgtgttaggaatccaatacaggaagcctgctgggtgtgaacaacaggaagtgtgacccaaataggcttaaacgaaataagaattagtgaacataactgaaaagtccagataataataccctggtccttctctgtaacaaaaaccctattttattttcttataggccataacactctcaaaagtatttcattcaattttttttttttttgcttgtttgtttatttgggtgctcgatgactgcaggggccttgtctgccttgccttcatatctcccatgcctagagcacatcttaggtgctcaataaatacttgtggaaagagttaattctctgcccttggagtggagagtgcaggatggagcaagcacatggtctgagagtggggagagggattattccccaaaaggcaatgaaatgtagcaatggatgctaggaaccaaaagataacaaatgtccactgtgcctcaaagactttcaagtaatctcctttagctcttttctccttccttgtttcctagaaaatgtcttcaccatttttgtattttcctttatactgaactgaactcaggaggatgggaagaagattccatcactgtatctagttatcctatctcacataagcaggattgccttgagaccactggctactatacagagaccctctccctcttccccagctagaggctcatgactgtttttctttgatttagaaccagcactatgctaatcatgtgtggtctcaaagcaaggaaggaagaatatggttgtaggaaggcacttttaatgggacgcgattagwggatgggaatccaaagtaaagtggggacctggattcctgagttatcttcagggatcatctgccattgctgtgcctcttcacttagatgagttgtgatgtggttggatggtggtggtggtgctggtggtagtgtgttggtggttaccatcttcctcatatatacatttccaaggtattcagaaaaggttttcatttagggcatgtattatcagaagactccaatattaaaccaggactgtgatgttttaattgtgtggtcgtggacacatgatttaccttcttattgtcaggttacacttctacaaagcaaagataatggtagcatcttccctatatatttctcaggattggtgcagggatcaaatgagacaaggcatggacaagtgctttgaagactgtaatgcacaagacagaggctcatcttttaatgactctgttttatcctcataaacttatacatcttaaagactgtcttagattaaagccctcaacttcataggaggaaactgaagtgacaagagacttagccagggccatatgcttagctagtaggggaaaatttttcctagccactgtgagaagacatatactgtaataggcagaataatgtgcccccaaagttgtgcacatcctaattctcagaaactgaatatgttaggttacatgacaagaggaagttaaggttgcaggtgaaattaagttgctagttagctgatcttaaaataaggagagtatcttggactacccaggtgagtctgatgtaatcacaagagtccttaaaagtggaaggaggaggcagaagaggaagtcagagtgattccatgttagagtgactcgatccattgttgctggctttgaagatggagatgaagaaaagaggccatgagccaaggaatatgggtgaacctagaaggtggaaaagagaaggaaacagaatctctcctaagagcctctagaaggaaygcacccttgctgacaccttgattttagctcagggaggcccatattggatatgggcctaatctaggcaggataataaatatgtcttgctttaagctaccaagtttgaggtgatttgctatagtagtgatggaaaactaatayaggtaccatttctcagattttacaaatgagaaaactaggcacacagagagacttttcttgtcatatgtcttacagctactacgagaactttttatagggraagtagttgatttgttgaatayaatatattcaataaccattctatgggaatagcctgggaaagattaggacatcaaatagctggccttggaaataaattttcttctctctgtagccagcctgcactaccctcatggagggtcaaaagcttcaaaatttctttttcagtgatctagtgtcckgatgagtaggaagtgacttttttttaggacccaagaacatcttaggggcaagtaaaaagtagaargtcaagacagggattgctcttattaaatggagatggagactggcatatgaccctttgggggwtgatttcttgtgtgtccagttattactgagtgggaaaaaagtggcttaatacagaacccacgctatgtcagatacttagcttgcaattgctcctttgtcagggctgatgcacatttggtagcacaactggagcaaggttgaaatttgtagactatgagggctgggtgggatcctgctggtcaccccatgttgtctttgtgttagtgacattaagatatccaacaacaaatctctatcaagattaattcacctctgtgttgtcttctctgggttgttgccccctgttttactttttccactcccactgttgtttccatgacttgactctgcttctggtacctctttaactcagctcatcactggtactcttagtgctcagctagaatatgttcattgacttcactccagacttgacatttttgtggttattcttgggtgtcaactcctagcctcttcctgattttgatcttgatattcctatcttgtggctgtgacctggctcctggtccaatctgttcattggatagaggagttactgtggccagggaagggagatgacttgcctggatcccaatatcattggggcagcaatgggtccagagctcagtttctcctactctattccctgcccctcatctggtattcaccttacagtgagtgtctgtatgggccagaaacagcctatgccttccaatctcaagaccagcctcatgttctttgggaaattacttaatagtgtatttccattctctatgtgcaaaatggggagaggagagaagaagctgagcaacacttggctagtggtgaagtctggcatgtggaataaactggatcaaaggaggcccaaggctatcctattgctggagcaaaaagagtgatcaagagcctctggccacatattgcccatgtctgtttcctgtggttctctgatcacacaaacagttatggcctccaaatggcatcgggtctgtcatgcatgtccaagtgaagagaccaccaaacaggctttgcgtgagcaataaagctttttaatcacctgggtgctggtggactaagtccaaaaagagagtcagcaaagggtgggattatcattagttcttataggttttgggataggcagtggagttaggaacaatgttttgtgggcaggggatggatctcacaaagtacattctcaagggtggggagaattacaaagaaccttcttaaggatgggggagattacaaagaaccttcttaagggttggggagattacaaagtacattgatctgttagggtggggcagaaacaaatcacaatggtggaatgtcatcagttaaggctattttcacttcttttgtggatcttcagttgcttcaggccatctggatgtatacgtgcaggtcgcagggcatgtgatggcttagcttggggtcagaggcctgacagggtcaaagcttggagctagggtagatcttattgcactaaagtaaatgtgaatcacttggatttaatggctttccagtgaatcagcatgattgagaaggacctctcaggtcctgcttggggtacttcagtgtaggacttggaagagcctgacggctccactgttccatgctcacaaatgtttttcttaataggagattgcaagtctgcaaaagtgctttcagtccatttgcattcaacacctgctggatgctacagaaataaagtgatgtatacatgatagataataataagaaatgtagcacttgtcatttgttaacggtgctattcattattyttcacaacagagtggcrtgatagattcaagttatcttcctaaagaggagagaagcaagtgcgatgtgtgcaagttgacatgccatgcctgtggtctgtgctgtggatgtkyagtcccaggctccccagacactgcctctcaaggggrcatggcctctcctctagatggctaatagaaccttagattcccaaggctggaagagactgaggacactggccaggttgtcaagatctgagtcttgttccaccataatgacattacttcaagttctttaagctgtaagagaatccatctcaagctagcttctgcaaaatgagactaatctgtagtaacccagaagtttgatcatggaaaccagacctcatgaagagtttggagccagggactgcaaggctgttgggagcccaggactaactctttctccatcccatctctctccttctctccataaatctgctttatgcttctttcctagtaagccagctttccctgctcctgatcccacatggtgggcagagatattacactttcagccgtacacatagcaccctgtcctctctctcattctcaccctgatctgctctcaagttcttaggtaaaggaccctgatggaacgaacctcagacaggagccacttctggttcagtaaactgtgttagaatcatattgtacaaacatagcatccaggagcctacccttgtggattttcatggtgtagttaaggaggtctttgcaaaatgggcaatctattaggttgatgcaaaagtaattgcaatttttgccattaaaagtaatggcccaaaccacaattacttttgcaccaacctaatgaaagggtacccatgttagtgacccaatggtcatcttgcattgatcactacattgtatattcactacactgtacatttgtttttctgtgaatacatgtaatgacagggaactcatcccctgaaacagctcagacagctgargatgattttttatattgactgaaatgggtctccagtcccaggttgactttttgaagccatggagagggagccttatctcctttcttcatgacagstgtttggataattgaagacaccctgaaattattgaccattcttcccgtgacacatgtctgagtctcagcatgttcctggttgttcttcagaatatgatctgttttgtctatatccctctgctgtagattgaatatttgtgtctccacaaaattattataatgaacttaaccccaactgtgatgatttaggaggtagggcctctggtaggtgatgagtcatgagggtgggaccctcatgaatagattagtgcctttataaaagagatctgtattagtcagggttctctaaagggacagaactaataggagatatatatatatatatatatgaaggggagtttattaaggaaaattggctcacatgatcacaaggtgaggtcccacaatagactgtctgcaagctgaggagcaaagaagccagtctaagtctcaaaacctcaaaagtagggaagccaacggtgcaagcttcagtctatggccaaagtcctgagagctccaggcgaaccactggtgtaastccaagagttcaaaagctgaagaacttagagtctgatgtttgagggcaggaagcatccagcacggcagaaagatgaagggtggaagactcatgaagttggctccttccaccttcttctgcctggtttattctagccgcactggcagctgattggatggtgcccacccacattgagggtgggtctgcctcacccagtgcattgactcaaatgttcatctccttggcaacaccctcacagacacacccaggaacaatactttggatccttcaatccaatcaggttgactgacactaagtattaaccatcacaagaccccagagggctcccttatcccttcyaccctgttaggcaacagcgagaagatggctgtctgtgaatcagagagcraaccctcaccacacactgaatctgctggtgctttgatctaggacttttcaggttccagaactgtgataaataaatttgttatttgtaagccacctagtttatagtattttgttatagcagcctggatggactaaaatagaattcccagaataaaatcttgactcattctagatcctttcacaggagtggccttggggcaagtacagagatgatctctatcaggagttggcaaacttttctgttaaaaaactaattagtaaatatttgtagctttacaggccttatggtctctgtcacaaccactcagctctcctggtgtggcacaaaagcatccacagatgatatgtaaacaaatgagcatggtgtgttccaataaaactttatttatagatactgtaaattgaatttcatataatttttatgtatcacaaaatattctccttttgactttttttcaaccatttaaaaatgcaaaagcccttctagctcccctgtcctgcagaaatggggggtgggtaggatttgggcctcaggccatagtttactgatttctggtccatattctgtcgtttagggtcctgattacctcccccagtcaaagcaaacccagtttctttcactcatgcctgaaataccttcactgctgaaggaggaaggcattgtccttcataaaagaggaaaaggacacatcagagggtcggtttaaaagtgaaaatatttttgagggaggtaatacagcctctaaaacttaagtgtgaattagtactcactttgtaaaacactcgccagtttataaaatgtgcattacttctcacagtgccagtgaagtagatatttttaatgttctcttcacagatgaggaaaaagtcccttaaagatgaagggactgccttcccttcatctttagggatgtggtggctcatgcctgtaatcccagcactttgggaggccgaagcgggtggatcacctgaggtcaggagttcgagaccagcctggccaacatggcgaaaccccgtctctactaaaaatacaaaaattagccaggtatgagcctgtaatcccagctccttggaaggctgaggcaggagaatgacttgaacccagaaggcggaggctatagtgagtcgagaccacatcattgcactccagcctgggcaacaagagtgaaactctgtcaaaaaaaaaaaaaaaaaaaaaaaaaagatgaagggactgccttaggcagtgcaagcagagctggagctttctccaggtgcgtcagatgcgctgcctacctgtgctgttaacgtctaagaagccattcattggccatccacgtgtgcctggctagagaaggaaatacaggtgaatcagatgcagctccagtcccagggagctctgagtgcagtgggggaagtacctagtgttatcgtcagagcttggctagaaggtgagagtagggtggtctggggatctcagaagagggggccctcacccagcctggctgtgaactgggggccttcttgagggacactttgctccatcagtggaggaggggtgggttggcctgatacttttggtgtctggaaatgatgggaacttgggagggtggatcggagcccttgaggggatggaggagtggacacccacccttgccttacaagttagtccatggtgtcccagttgccaggcaatggagttctctggatcagctctgtttcctctgcatgtaacttggatgagtgttgaaggtggcacacagaaccttgtgaaactgtcagactgagactctaaggtccattcagccagtttgactgaggctggggaggcctttgagaacaagctccctytgctgtctttcaggtataaacaaggtctgcatggtagctttggaactagcacgccagctgcttggtatttctgggatcccttgcacgaaatatgggctccctagcattacctgtcagatctggtgctttttgtttcattaaaaataaaacagaaagccctctaagcaatggcattaaagaacatctagaaaataaccctctgctttctcaggaaagatgtcagtatgtccacggcaggattgatgaaagaattcttgaarcagtgaagaaaacggaccaagcttcagggaagttggcataagaagtgagaaaaaaaaataaatccaaaccagaaaacgtgtccgtctccagaaacaatagttctgctggctaaccccttagcagctggtcttccctgattttctgtggcccaagtcagctagtctataagaggaaacagtaacaatcacatactttttcttcttgagccagttaacaagtaattattaagcctcctcagcatgaccatcactatgtcattggtactgtgggggactcaaaagaagcaaacgtgatccgaatgtctcatcaagctcaagttcagcagaagggaaagcatgcctaaatcctacttcaaacaatgagacgagctaatcagatgtcccactcgagttgasattgcaaatgctataggaaggagaagggtcatggtaggctaggatttcaaggagaaggaggggcttagagtttagatctacagagaaaattagaaagacatttaaggaaaggcaaacagcaggcaacaagacacctcctccccaggctaaagacattctccactgatggtcgtgcttcatcattcattgagaaattagtcatcccatctaagctgctcatctttcctgaccaaacctttaaaccttcttgtatctgcatctgctgtttcccctcttgctagaatggaggatgcagccctcctcttatctaaagccagcccctccgctaatcttcaggatcttatcccctcttgttattctcatgggcatygccctgccaaagctgtctcatccctttcaggcagccaaatcctctttcatctcagtacatcattcccattagtatatacacataatctagcatcacccatcctaaacataaccccacccgactgcatattttcccttgtattagtcrcctttatccacaataattctgcacaaccaataaccacagcatcttagtggcatacaactagcatatgtttttgcttacaggtttgtgggttcgttagagttccacagatctaagctgggctccaagttgtgggttgtgtcccaagcctgtgccacacatcgctcattctccttcatccagaggctacccaagacrtgttctcacaaagaaaggaaggaccacgagacgccaagcccaatcaggcaagcacatttcaaagtcctactcagggcatatctgcacatcccattggccaaacttaacatcagtgagatgggacatacactcctcccatggagactgagggagacagagtacttgctgaataataatctaccctgttcttccatcttgtgtcccattttttctgtttctcttgatagccagacttctagaagcggttgccaacacatcatgtccccatcatgttccttacccttyaatctctcttcatcccactccagtggcctctgccgcaatcgctatacctgtgcccctcttttttctctgagtttgtttgggctgctataacagaataccatagactgggtggattatcaacaacagaaatgtatttctcacagttctagaggctgggaagtcctagatcaaagcgccagtggattctgtatctggtcaaaggtccactctctggttcatagaccgctatcattgtgctgtgtcctcacattgcagaaaaggggcgagggagctctctggagtctctttttatacaggcactaatccatccataaggggtacatcataatgaccttatcacctcccagaggctgtaccttcaaatgccatcacattggggtttaggtttcaaaatacggatttggaggggacacaaaccttcagtctatagcatcatctgtattgccaaatccaatggatgtgctttcatctgaatcttaccctctctgtctctcaatagcattccacacggttggctgctccctccttcttgaattcctttctcttttggatttgattacttcaccaggtcctggttttcctctttcttctctggcttctcccagcctctttccttctctccccaagtcagtggtgttgtttctaaggacttggtctagaggtcttcctctcctcgcctctcctctcctctcttctcctctcctctcctctcttctcctctcctttcctgtctcctcctgtcccctgccctcccctcagtagatcccctaacttttcagaatttggaatatcttctctctgttgactcctaaatgtgcatttctctcacagttatctctgaattttagcctcctcttatattcagctgtgtcaacatttccacttggatgtcatgcatactcctaaacttaatacttccagacagaattgctgtttttcccctctataatttgccccctatgtcttcatcctcagccacaaaggtcattcaacagcccacactggcatccttctgagagcctttgtcaagttgtgtcttctgcctggaatgctctttgccttcttctccccacccatccctttcttatggctggtgccttatcatcttctgggtcacatggtcaaatgttactatccyagagaagccttctaccattctatctaaaaggccacattcccccatgctgcctcattttttagtttggtcttgggtttttaccagttaccataattaagtggttgctttaaaatttgttctcttggagtttatctgtctccctaattagaatgtatccatcctagcaggtgcttggtaagtctttgttgaatttatgaccttgaaagacccttggaggttgtctagtctgctgttcgccaatctgcaggctgtgaacccatgagggagtggtggaattattaccctgggtccaagagtccgtagtgcaccaaccattccttaggtacgggaggactaaataataaatctcactcatatgtgttctacttttcaaatgatggggttgtaataaataaaatatagatttatttgaagatattactaagttcacagggcctcttcatcttcatgcgttttcttagttaatgtatgtaaaagtatacccttttatggkttttttttttcacactgaaaggctgaaaaactgctaacatcattcatatgacttctatctttatgtttgtgaaaaccgagatccagagggatgaagttacttgctcaaggtcacattcttctgcagtaaaaatgcctggcacgggagggaaaggaaaaggttaggggcccagggagctataagctatacagcctggtgatgaggagcatggctgagaccaggcactgcagggacctgctcagtagggcagtcccaaggctgggggcctgtgctgacttgtgtaattaaaggcagtgacttcttagagggtagccgcaagttgagtgctagcaactctatgtgcctgaagaccaaggtttagtccagagtagtgtgtggcccaagtccagaggtcctaggatgtagtgaaggcctaatggccagggtggggaaatgatatggcttggctttgtccccacccaaatctcatcttaaattgtagctcccataatccccacatgtcataggagggacctggtgggaggtaattgaatcttggggtcaggttttccggtgctgttcttgtgatagcgagtaagtctcatgagatctgatggtatgataaggggcagttagttcccctgcaaacgctcccttgcctgtcgccatgtaagtcctgtccttgctcctcctttgccttctgcatgattgtgaggcctccccagccatgtggaactgtgagtccagcaaacctttctctttataaattaccagtgtctggtatttcttcatagcagtatgaaaatggactaatacaggaggtgatagtggcagagcacgtgtcacatgtggaaaataactgatcatcagttcaagaaagcacagaggagctgaggggtccccgcagtgcagcaaaaggaaatgaagagacttctcatgagcccctgagggtggagggagataccggaggagaaggggactgggtgatagaggtggtggaagtcagtctgggactgagttttcccaggtgccatggcatggagcacatcagtgcccaggccaggttgcagcagaagctgacttccctgcctactccatgtgcctcctgccctgtggccctgtgcctccctgtgattaaccttcccttgttgtcatcgacttggagttgaactcttctgcagccattcttgggagcatcttttggaggccctgaaggtcatgctttagcacgagcccctccctctctctggaggcccttctcattgtcctgatagctctggggtaccccgatgtccctggtagtaaatgtgccaaggagatccaagcctgcctttccgaatgcctggaagatgagggagtggggcatggagatttcgagtcagatttctagttaggcaaattagtctggcatggttaaatgccactaatgggggagtcagatagctttcatttggctttacctggcagcttagcaaatgtgcttgaatgatgttcccctgcacggagtactacactgtgtcccatgcagtgcaaagcgtgtcacacatgttactttttttttttttagatggagtctcgctctgtcaccctggctggagtacaatggtgcgatcttggcactcactgcagcctctgcctcccaggttcaagtaattctcctgcctcagcctcctgagtagctgggattacaggtgcatgccaccatgcctggttaatttttgtatttttagtagagatggggtttcaccatgttggctaggctggtctcgaactcctgacctcaggcaatccacctgccttggcctcccaaagtgctgggattacaggcgtgaagccactgcactcggccacacactttacctttaatcttcacaccagctgtgggtgagccaggttagatgaagcgactgaggttcagggaggttaaatgacktgcattaggctgctcagctaccaaggagcagagagacccattattccagtcttgtttgacatgtttgcacccatgcttcccttagcagtgtttccaagaatataccccactccatggcccaggcaagctgagcatcacctcagggcactaaagtcttttataaacatctggagctagacacatyaactgccgtgctttacatgccatgctggctgcctggtccaaagaaggctcttcctctggccctgagattctttgttccttgaatcagccatcatcagttcagtacatgttcccagtayctgtcctgacccatgtcttcaagattccagcattacctctttgagcttcagccaacacgctaaaccacgtatgtagtatgttgtcttgaccaggcttacctctcttagcctcagtttccacctctytgagaccgtttccttatcaataaaatggggcataataatcggttgtgttgaggataaaaggataaaattggaggaagtatcccacacagtggccagtcccgatgcttgttcagtatgtgttagctgagctgcatttgtggagtggctgagctgagataaacatccaggttctgactttgaatccagygctctttctcccctactgggctatatacaagcaacctctagatatcatgttcctaaatccacccataaatccctgagaaaaccgcgagatccccggcagctcaccaaccacacagcctttcaccaggacttctccggcttctccttgctttggctgttttgagactcagcagcagcagcatgagcgggagtaggtgcaaggttgtgtaactgccctgtcctcagatcacacatagggaaggacttggaccttgggctgcctagcacagggcagcagtgcctgcccactgaaccatggcttcgtcacagtcattcctagccaggcacctacacctttccacaaagacacgtccaaggaggcagcagatctgatcccaatcccactgatcaactttctcagatactgtgcatatagattgagtgcttgccttgtgccagactcacgcagtggggcatagggtggaggttaaaactgggtgaaggatgggacctttgagctcagctgaaactcagtgaacccagacacggccagatcctgcttcctcaccctcctcctcttccctccttgttctgttttcttattaactggaacgaatgggaggaaatgattagaccagacagctcgttaatgattatygattcactacattcctttcaccaagtgccttgaagggaaaagccagaccatgatcctcatacaacaaaaactcagttctayatccaagaacgtgtggtgcttggctccctgcttccacccccctctgatccccacagctaaaggcacttaaggccatctgcaggttctgacccaacccatgccatgtcagtcaggctgggcacatggcagggacagamttgtcaaccattccagtttgcctggctctttctagtgatagcactggatgccccatatcctgggaagccctccaatcctgggcaaactggaccactgaataccctagcaggctacattattattattattaatagtagtagatttctttgtttttttctttttcttttttttgagatggagtcatactctgtcaccaggctggagtgcagtggtgcaatctcagctcactgcaayctccgcctcccaagttcaagtgattcttctgcctcagcctccctactagctggaactacaggcgtgtgccatcacgcccagctaatttttgtatatttagtagagacagggtttcaccatgttggccaggatggtctcggtcttttgacctcatgatccacccacctcggcctcccaaagtgctgggattataggtgtgagccaccgtgcccagccaatttcttttttatcattatttcttcctttttatcatcatcattatcatcagtaactaacattgagcactttccatatgccaagacttatgccacacacttacaattttttacgaggtagataatacccttcaggcagcagaggcagaggttatagttagttcacctgatcaacccttgcataattgccttgaatacctaattcatgttttcagcttcaggtcagcctcctagtcctttggttctagaaactggctttctccaagcatctgccttgtcctgatctctggctttcagctccatctgtgactgagacctgctgactattacagccctggtgattgaggccagccttgttcctgacctccacatctcagaattctgcaagagacaagagttgcacttgaactgtttgtggagacttggcctttctgtctgctttctggatcctgaggctgccttggcccctgcctgaggccaagtgccctgcttgttgtgtgttatctgtaggtcaggaagcattcctcttccctgttgctaggactgtctgcagtccactgactgtcccaggactctgcccgatttcaggtcctggcatccttgagactgttggtcagtcccttattacttatagttggtgcgtggttggccttactgggattatttgcaactaggtaagtttgtaggagcctctgctccctgccctgttgatgtgacataggcaacacaactctttttatatcagtctgagtgtcctataactaggaagataaatagactgctgaaaataacatcttgcactccaaaggcatgtataaatgacttttggatagggtgggctcgattaaaatcaaattgattcaaatcatgatttgaatcactagtcaggaagagtcgattaaatcaatakttttccttcaaaactgcattcatttttgatataattttaatgcacagtcttcacaactctgacagagatagatgtggttttcatttttagaagttacataccatgcatttttaagctatgatttattttgacatttcattgaatcaattttgcagccacgtctgagtcttgagtggtgactaggttattttatttaccaaagctaatcaaacaaatgtgtataattttcccaacaaaataaacatgtgcactttggaatgtttaactattttttgctgtaagtgtaaaaatgtgtttttgctgagataaattgaactgtttgagacaggtccaacccaaaacacttgtaatattatattttggagttaactcagtctttaccctttccttcctgcttatttttatgttagaaaagaaaggtaagcttttcaacttttgtagttccgaaatgatttccaagtttagactgaatcagtctcctttggaaaacattcttgctatgtgtagagaagaaatagctgtaatgacaaacttgatatttatcttcrttattgccatgaatccatatacttgacttctgccggctattggtatgaccttcacgaggccttatccttatctttcatgattaactgagctttaccatttctgaaacagattctcttcactgggatccactgkgttttattttcggaaagtattctcacagcaacaatgcatttgraatgagatattgtcttasataaggatgtgttagggaggggcatgcttctcttccatcttatcagcctcagaatgtttgggaggaaccccttacatcttgaggccaaataaaaatcttgagtttatgattttacctccatcctttctgagcatgtttctggctcagccctatgacatcatttcttagaacgtggccacatatattctgtatctgccagaaaatttagtatctgcatctttcaagctgaaacaagtgtcttccagttttgtattcctaggatctagaacrtaagtgcatttcccctattcacatagttctaattgaatagaatcatgacattagggtttaatagaacccagtgatttccaagttccatcctcaaactaaccctttcatgtaaaaatgaagtgasttgcacaggtcacaaagcctgggatgagaaaccacgtcatctgagactcccagaacagggggttttctttaataagtcatcctgaatttagatttcttctcttcatcttcctctctgcaaagtagtgatttgtttttaaagaaaactgttctccatatacaaacatctaactattactcatttacagctgacctttgttggacttgtacagggctgcacttagagtctaagaatggaatggacaccacttagttctagcagggatgttagatttaacaaataaaawtagagtacacccagttgaactggaatttcaacaaaacaacaaataattttagtatgacttgtgatatttgggacacactaaaaaattattcattacatatctaaaatggaaatttaatcagtgtcctgtattttatctgataaccttattctccccattattcagggtaatgtgtttggtttggtttttcttgctgacctaaggtgctgagtatcagtccaattttcaggtggccagacccacttgagttactgttttcactgcatattctgcttttctttgtcctgtttcatttaaactctttttggtcaaagctctgattttgccccatgcactgttttcattgatgtgtatcactgcatccctttgagtgggcatcctcatgtttgcagggctcatgcctgcctaagccaaactatttgggcaccaggttgcaggggactggctaaatgcaggactgctggaagccagagcagttccctgagtgtccagcccttgccttccctgggagcagcaggagggtccggtgcctgggaagtgaccaccagagggagtagccrcagtaggggctgagctacgtgagccacactctrcccagaatgggggacccgtgttgggttgtaggaccgtacatgactaaggaagcccgtggggtgctcttatctgataccaccactttgtgttgtgccagaccccttttaacctcaacagggatgacaccatgttcaagaggctgaagaggagacccagagccaacacatgagacgtagggttttattagcaggagggcaacttacagggaggtctggtggcagcaggctgggcaggagaatcataaccacttgcaaaaagcatgctgttcaactaccgttttgacttagcacccttcccttaacaacctccacctggcagccttcatttaaccccaaacacagggccttgatctcccgtacagcctgagtttctcaggacagtccgagggctcagctcttcctcagaggtaaggagtgaatctccgggttggccacccccagatttcttagctcagaactctgaacacacattcaggtgcatcttccaaacagggtcattctcagggtacgtcctgacgctgtcaggtgcatctgccatacagcgagtgaatggaagcctcacccagaagccatcatccctagaagcatggcttcctaataggaggagaatccttcttgtccagccaacttccacactgatgtggagcctgggcaatagcactgggttcaaacaagctggtgtcccaaaggtgtggtcacctatgccaaatatcatcatatgcattttcatgtatttatgttttctagaattgaaaacagtttgcagctgacacctgagcctacccatttcgttctgaatgcaatttcagcagcccactgtagctcccctgctctccctcccaggcatggaacagccatggcccaagatgagtcgtgtccagtgagtcagaactgaatttgtagtcctttgctctcctggtccccaaaccctgctttgccctactttcccctgctctcctgtgcctgggttctcccaggcctatatctcgccccttgccttcatcttgtgtgcctgtgctgttctcggatgctgcctgcttgcctgcttttcagcctgcagtctcaccatgcaatctagcttctgaatgtttgccttgccctgtcctgagcatgcggtgtggcccyggggcctgagagctccctgattctggtacttctgtagggctagcctcaagacagctcacatcagccaggcacagcacaaggtgaatgggattgatttgatctggctccaaggagtgggaagagaaacctttagaaggccaaatctacctaggattgctttgatgaaaaattcagacttagatcctttattctataagccacttagttggctttaactctgaggacaattttctggtagcctttaaaacaataatagggttttcttatcaatctgtgttcctttaataaggggaaggcccattaagagggggtcgggggcctgaccaggtgaacttatgatcgtctaatgttgtccaacctcattaacattttcacagccttgctaaaacttgaaagttgtccagtaggatcattaccattcaagttttctcctcctaatgagcctgaattttccctgccatagcttatgcctgatacttttcagctgttgtccctattgactaatgaacataattggtcccgggctattttccagcctgctcctttcagaacctgcactgtctccactggagccagtctcttctcaagatcacctttgcctctttccattttgtcctgcattttcacctctggcacatagcaatgtcctcagcttctgacttragctgttttcttccgacttgctctagcctcttggcctggcctggtctcactctgtcattaagttaggctccacaactctattttgtaacctaytatacattyctctgtggacacaacatgataaatcttgatcaggtgcctcagccaacccataatagccttttaacctagactgtgactgaaaagctatgcacacgcaatggaaactgggaagtgatgtggctaccttgctaattaaggaatgacgcccaaaggtgatagaattgagtgagaaatatgtgtattttcctggtgctcagggaaaagttggtttaattagagacagataaggaggtaaatgaagatttctggggattccgaaaggggacttctgggtactttcaatgtcattattgaatgataaaactgtttatcatttaaaatttcattttgcaacctaagctttcatttgccctgataaaggggctcatagacttatcagatgagactagtatctttggaggtttgtagcagcagtgaagatggggaaagaaatatttagagagaggataaaatatttcctggggtaattgaagggaaaaggacagaatttaaagagggagacagatgttaaaatggagagaaagaaactgctggagatggtaggagttgagttgtgaatggtaaaagatgggtgtgtatattagatttcataagttccttgaggaatgtaggtaaaaagaaataatgggaagatttgtagcttgtaattaagacaagatcctttaaaataggactctccttcattggaatactcacttctgtgaccttgggcttgtcgtttatcctaacctctttgtacctgttttacttatctgtaaagtgggtctaaaaatgcccactgcttagcactgtgagaaacaaatggggtgatgtttgtaatagcgtagcacattttctgcagaatccaataaacagaagctgcaattattataaggattgttactatactaatataaatagcaacagtaatcattactttctctaccacatctacaatcagtgctgttgtcatgagggatggagtggcattgtgcaaaattcagcacttgtacaaggcactggaaagctgagcgtccctaactttggggcttatgatcatctagctatggtgatcttaagtcctggttcatcttggctagtatgagtttacacctgttgtccaagagcagtgcctttctttattcttaaaagtgttccagtttgggtgacaaatcatatcattccctacctttgatatttactgtctaaatcagtaagacagtattattgcattattcatagtttccaattttttcaaatggattgagtttcttgaggccactaaatgtatatgtacatgtaaaaaaaaaaaaaatatatatatatatatatgtatacacacccctatctagtgctccttttgcgtttgcaataggaattaaataggacttaccccatggaaatgttggtgacctcatcctccagtggccatttctgtaggacctgttccttgccactgtttgctgattgatacaggcttctcacagaaaagggatctccagaggatggtggtctcagagcgggggtggagacaggagcagagttggttctgaagtgtggagctgtggatgagacattgggtggcatccttgcctggcacttaggagctacgtcctcttgggccagtcactgaacttctctgagccttagtttcttcgtacagagaatatgagtcatagaatagaccttgaagacttgttagaaggattgtattgtgtggtgcatggtgggtactcaataaatgggaggagacttgagtaggacaactcactaaatatttgtgggcagcatcatgtcctggcctccttcctactcaactcttttctccagttcttccagctgttatctatacacagtggtttccaagactgctggtcatctgtgtctgctcgagttaagacagcttctgaccaggtagacggataggttgattcattcagtctagaagtgttcattgaagtaggtgtcaggcactgtgctcagggaattctctgccaaacaaccagatgcagcctctgctcttgtgggacttgggactgtcagagttgtttgtagtgtgctttagagagatttcttyccctaactcacgaatgtgtctgtagaacttcccagagtcgcaaagcccagcatgggggaagggtcttcttacagtgggctttgaacttcctgcctgcctcaaagtgaaatcatgttattgagatggaatatgtgtgattcaatcatcaattcagcagtgaaaggaaaagcagcagcctggcagtcctggtggagtaaatcatcccgtgagcacggaggagcagtggtccctaatagctcttgtaaacacgctgtcactctcagagctgggcgtaggccagctgagcctcttcctgctgtgcctctctatttctcagaaatgctgccatgtccagctgtgacacacattctgcatcattcaagaaacacttttcaagccgatctccaggacgcagagattgtttctgattgcttccagatcaatcaacaaaccttttaggagcagcttctaggtgggtggaggctcaaagatgcaggagacacatttgcatatgaaagatgtgtgctagtttgcttttgctttkctctaaaggaatacctgagactgggcactttataaaggaaagaggtttaattggctcaaggttctgcagggtatacaggaaatgtggtgctggcatctacttcaggcgaggacctcaggaaacttccaatcatggcagaaggcaaaggggaagcaggcatctcacrtgctctgttcacagagcaggagcaaagagaacagagggtgtgccacactcttttaaacaaccagatcttgtgtgaactcagagcgagagctcactctcatcacaaggacagcaccaagtcattcgtgagggatccgctcccaggacctgaacacctcccaccaggccccacctccaacactggggattacatttcaacatgagatttggaggggacaaatatcccaaccatattaagatccatgggcaaaaccacagtcacatcctagatcctgttgccatgggttgaggacagcatggccccagttttcctattcttctcagtatccatggcctttacagtctgagtcaagagagtcagtgtctctacctcttaagtctgggctgactgtgatttgctttggccaatagaatattgtagaagtgataatatgacaattctgagtctgggttccaagagggctcgcatgagtgttctctctctccctctctctcttttttctctatgtctccctcttagamctctaccactgcctaagaacaagtatagtagccactactgcaggatgaaagattgtgtgtagcagggcctagacttcccagctgagaccatcctgacccagttagccccaggcagacctgtaagctgcccacagacagcatgagtgagcccagcccagatcaacccgcccagcccaggtcagcagaatcccaagcttacccagagatgtgagaaataaaaaacagtggtggctttaagcaaaaaaaaaatcccccaaagatgcacgggggctgttgaacccctgtgtgcctagcgctgcatatggactgtcactggcactcacagcagctgccctttgttagctccatttcacagatgaggaagccaaagcttgggatgtcaagtgacttctccaaggtcaggcagctcagagtgggacccatcagggctgactctgcaggccgtgtgctttgcttggtgctgtgtgcttggcaccgtctccctggcactgtctcccttcagtctgtgtcttctcctgggcagtgagctgtagtcctctatttcctacttcctctgcaccatggggccatttctcatccacatttacctcttctaactcctcaactcacaggcagctgttggcagtgtaaaaccccatttaattattactatgcacagagaactcagggcccaaataaatatacaggtagacaggtagccagcctggtctaaggcagaggccctgtgtggcaatggaaggagagcgttctgctcctccccttagcacagctgccaccatcttctctcacttggaccatccagcggtctgtaacggtgtccttttagtcttttgcccacagaggctaatgatattttaaaatgtgaatccaagtcaaacyccaagtcacaaccctccagtggctgtttgccacacttacaataaaatgtatagtcctcatcaaggactccaaagccatatatgagctgacatctccttccctgccaccctgacctcatctcttttcttctttctttcactttcctgccccagtcccgccggcccctagctggtccttaaacccacagcatgtctcaggcctttgcagttgttttccctccaggaagctgcatgattaccctatttagaggaggyttctcttgcatcgttccccaaatgctgttcccccccctctttattccccaaatttaatttttgtcatagtagagattatttatcgactgatatgtccatctcttccactagaatgcaaggtccacaagggcaaaatctttgtttttttgactattctatttcccatgtctagaacaatatctgcatatagtcaacatgcaacaaatatttatatttaagtctcatgtctgtaactaacatgttttgagtgcatatcatatgccaggcatagggcaaagttatttctattatctaaacctcacaaaaatcccacagagtgagtcccttttcatattcccattttgcagacgaggaccctggagcactgatcctacatatctcgctcaagatcacgcagctggttagcgttggagctgggggtgtttgagtccagattggaagcccttacgtactatcccaggtgaccacttgctgccatcactcaagcagtgcagggaggagttctccctgtaaagattgcctgtgccctaaagttcctagtatttcccctgaactttgattctttgcctgttgacatcttctgtgcatctaacactcaactgtttaagagcaaaaaccaatttatcattatgtgtaaaaaatgcagggctcaaagaaggcacaagtagacaatcagcaagcccagagcaaggcagagaagtcacatgtcatggaaggagcactggggtggcagtcttacggactgagccaccctgtctggcacatctctgcttggtgccctagtctgcatagttctcatctcttacctcctgtctagaaggcttcgagggaagtcactttgtccctgtccactgagatgagggatcctataggagagatgcctgtgtcacatttggaattggacttagttgtcctctaggtctccttcacctgcaggagttccaggttgtaaggcagtaagtctagtaaggaagaggcaaaggaaggcagaattttccaagcaaaccacagtaaggggctgtgaaacagaaaggaaatgagagaaggaaagatatagggcagaaagaggatgaaagagaggagaggtcaggcgaaggtgaaaatgaaagagaggaagaaagcaatgagggaacaaaagaaaaaaaaagagagcaagagrgacaaaaattttgacctgtgtatctctgcacgtccgcatgcgtgtgtgtgtgtgtgtgtgtgtgtgtgtgtgtgtgtgtgtgagagagagagagaaaagagaggagacatacacacagtggaggaagttgactggatgccaggaagacaaccaagctccttctgccctcaccctccacctctgcaccccacagcagagggaagatggtgccttccacccttccatcttgaaatgctcctttttgctctgggttctccatgttcttccacgtgtctctagcacatctccctttctgactcctccccatgccctcttctcttttctcccacacgtgggtggcccccaccctgcagcctcactgtctcctgggcaccgtctccactggtggttgctaagtcagcatctccaggccgctttctgggtgtgtggctgcgcagttgcatgggggcctgctcttggtttcatgctctgttgttgctgtcttgaaattcttaatgacttctgagcaagaatcctgcattttcattttgcacttagccttataaactctgcagtccgtcctgccccagagcccagaaacccactgttgggtctgaaggaacagagagctgtcagaatccagaggcaggcaggggccagaggaagggaggctcagacgagaaggaagagctgcagagcaccttagaaaccggggggcagattcctgggaccaggtgagccaggtcatcaggcagggcaggagaggtaggcccgggacacacagtgacagaactcacagtgcctccaccactttgggtctggctgtgtggagccctgcctgtctgtctaggtgggcagggaaaggggctgggacagttggagctcatgttacttgacaccagtttctgaatgaggtttttccatccacccttgatttcagctcctaattgctctcctcaaagtcactggctctccattatcctctggatgctctgatgtcctccggactttgttcaaaaaagagctggaaaaggtcaagtccaggaggaactcagactcttactaggcacatgtttggttgaccctggttctactttctcttttaaaaaaaatttttatttccacaggttttgggggaactggtggtatctggttccatgagtaagttctttagtggtgatttgtgagatgttggtgaacccatcacccaagcagtacacactgaacccagtttgtagtcttttatcccttaccctcttcccagcctttccccgagtccccaaagtccattctgtcatttttctgcctttgtatcctcacagcttagctcccacttatgagtgagaacatatgatatttggttttccatttctgagttacttcacttagaatgatcccgtgtaatctacaatcccatgaccctggttctactttcattttttccaagcctgaggaggccctggtccctgtttgctaacagagaccagacagwgcttattgctcctgcaagcacagtgcctgtccctgggtagggccagcctctctgcatcctttaaacgtcaaattactcaaacttccaaattttccagtttgcaattggacaaaggattttggatcatcccaccaatgcaatgatttgggcatgtggctacacgctggaatttggatgaacctgaagaaaaattcagactttaggaggcaagattttgcattaaaattggaagtgcagttcacagcattgcccttgtttgtttcggctgtgctggctcctggctgtcagctgcctccccttgggcacgccgataaattgctgccgagcatttttcaggctgggagaaaatggatgagtcacagggtttggggagcctaagtgcaagcttgtttgagttcagtgtaaaatgggcaggtttcagaaggaggtggtgttcaggtgagggacacacccagaggtctctcagcatctctgttcctgaggacagracagcctaggcaagacccagatggtgtggccatgtctaggtttcttccagaggaacaatgggacctacgtggtcccctttctaacaccaaaactgatctcttatgtttatgggctcctttctggaagctgggtgagtgccaggtcctgactgaacttaggaaggcactttgtgaatgagtagatggtggaatakcccgtggtcaacctgggaagaagtccttggtcgagggatcccactgtatgccctgccatgaggtagtgagcttcctgggacatcactccagtggtggcttctggcttcttctcttttctcccagaggtacttggaggatgctccatgggactcggagggtgggggtaagcggacacaggaaggattgtgactttgcccccggttgattaagccatcctcctcctcttctctcggtccaggccagctttgatgcatttctttcctttctgtctcrgtgcctgcttctcactgagcaagacagttcatcaccccatcgagatggaggagacaaatgacagcagtaacrtgaactgagcaggattagataaaaccaaagagctatcacacacaacagtggacagtcatttaaaaggaaatccatctcgttgttgcccaaggcctcttgggaagaaaaagacatctttctattgcgagttcagcttttacttttgggtgtcaagcctccaggaagctcaggccctgctgctccggggaggttgtgatcctgagttgccataaatgaaggctcctggggtcagggttaaaagggaaggctggagacagactgcatgtgtttaaatcccagggtgccggcactcagggtctgcccatccctgggtaaagtatcacattcattcaacctctcagagactccatttcttcatttgtaaaatggggattataacagtgtttccttcctagggctattgtgaagaataactggggaaatacaagcaaagtgcttactacgtaacagggatgcaataaatgataaatacagcgattagagggcagattcagactgtctaacctgtgtgtacacaagtacactctcacaaacacagaatgtcaccttccttaagtggccttgtggtaaataactagaatgtttaatgctgttcctgagatcttagcttcctccctgtccctctctatagaaggaagataaaggtggcgatcccatctttttattttttaaaatagcttttttgagatataatctacataccatacagtctacccatatgacaagtaaagatcaatggttttagtgtattctcagggttatacaacaagcacataatctaattttagaacatctttgacctccaaaagaaaccctgcaccattagcattcaattcccatgccccaccccgctccaggtgaccactaatccactaatctgctttctgtctccacacatttgcctattctggacatttcatataaatagaatcatacaatacgtggcctcttgcggctggcctctttcatttaccatgatgttctcaaggttcatctrtgctgtagcacgtgccagtactttcttcctttttattagcaaatattattccattgtatggatatgctggctttgtttacccattcatcagctgagggacatttgttttgtttctgctttattattagtcctccagcctcatcttaaacacctaggggccccattgttgccctgtctgcacggggcagtggtgagctgctctgttcagaaaggttatcccagaactgtctctagtgtggcttctttgcagggggaggtagaacaggagtagctctgcactattcaaaatgcatttgctattagttatggacctttcttttcttttctttttttttttttttttgagacggggtcttgctttgtcacccagctggagtagagtggcgtgatctctggagtgcagtggcgcaatctgggctcactgcaaccttcgcctgctgggttcaagctattctggtgcctcagcctccygaatagctgggattacaggcgtgtaccaccccacgtggctaatttttgtatttttagtagagacggggtttcgccatgttggccasgctggtctcaaactcctggccccaagtgatccacctgccttggcctcccaaagtgctgggattacagatgtgaaccattgcacccagccaattatggacctttttaagtctacagctgccttctctcagaagcaactggaacataggggcctgctggtctgggctccagggttctgaccagagtttccagttttgggagtggacttggaatccctttctgggcagggcttggggaaaggataagagtctgtcttgaggcaggaggaaggggtggctcctgagctttgtttcaggtacagagaaagagagtcaaggcccacacgaaggaagagcaggttccagaatgaggggcccaagtccccagccttcctgcctgctcctccccaagactgtaggtcacaggaggagtaacggtgtgcatgcccagactacctgactcgccttagccactgagtgacttaagtccctgagcccttctgagccttaatccttgtctggaaaatggggtgagacatgcccattttataacattttaatgaaaattaagtgagctgatagtggtagaagcagagcgctgtatggaagtgacagaggtttatttttgctgtgcaagttggctccaactcttaagtcctccctctgctagaggggtaggctctcctgtctttgaaactgggtaaactgaggcatggaaagccacctcagtcatggagctaccatgggcagagccagggaccctattttacagcagacctaatgtcctgagcagaccctgctttcctgagygagtgcaccctctgccggcacaaaaccggctcagaagaggatgctcaaagtctgcaaagtccggggatgtcgtgaagacagcctgagtctctcggtgacccctgtgcctctgcactcagcacggcattcccagactctcagggcttctctagggtaacgaggggcactcatcttctctttggcccccgtggggacatggaccccttgctcctgggctcactgcatggctggaagttcagaggttcctgctgccattcctctctgcagcacagagcactgagactgactatgggaatctcctgtttggccccctgcccttgcctatgtgacaaataaggggaccaaggccrgggaggctgggtgatggggagagaggaccctgggctggcgggaggtaatggcagggcagatactatggtcactgagggatgatgatgccaagactgctgggggaaggaaaaggagacttttggctgaggaaggctgtcctggtcccactgtgtcactggtgttacagagggtagggaaaggctgatgtccaggcccctgggcaatgtcggggtgaggtaggtgggtgtgcagcagcctgcccctttcccagcttggctgggtctggaaattgcattttccacagcctgggcagctttctatgtgactagatttctcctttctgtttctggagggcagcccagctcaggaggctggcattgtgtggcaccgtgggagcaggctggccttggtggggggtggggggtgctctcagtggtggcagtgttggcctgggtgggcatctctgtgcacctgcagctgagccctgggggctgcctgctctgtgctccggctcttcacagaaaccaatatttgcagtcaggtttatctttccactgggatcctggggatgatgatgttttggccgagatgtacttcgtgtccaactcctgtcagcatttctgagggaagagtgctcattaaaggcttccctgcacggcccctccctgctcactgggcctgagtgacataaataagccccttgtttctttttcacgagcaaacccagacccttaaagatggctggacaccacccccccgccccccgcccccgcaccctttcgcagctgctggagtctccggtggtgtgggtgagtaatggccctgtcgaggcccagcctcactcctctggcttctgacaggcacctgggtgctctacagctgggaggctgctaggaattcttcatcggtctcccttaatggtaatgccctggcctctgggggggcctacaaccagctcagctgaggagccgatgcaaagcatggaacagcaagcacactcagaatgtaacctccatgggatggaaaggggcaacagggccatgaaaaagggccctgtcatgtatgcctcctcctctgggcacctacagctatgatctcatctctctcacatatcagccctgtaggcgaggtaaggtaagaatcagagaagttgagccacttgctctaggtcacacaggtaggaagagggtggggcggggattggaatcctgactcgaaggcctgtactcttgttactgtgccctactgtcttcccatgggttaagtttttggatggtctctgggggatacttaggtaagtcacaaggcatgaatatattctgagctggaactcaaacccaggtctgcctcttgacttctgctgggctcttcattctcctcagacacccggcaggagggatttgtaggagggttagttatggtctatctcaaggtcagaggctccccagcacgatttgaatgtgatgccttccatagtgcttcaagtcacacataactttttcaatacagtctgcaaatctgaggccctgccggaccatcatcaagttgaccaggcaggaaggtgtgcagcagcagcatctgcccattccaaggccctcctcctggcctcttgctggccctgactcccctccccagcatgatgccatctgctcatgatcttgtctgctcatctttgccaggcactaagctgcgtgctgtacctgtagcatttaatttgccttaattcttaccactttcctgaaaggtattctccccgtttttctgatgcagaaaatggatctctgagagcgctactgacttgtccaagttcacatcactgttccatcagtggagggactgggacagacccacaggagtgctttttccaccatcatctcagccctcagtagagcaggagtgaggaagcgggaggcttgaggcaagagtgtgaaacatcagacatcacctttgccctcagggctctggagacctcaagcatccacataatatttaaaataataaaaccaatgagtagacaataaaggaccaagatggatatctgggctgtatattctgtgggtgaacagagctgggaggtcttctgggctgatctggagagaagagaccagtttggggcctgcttctggccactcctccatctcccccacttttcatcacccaaggagaagctcagccagcctgaaagtgtgagcgcttcatctgccagcaaggagggaggagacaaatcactttaaacgtgcgaagagttttttttaccactctttcccttctcatctttgtttattctggagatcaatacagacaatgggaaagttattcccaggagaagacctggctatgtagttttaaaatatacttactccttcttccccagtccccttcaccttcccctattggatttattgagagcagagccatttccgagaagcaatgtcaggtagtggtgtttggatggtgagctatgactgttgtctatctcaggtgcacttgtgtctggcgagatccaataggatgatctcacttctgccagcccagccgaaatcagcgatatatttgtgttgtatattttggcctgtgaacatccactcttgggtattctataaatggaataatctaagggaattagaatagatgttcattttcaaatgtttcctccagtggagtccctttagttaaatttagtccccagatatgaactgggtaaaagtggagttcctttggttttcggggacagggtttgggacaacacaaccacagactccaggcctctgagggaggtctggaaagcactgggatagttgactggaaggcagtttctagatctaatattttaaaaatttaccatcttatattattctcctcagttttgtgtctgtgactggactttcctgggagccagtgacagctgcgtgggcagagacattcttttacatttaagttgtgtgcctgcacacagtaggaacacaatagcagatttatacccagttgaatttcagtctctatccctactcaaatcaagcatttgcagcagcttgtctgggagagagagccaatagccaccagtctagatgtgatgtctactctgcatgctcwtggagccaaacatgagccttgctgtctctccttctttgccrtctgcaaaagcaaactctctgcccaacaggatgaaatgagaatcaaatccttatttggaagtcccctctgtagggctgccttctcaaatcttttccatccaggcaaaattatatacctaggtactaccagggagaaatgcaattcattttcaagaatttattgaaacttacacgaataatagacaagcagagagccaaatcatgagtgaactcccattcagaattgctacaaagagaatagaatacctcggaatacaacttacaagggacattaaggacctcttcaaggagaactacaaaccactgctcaaggaaataagaggaaacaaacaaacgraaaaacattccatgctcatagataggaagaatcaatatcgtgaaartggccatactgcccaaagtaattaatagattcaatgcaattcccatcaagctactattgattttcttcacagaattagaaaaaactactttacatttcatatggaaccaaaaaggagcccatatagccaaatcaatcctaagcaaaaagtacaaagctggaggcrtcacactacctgacttcaaactatactacaagattacagtaaccaaatcagcatggtaccggcaccaaaacaaatatatagaccaatggaacagaatagaggccacgtaaataacaccacacatccacaaccatctgatgtttgacaaacctgacaaaaacaagcaaaggggaaaggattccctatttgataaatggtgctgggaaaactggttagccatatgcagaaaacagaaactggaccccttccttacaccttatacaaaaattaactcaaggtggattaaagacttaaacatgaaacctaaaaccataaaaaccctagaagaaaatctaggcaataccattcaggacataggcatgggcaaagacttcatgactaaaacaccaaaagcaattgcaacaaaagccaaaattaacaaatggatctaatcctaaagagcttctgcacagcaaaagaaactatcatcagagtgaacagacaacctacagaatgggagaaaattttttcaatctatccatctgacaaaggtctaatatccagaatctacaaggaacgtaagcaaatttacaagagtaaaaccaaacaaccctatcaaaaagtgggtgaagaatatgaacagacacttctcagcaaaagacatttatgtggccaacaaacaaatgaaaaaaagctcatcatcactggtcattaaagaaatgcaaatcaaaaccaccatgagataccatctcattccagttagaatggcaatcattaaaaagtcatgaaacaacagatactggagaggatgtggagaaataggaacacttttacactgttgatgggagtggaaattagttcaaccattgtggaagacagtgtgacgattcctcaaggatctagaaatagaaataccatttgacccagcaatccctttactgggtatatacccaaaagattataaatcattctactataaagacacatgcacatgtatgtttactgcagcactatttgcaatagcaaagacttggaaccaacccaaatgcccatcaatgatagactggataaagaaaatgtggcacatatacgccatggaatactatgaagccataaaaaagaataagctcatgttctttgtaagaacattgatgaagctggaaaccatcattctcagtaaactaacaggaacagaaaaccaaacaccacatgttctcagtcataagtgggagttgaaaaatgagaacacgtggacacagggaggggaacatcacacactggggtctgtcgggaggtgggggtcaaagggagggagagcattaggacaaatacctaatgcatgcggtgcttaaaacttagatgatgggttaataggtgcagcaaaccaccatggcacatgtatacctatgtaacaaacttgcacgctctgcacatgtatcccagaacttaaagtaaaataaaaaaaattagtatgacttgattccaaaaacaacaaccacaacaaaaakaatttattgaaactgttttaggcactatattaaatgccggggtatgaatacatgtaaactgtgatcctgtcttcaagggttattcagtgctcatggtagcagtaggcacctgggggaggatgggagggttataagatgtggtaatgagttctcagcaggtggaggatagactgcaaggactttattctgaaaagggcaaggaactaagtttaaaggatgaggaataatggaaagaacatactcggcaggggaaatagcatgagccaacacttgcaggcattgctgagcctaccttttttcttgaggttgcacagtggtctgggggtacttggagtatcaggtttcttagggaaagtacctggaggtgatagtggtcagagagtttggagaccaagtgggaaagggcatatgagctacaggatgatgagtttgtttccacaaaatttatggtcattgttcagttttaggaaatttatggtcattgtttggttttaggaagatcactctgatagtatttttgagactgcatgttggagtgaggaaaaagggggctcagttgtctttgggagtgatcgtgggaagccagactgtggtggcatgattttattttaaatgagagagaggaagagggggtgaatgccagagattttggaagtaaaattaataaacctataacagatttgatggtcgagaaagagaaattaaggaagaggccatatttctggtttgagaagctggatggagacaggaacttgcttgctgttgaaattggagttgggtggagaatgagcaccttggttatgggaggtggagatgaggttgtagatgagttgagtttgaggcatctataggtcatccaaatgggatgtctggtaaggggttgagctcaggaagaaggccaggttcatgggtggtagctgactgcctggctgtggctggatgatccagggatcacttgaatggcagaagagaaacaccaacaatgaaaaaggaaagagaagggaagatcaggaatgcagaaggaagaactagaggaagtcctgccttctgttcaaagcctcctaggaagaaagtgtgccaatcagaaagcagcctccgtcagtcctgtggccatagaagcccatcacactgctgtgtcctggggcttccctagaaaagtcctggctgggtggagcactggcaagatgaaggacaatgcaaaagagagccaggtggttctgcagaattggctgtcttcgggcccctcactggcttcccttggagagaggtgacctgctgggccccaagcaccggaactgatagagctgtttaatttaaacacatcaccccagctgcaccatggctgggcccctggtgtcatgttgacagccgctarccgattaaaggtgcagctagactggcggggcacagttctgaggagctgctattacagcatttattagcaggactgtagttaatggttagcaaatgttttatgaacaggttccccatggtctgtgaaggctgattcagtctattcagaatggaatygccttcccctattaagcttaggagtgtataatcagttctttccctccgctgaaggattttccctgtggcaggagtgggacattggccctgtttaagttaaatagggcttgttctgaagaaagtccttggtggtaggcttgtgtgtgtccagggatcttatgtggatttttggcaaagtggagaccacagtgacttgttccttttgggtggagatagtctggaaaactgaatggtcacaatagattctgctcagcctggcagagaaaaccatgacctgggacctccttggttccggtcctggctggggtactggtttcctcctcaccctgggcaggctatgcaaccttcctgcctttggtctcttcacctgtcgagtacagctaataacatctttcttcctctcagctgattataggaattaatgactgtgaaatgtatctagtgcagggagcggaaagggattgagatggtgtaaatactaaacattcaaggagagttgggaattcccattgaaagagtaggggaaatataatttggcattgttttagtctgcttggactgctataacaaaatgtgtaaactaggtgggttctaaacagcagaagtactgctcacagttatgaaggctgggaagtccaagatcaagcagtcagtgtccggtgaggacctgctttctggctcatacacagagccttcttgctgtgtcttcacatggcagaaggggtgaggggcctctcttgggcctctttatcatttttatttttaatttttttaaatacagtgtcttgctctgttgcctaggctggagtgcagtggcacaatcatggctcactgtagcctcaaactcctgggctcaagcaatcctcctgctcagcctctcaagtagctgggactcaaggcatgtgccaccatgcccagctctcttgggcctctcttataagggcactaatctcattcataaggttcctcccccatgacctaaggccccacctcctcgtaccatctctttgggggttaggatttctatatatgaattttagggggacacagatgttcagatcatagtgttcattagccatatatttgatatcaaattgaattcctgagagtatttattcaggataagtaacagtttaggatggatacataaagcattgactatttctattagaaatagaaatgggctgtgatttctgttcttaattcaaggagaactaatactgttttttcattaatgacaaatgggcaaggagggtagagccacaagactggcttacttttccctataaaaccaaggcttaagaaatattgtcccttgggaaatcagggggttcagcttttcaaccctccaacttgtgcttaaacagatgtttcttttatctgtgtgctttttactgaaattattttcactaaattacacattgaaaccacagacactcaatggctggtaggcagatgaccgtatctcttcaatgccttttctgtttctcagtggaagggcctctctagcctaaaactactgaagggcagggttttggttgagccatttgtatctgctatcttacatcttctattgaaaaagaatttgagatattgcttagaaaacttgagaactcagcctggttctcgtatttggcagataattgactttggacaattctcttaatgtctccgaactttgtctcatccaaaaaaaataagtagtgtaataaggcccacattataatgttgtggagatgtcatgggacgttgtgtatgaaaggtctgtgcatgtgccagatgtggggattcttggccagagtggaaaaggaggtaaatgagtaaatctagcagtaccatctagtgccctgagcccacatggcttctctctctctcctgaggtcaacctgacgtcttcctttcttcttctggggagtggcccagtgactgctgagtgcttctgtgggcagaggtcttggagtccttagtccacccaaagaccttccctagatgattctgaccctgatgatcaaaggatgtcctaggtgtgtttactaagaataaactgcagagcagcctgttctcagagcccagcacctgcctgcaatgaaagcagactcaccgagaacgcccttaccaggcaccctgctctccgcttgacgcacactgtcccacctaattcgcccagcccagcccgctgggaggtgggtgccgtggttcccttcccacgggtcaggggctgaggctcagagaggtgaaatgacttgctcaatgttatatagctagtgaagagttgtgccagtgggatacctgtaggaaacagctgttgcaggcagtgggtgtgactgaggggactttcatggaaaggacttttttgaaagctctcttggcaaaggtaagggaatatgctcagggactaacaccagcaggaagcagttaccacctaggactgaggggcagggcagggaatagtgttactggtggagggagctaccctggagccctggcagaggtccccgacaggagctgtaactaccagggtgcggtgttgagcaggaggtgaggagtaaatgcctagtctttctttcctccctcctgaaggtctcctgcaggtgcctccaaccagctgaggctcaacccaaccctaagccagagggctgagaggccaggggatgggttagtagtgctcagcttcccaggctcagggcggggtggaaaaggtcagagagaatgtatgggggaaggggccaagggagcatagccatcatgcagacctaagcctgacagcagacaacattgggcccattgccatctcactaagctgagttagtgttatccactttcagatagagtgtagttgccacatggtgatttcaggctggatgaataaaaacagtaaagcacctgatcattgttcctccgggtgactgtgagaagggctgttgcctttcatgtggtcctagagccaggcctggtgccgtagctgccaagttgagtctcccaggcttggcccagctttacatttacacaaggtatatatatatatatacctgcaacagccgtgtgtgtgtgtatatatatatatatatacctgcaacagctgtgtatatatatatatatatatacacacacacacacacacacacacacatatatatacgtgtatatataatatataattttatatatatatatatatatatataatttcaactttttagattcatagggcacatgtgcaggtttgctgcatggagtatattgtgtgatggtgaggtttgggatacaaatgattccatcacccaggtaatgagcatagtaccgaatagttagtttttcaacccttgtcccctccctccttctcctgtctagtagtagtccccagtgtctattgttgctgtctttgtatccatgagtacccagtgtttagctcccacttatcagtgagaacatgcagatttgattttctgttcccgtgttaattcgctgaggttaatggcctccagctgcacccatgtggctgcaaaggacatgatttcattctttttatggctgtgtagtattccgtagtgtatatgtaccacattttctttgttcaatccattgttgatgggcacctaagttgattccatgtgtttgcgatcgtgtgtagtgttgcaagtattttgaaatgctgtttttatcatgtcactaccttgaaactgcagcagttagacctgctgctagatcttgtttaatgcatcagtgaagaaacacttgtatcactatatcacgagtttaaaaaatattttgaaatacccgatttcaatataatttgtgtcctttataatactatgcatcttgttttttgcatttataagtgctattctgagaagggatgtaaaggcctccccatggcaggtgcacacgaaagacccagaacccctgggctggatgattttagaccctggtacattgatctgaatcataggtactagattgtggtgagtgatggctcagtgatctgggtcataatgtctggccagtggcttcccatgccctgaggctgaggatcttggaccaacctccaggagtacgcctgagatggtttttggctctttctgcatctggatttactgatctaaatattgatcctttctcatgaccacacttctgaggcaagtgtcccgagaaaggagagtggggacagatgagcccgaacctaccaaacggacaatggtaaaccagaagatgatcaccttcaacttggcattttctcaaagtgggacccactcatcatcacctgcctactttggaatcacttgggaagcttcttagaatgtaggctcccacagtgtccccctcagtcctgctgagtcagcattttgggagcagggcctggggatctgcatttcatgagcctcttgggtgatttggggcacacggatgtttgagaaccagaaccactgctgtagattccctgtgcccctgggacttttaatttgactcgaagtttgaagttttaattgaattttaaacaacatacctaattttctaaaccaagttgcacgctggttggattgaaagaatgcaagtggggagaatcattgctattagcgctgtctaggtctcttcttgctcctgttcagcataactagaggtcctattgttaggctgagctgtggctgctgtcctctctggttgggctacttttcataagagaaataaagcagccagtcaccgtactagcagggtctttctcccactgccctggaaggcaggagaagtaacgtttccactgttcagtccttttcaagtggttactctagggatccgttgccaaggactggccagtggggatcctctctcctttcagtgagcctgctcaaagccctctccttataacagggggctccttccaggacccagtgccctagttggatcagtggcacagacactcggtagcaggggcacaccagagctcagagattagataacagcataacagcccctttggcctccagtaactggagtcccagttgacctggactgttctatttttcccctgaagttttgcattccaaggccagtcatttgatcaagtgaaatgacaaggctgtggttttatatagygcctttaattgaagcgtttaaagtgctattcaaaggtcagaacttccaaagggataagtgcccatgccatttatgttctttaaaatattaggataaatgaaaagcagtatgctggcgccccactgatgggtttacactttccagatcttcattagtgcttctgaagattgccagcattaaatggatgatccatttgagagcagcgagcctgcagatacacagtatctgtgctgcgaataataattccagctttcgtttaaattgctctttctctagagcatgatttcttttatgagcaatatttttatggcctagtcacatcctcctttgttcagatggtttaatgcactgaactctggcccgggtttcctctgtatgacctcaagcctcagcctagccacccaggaaataggaagctattcccagtctcttctctcccatgagaaccctttagttctttatatattttgctccgtggtttcctgtgttgaaagatgttacccactaaataaatggctctgatgttatgatgcttttgtttttccacttttaataatcaaaatatattttctaattacagtttctgattagcatggggaccggtaatgctgagttgatatcattccagtcaaaggcaaagaaatgtgacattttgtttctcctgtgggactttatcaaggataagcaaacaaatgaagcctgttaggctttggaatatattgaaaatagcttgcagtgacctgttatgacattcaagggcccctagaggttgggaactacagggttagtgttctttctgttcattcacttgtttattcatttgtgcagcaaagttgaatggggtaggcgctatgctgggttctggggttgaatatgatggacaagaatctgctctcagtggaggacagatgaacaaacaagaaaagcccagacatggacaaatgccatagtaacaataaaacaggatatgaggacggagggacaggccactttagatcaggcagctggggaaagagtctcagaggaagggacatttatgatgagactggaatgacaggtagcagtcagccacgctaagatcatctttgatggcattggcacaatggccagagtaagctcacacatatgtaagtgtgatttcagtcttattgcaaactacttttgaaaaaaatcagtacagccattaagcagacagctcatcccaggggatcaaagcatgcactggacttcctcgaagtggcctgtttacttttactgtctccctaagtaacgtgtgatctccttgcaggcagggatgctgacttgctctccctgatagccacagagcctaattcagtgcctggcacagaggaggcatgcctgagtgaatgactgaatgaatgaactgtgtggatttttgctttccttgggttttgcctaactacactattgtgggattcttaccaaacgatggcaggggctcaagggtgtgtaagatctggtaagagaagcccagaagggtcttaccagccttgatcagacttaaatgctatgatctaaaaaccagcatgagaagaaaagatttagtcctcagtaaaatatggatgccctgctatgtctctcgttagaaagcatggatgccgaggtggtgaagaaacctgtctaatcagaagctaagtatttgtgggctttgagctcctgggaagcagcaataggagaatctagtaatggaagcaggcaactgctttttagtggcggcaggaccatcctgggattcaggctaaaaaatggagcagatgcctcaggggaagtggtgggatttctggcgtggcatggtccctggttgcatttttgtcggccttattttgaagagtggtcttgatcaaaaaccagacttagctaagatctgaaccatggctatcggggttggagctgtgtaggacgggagggcatgacagggcgggtggggaaaaactggggtttgagaagagtcccacttacttgggtgaggtgttcacccagctgcaggtgctagcgggtgagttggcacctgtaagtgcagggttcaggcgttataactgtctttagtctcagatctaccagatgaagtgactgactgccccccggagtcagggttctctacctattatgttggggtacagacagtggatatgaggacaggcaaagaacctggcattatcaggcaggtcccgggccttgaagaagtgcccagtggaacaccagcacaggcatataggtccaaaaaatgccacccaagactagggcttgggggcaagtgagctgtttgggagcctggggctctgctttcgtgtggggccagaactggttaaaccccttctgccgcagcttagggttaggccgggctgagtgagtggctccagctgtgaggaactgggactaggcactcagaggctggtgacaagcaaggactgatgctgtagccctcacggctctcctccttttgaaggaggagggacaccagatgagatattggacacccagttctatttcggtttcagagaaaaaacaaataatttttattacacatctcaaatattgcatgagatgttttgtagttgatctgaaattcaaattaattgggtgtcctgtatttttgtttgttaaatctggcagtcctcacttgaaggcaaaagaagctcccaaagaggccctggatttctaaagcgcctgccgccggtgctgtcctatgcagtggaggctgattgaggctggagttgctctcccacctcccctgaggatatgtccctcctgggtcagtggtgagctgagggcaggagctagagtgccaggctgctgcagtgggaaggggtgtcttggctgagcagaggaaggatgctctggtgtcccgcaggaggccaggcttcagtggggagcaggccgctgctctttgaaaaagtgtcccgagtgcgggtggtatcagccctggaaaatgcccagcttctcattctgttgtttgacctctagggtatgccctagtgacccctaggatgtgacctctctgctgtcatccacccagctgtaagggtcacatatgtttctgccaggtgaaggttctgtgctttgtagagcggggacaccaaggctcacagaagtacagggagacaaggacttggtgccatgtggagtgctgaggctgcagcttagatctctggacccctaggtcagcttagagtccacgggagggggtagggggcagtgtcctgggtgctacttctgactttgctgccaaggacattcaggtgaagggatgcctcaggattatcagcctcttccagcaggatggtcccgtggagcgccatcgggtagctcagcactcagtggggtatctccttggcaggtggcacattttggtcaccactgaggaaatgctgtcagcccagggctcacacaactgggcaggaagttgagcaacatgtttttaagttgaaaatgagagttgggtgggcggaggggagggggaaatgtccaccaagctatttccgaaatctttgtcatttgctgtcacttttgagtacaaggaaagacatcctctaagacagtcaatgtgaaggctttattttggtgattgagcaaggaagcggtggaagccccagtaaatggtgtcccagtccctgaacccacagaggcaktcacagcagggcagcagagaaggggcctctgatccctgcccatgatctccaggccctcggcttgcctggtattagtcaaggttcttcaaagaaacagagccagtatgagagagagagctggactgattttaaggcattagctcatgcarttgtggagactggcaactctgaaatccaaaggtccggctagcaggctggaagggcagataagagttggtgtagtcttgagcttgagatccgtagggcaggcctggcaagctggaatctcagacaggggttctgtgttgcagccttgaggcaattttccttctttgggaaacctgactttgctcttaagtctttaactgattgggtgaggcccacccatattatggagggtaatctgcttggctcaaagtctactaattgcaaatgttaatcacaactaagaatgccttcacagcaacatctagactggtgcttcaccaagcaactgcgcactgcagcctagcccggtggatgcataacattcaccgtcatgccttccctctgcaccatcttgatccgctgggcctgttagtccctgactgttgcctgcatgaggagagggccaaggaagggtgtaaccacatgtgcccagagtcagaaatctgggggcgatgcagcaagtcaggttttccaccctgttcatttcattgcctccatccagcgaactttcttgccctgaaggtggtttctccgaggtggcgcagcatctcttggcctgattcctggacttcatctctgtgggaagaacgcccctctctgtttcctgccctttccactttagttataatttggccgtgactcacaggctgtctctccagtgaggtcccacacagagaagtcccctgtgggtattttgctatccccaaacgccaacagctgtcatggagaatccctcacctccaaatagcacatttgctatttgaaaaaaaaaaaaaaaaactttttgctttataataattttagagttatagagacgttataaagagactagggagtttccatatacccctcacccagttccccctgacgttgtcatcttaggttactgcagcacatggtcacaagtaaaacaccagcacagatgcttcactgttaactgaactccagactttattcagattttactagttttcctcctgatgcccctttctgtcccaggagctgatccaggcccccacgttgcatttagtgctccttccctttcgaggcaggctttgtctgtctgcacttgctccttctcactccgccccttttcagtcctccctccactcctcccccatctatgtgacactgaccggaagctcctggtcatgcctgtccatctgtgttcagaggcctcacccagggctctctaccttcttacgtgctgggaagaagggagctgcctcggccgcttggtaaatattttacaacaactaatgggatcaagttgtttactctgcaggaaacagaaaggcattagttaaggaaagtaacaagctggctattgctgatgcttcaggtttagcgagaggcctgggagcttgaatgatttccacttaaggagtagtcatgctggcccacagctagaacatcccaaacgtggttcacttctgctttttcttggcgcaggactctggccaccaaagccccgagtggccaggacatggtatacaagctctttgtggtcagagagtctgggaacccacacgtccccatcgctgcccattgtatttattttctgttcatttggccctcccacccctacctcctggtcccatacttttctatactttgccccccaagaatttcatttcacagaagagtgaaataaaaatgtttattatttaaaccaaggcacataaaggctgctgtaaattgttttaatgccatttacaagctgtgcgttgtagtaaagtttaatgtgaagtcagaagggaatcagtgaggaagggctgagcagaatccccagtgaagggggaatggatttcataggccacaagtttgtggttgggtcccctccttccagccaggctgctggcctgctgctctgagaagagctgcctaccttggcccttcctgcttttccctgtggctgcttctatctcccagtctgacatctcccccaacctctgacctccaccctcacccctgccacacacatgatgagtcttgggattctccatgacctgagggccagcagttgagcttccaggatggttccatgycccggcccagcaggcacagtggccacttgcttctcctctgaggtagctagtgtcccctggtgaccagggagctgaacagctgagccagctcagctctggctgggagcgttcaggagccctgaacactggactggactttggagatggctgaggagcctcgggtcwtctttctgggtagtcttgagcaraaatcattcctgctttgggcatttagtaagtgtgagcttgcatgggayaccatagaatgagctgaagacacagagcccacccctgagaaggagagtccaagacagatgacaccaaaaaagacagacagaggccacatctgtagtagagcagatgaggactgcaaagaaagcatgcaagtgggtcaaggtgttaggctgtagagaatcgctagatgaaatatacgttacgggacctygagggacttgcaaggcaagaaagggaggtttctgaaggcaacatgctctctcccttctcrttcacaagggaaagctggctggacaggacaaggggaaaggaacagaggtggaactgaaggttggagggggcatttggccagtgacgggcrcctgtgggaatgagcmggtcaggcacagggcactggcttgaatcctgatgagtggtagggaagtcaagttcagttcctgatctcaaggacgtggggcacttctctggggtttgggatagggagttgacctggcgcacaatgaagagggcaatgacagcaacacagagcaagggggtcacatagagctcctggcacatcatgtgggcaggggagagaagtgagacgtggttctgatgggcagctcagcccagaggcgtgatggcagaactccataggaggatgctgaaattgctgctgcggggaggcaggggaggcaggggaggcaggagtgggggtggggaggcagtcccagggcctggttatctccagcactgtcttatttttgctcccaagaatctatccattcagcactttagcttccagggagaggtctttccagccttaggcttcttggctgagtcttgcaaccccaccaccattaggactgtctgctaataaagaartagaaccctgtcttccttttgctgaactacctgatcaggctcctcatggggagaagtggctggtgcacatttaggcatttctgtgtcccctattcaaaagccacagagccagcagggccccaaatcttcagttcctaacagaaagtaagcaaaaaggccactatgggcttcctacccctataccaccaatcctggtgtgggaaaaacatatacctggtggtccttgcaggtgatggggttatccctgactctgcacatccccttctgggctcagggcaaatggtttcatggccytcgggtctggcccttttcactcagagtggtaggagctggctgttgggcatttggaagcgtctcacctgctcagcagctttggattaaaatgttttaaatcttatggaccctaagctggagtcccagggaactggtgcttggctgcaagccgatgctgttcaggacaggctgggtaccggcattgaaacaacctggagttgaaggaaggtgggccagcttcggtgcccaccccacagctcctggtgtgtgtcattccctttgtggttgtggctgggaagaagactccatcccagcctgtccctttaggcatayractcatttgcagagctagtgaaaatgcagattccaggacctgcttgcagagtttatgattcagtrcatcctgggtatggctcaggaatccatgtcttgaaaatgctctcctgggccatcccaatgtgcagctacatttgagaacccttgctcgagtgcacctcctcttctagaaaggaacccctcaaggtcactagctcagagtctcatgactttgggtctggaagggagactagggaatgccttggggcctaagaaatgttgcttgtagtgtccatcatctcccagagtacagggtcctcagaaaggaccaattctgaagctcttcaggcccagagagtagctccaaatgggaatctgtggccctgggatgccctgtcttttggtaaagttgtaaggtagggagccacctgaggatggtgagagcatctgaggcttgggatgaattaggattctcccagcaggataacccacttccccagggaatgatgccacaccacagaaaagcctggcaaacagtccactcgcagatatcatgtcaggggtttcctacttcccttcccaccatggcttgctgggtctgattgggaatgggggcagggctacaggtgaggcttcctggagcccctgttctcaaccacctgctgtcaagccctggtctatgttctcctagaggagcatgcactcccctgctaatcactgctgttaggcaacctgtgttcttcagggttctgyggggaaggtgatctatgctgtgagattacaccccacacaggaggttctacttccagccaagccacttcttggcatttgagcccacatgaggagttcaactgcccggaactttagtttctccacctgtaaaaggagattttgatttctgtgttgcctcgcttgtaggaacatttcaaagactgaatgagctgatagatgtgagaatatcttgaaaattctaaagcaaggtccatgaacttgaaacgagtgatataaatgagtgagccaggcagtgaagaatggtgggcactggggagacctggaaaacgaaattagatttgattaaaaaaaatactgtaggttcctgataattcatatctatgggccaaatttggtctgtaggccattgacctctactgcaaactattgttcaaaagccaggtagttatcataagtttccatactacattcataagtttccaactacataatgtagcaatgttcccaccaatgccctacagagtattttgggcctggatgtatatatgtgtagtactttaagaatatgggttccaggccacgcgcggtggctcacgcccgtaatcccagcacttagggatgccgaggcgggtggatcatgacgtcaggagatcgagaccatcctggctaacatagtgaaaccccgtctctactaaaaatacaaaaaaaattagctgggcgtggtggcacgcacctgtaatcccagctacttgggaggctgaggcaggagaatcgcttgaacccaggaggtggaggttgcagtgagcagagattgtgccgctgcactccagcctgggcgacagagcgagactccatctcaaaaaaaaaaaaaaaaagaatatgggttccagagtcagccaacttaggttcaaaccccatatctgatacttcagcacatttaaacttctattctcatttttttcttttttatatgtaaaatgtggatggtaacagcccctacctcattggaatcctgtgaggactgagtgtgataatccatgaaaagtgattagcacaatggctgctcataacttgttcaatagaagtttaatattattattgttgttgttactcttctctactttattccacaaaggattggagtggcctgtgcagcagtggtaacaggatgatagtatagaataagagatacaggtgaaaaagagtaggaacttaagagcagacagagatgaccacagaggtttcatatggttcctgttgtaaaattttacattttactttaagcttcctgataacctcaggaaacagggagaaatggccagttaaaatcggcttatcaaggccaggcatggtggcttgttcctgtaatcccagcactttgggaggctgaggcgggcagatcacttgaggtcaggagttcgagaccagcctggccaacatggtgaaaccctgtctctacaaaaaatacaaaaattagccaggcgtggttgtgggtgcctgtaatcctagctacctgggaggctgaagcaggagaattgcttgaacccgggaggcggaggttgcagtgagccgaggttgcgccactgaactccagcatgggcgacaaagcaagaatttctcaaaaaataaaataaaatcagcatatgaaaatgggggaggggtcatggaagttcctcctgggtccatccttatcttttgtccaaaaaaagaagttgaaaagactttgatccttgattaatgggctgtgagtgtacctggacacctcagtgtgtggatgttagagaccagtgtttcctcatttggcacatctgagctcagcttggcaccacagttgttaaacctcagctggtctcttgattctgagacatgtagaaatggcaaggcctctgaagttcaaggtttgggccagttttctcatcttcctgaaygccccagatcatggatgctgctcatatccttcagtagtctcatccctgcctgcaccttatacctaaccctctccctgagcagcctggtcattcttctgtaccccttatacacatggatcctgacatctgacctctgcctccacctcccctcttgaagtcttttctgaagktttcccagacagtgctttcctgtgaacgtagctggtttgaattccccatgcctgacrgatctgctaccctatagtttttttttttctgttgagatggagtcttactctrttgcccaggctggagtgcagtggtgcartcttggcttgctgcaacctccacctcccatgctcaagtgatcatcccacctcagcctcctgagtagttgggactacaggtgtgcaccactaatttttgtatttttgtatttttgtagagatggaatttcgccatgttgcccaggctggttctgaactcctagactcaagcaaaccacccacctcgacctcccaaagcgctgggattataggcatgagtcacctcacccgtagtatagctgctaccctatacttctgtctatccaaaagcgcttgggatcaagtgtagccagtatgtaatttctagaagaatcttttgtagtttgtgctctgttaatagggagtattgaagtacaagttcctagagtggagagacttcacatctgtttatcttgctctgaattacatcctaggcacagaggacacttaataaatcaatgtccccgtgaagatggtggtggtgtcagtaaatgataataatcgagaatcccaagaggaaaacattacttgctttgaatgtgaacctcagttttcagggaaagaaagctctatccagtgtgtttattttaagagggcagtgtgttgagtttgcgaacacaatgagatggcccgggtgagatgagtggtgtattattttattgctgtgtccttccaaatatttctgggaactctgatgtgtcaggacaaaaggcctgtctttctataacaacctgtggctttaaaaggcttactaatgggaacatgaagaaacaattacatgaaaaagttgatctttggatgattaaagggtcttctaaaaatatgtcgctggtccttcactgtgccttgacagagtacagtacatgaagttggcagcctgcaaacttgacaacagcacagagggtggggccttccagtgctggtccctgggagcacgctgtaactgcagggcsattccctggtcatcctttattcttgtccaccccaccactgatttcatcactgttgtatctrtggttccactgtaccttgtatggatatctgctgtcatattgtattttcattctttatttatagatcgttctctctggactgtgggaaggaccagtgtggtgtggtatcttaatcatctttatatgcacaggacctagtaggtaacaggccctcaatatatacttgttgaatgaattaaataatttatggaaaagcactaaaaaaaaaatcacctgatccatcccttccttgtaatrtggaggatcctagagagttttaatatcttgtctggagccccacagccagaccatggcccctgcagggaccagatccattgcttcccatcttcaagcacagtgtttttggctggagtccttgagctgtggattttcccctcttgtttgtctacactgtttcttcttcactcattcattaactgattcctaccttatttattgaggarctactayggacaagacaaagtaaaacaaattttaaaaccccactcatttttattttagcaagggaggatagccaataaataataagcgtagttaacaaggtaaatcagaaaaaggtaaatgctaagtaagaaagaaaaagagcatggactgggggamtactgaggcaggagcaggctacagcattacaggggggtgagtgagaaagtgagatttgagcacttacttaaggaggtgagggactcagtcttgcagatatctgggagacatatgttccaggcagagaaaactaaagcagaggctccaagttaagagtgcttggagcatctgacgaacagcaagggtcaggtatagccaaagtggagtgtgctgggatgaggagaaaggggagaagtaggaggtgaggtgagacaggtgaccgtggccatatccagcatggctttgtaagctgtaaaagggactttggcttaggttcagaaggaaatggggagccattcaagggttttgaggaaaggaatgacatgatctgacttgttttagaaaggaccattctaactgttgtattgcaaatagactttgggagagcacaggaggaaggagggagacttattaggaggctattaaataagccaggcctgagacgatggaggctggaaccaaggtggtagcagcagcggaggtggcgagaagagtcagatactggatatgctttgaagcaagaaccagtgcgatttcctgatggattggatgtggagagtaaggaagaggaagggagtgaaggctaccccaaggttttcatctcaacagatgaatggatggagttgccatcaatggagatggaccaggctgtgggtggagctggattccccaccacccatccaggtgtagtttcatcccagggatgaaagaggagctgggagactatgggaggcttcccatcccagggtgactgcagaccccacactatgtctgagccctccttcttttttcttcaccaattcagatgtcatcttgtcagtattccctttatgattcatcatttctttcatagcacccacctcgattaactttacctggctcaggtctcccagttcattccatattcatacatagatatgctttacttaacacaatagatgagtttttgaaaagagaggtgtaagtcacctttaaaaaaatagtaaagcctattttatattcaccaggggagccaactatttaaagtaccctgttattaatgctttttttcaggtgaagaatccttttgctggatgactatggatctccactaatttatcagttttgaaagatcaggttagaatgtataaaactgagtgcacacttatataacacgtctctctgcatacgatacctgctaagcatctcatcagagtggtccactgggaccttaggttcaggacattttatcctgagctcatcatttttccctaaatcctcttcttcctgtgcttcctgttttacccaggcctgaaacatcaagtttctctcttgatatctcccctcttcattgtcccctcagcatggctctgcttcacatctgtgaatgttctcacatctccagtattcgctctgagatcctctgcctctattatagttcaggtgcccaagacattgcaatgggcttcttaacttttttcccgtgactacttttccatcttttcaaatgcatattcccacattcagcaattcaaggaaacccccaagagcgtggttcttatccttcccctccctgctcaccttcttcccatcatcttgcctatagttcacaatatgaatgccgtagcatgggatcccaagccctgcccacgaccaatgcatgtacctctctgacctcatcatcactactcattcgtacatcctcatgtaccatgagggacagccatgatgaaacttttactctacccctgcagccctgagtgtgacaggtaggaccctgtatcttcatctcccctggcctgcagtgcccctcagaccaccccattctgctcaaatcctgtccatctttccaagaacagcccaagcacctcatcttctttagagccttctctgtcttcaggcagaaataaactctccttctatagtactttaggcaaatcatttttataacacatatctcttttctggcatattattattccccttctcatatcttcctcacccacctgtactcttcctgcccctgggtcctatcttaatcctctcctttatctttttgccttctagcatctgcagtgagygcttcataaaaatgtgccaatggctgtatgaaggtccctgttcttattgatgttttattattgacacgtgctgcactgaattgtaagctttgtgaggtctggagctgtctctttggctttcttacctccatcccttcccatacagtccccacagatggtgtctattgtgctagctgaattctccattagcccttgtgtgttcaagtttacaggaccctgatgttgcatacacagcagattgggaattcatcccaggcattctggcgtcgggtttgtttattctttcattcatttatttatagcccatgtggtgggcatgaatttcaggccacaaccgtagggtgcaagaaatgtcacatttctttatttctctaaatcaaattagtcagtgccaagcttccacctgcagggctggcaggaaattcagcctgtcttttgagagtcctcccattcacctaggattgtacaaaagcctcagggattcttatcagttctgaagagttgaggaagagctccttgggttgaggatcacacttgtcatctcctagcccatgtggtctgcaagccagtgtttcctctgtttccatgttaagagagcttgataactcaggctgggagcatctagtcccttctgagatccctcagagttccagagcactgtgagaagagccccagcctccaccactcacagtacctccagaaaccaggcccttctcagcctcagggacccttctcaagacctactccctccttgagttggtttcctcccacttcaaggctggatgaggctgtcttttagcatccagcagcttctgcctttagccagacaagttgataataacctctgaggctaggacatatacagttctccagacaagggaaggaaaatacctcttgttccttttagcctctttcagtaatgtaaaacaaaaaacccaagaacaaaaaaaccccaaaacattactcttactatctacattatttttctgtcatgtatctcaataaggtgatttatactgagtacatttgtcataaatttgtgacagtatacaatagaaataaacagtttgttccaagaaaaagtgtggatagttttgggtttggaaaagaacccaaaattccattaactatacttgttatagttaagctttatatttgtctctaagtttcctggtagccaaagtgaaaagggagatgtggtttcatgactctcttattagaaagggagaaacaatccatttctcaaaataagcatggttttcttattacttggctctgaatacatttctcatgtgaagtttatgaagtagattagaagcataaagtcttctacaaaatccttagactattgcatgaacatctctgcttcttatggcttgtgtctcctaataacaccttaggagggtaagtgtgcctgcgggcctgcacgttcttttaagttaccctcctatgtttatgaataatgtagaactaaagaaaaaaaagagatcttctaatatggattcttctcccttcataaatgacaggactaggcaaataggcctgaggttctatcagtggttgagggaacatatgaggaagagcatattggaccctcagtaaggacagtgagaactgattggccactggatggaaaatatgagattgtgggaaatagacgaatatgtgtgagattggtaagccggcccgattcaagtcttagagtgagtctttactgactgtgagaacttggacaagtcatttagtttcctcatctgtaaaattaggatagtattatctacctcaatggtttttctgtgcactaaaaaggttctctgcaaactgagaagtgctaaggaaatgctgctcattatcattgttgttactggttgtagttgtaaaaattaaacattccaggcaggaaaacagcatgaaaggaatcttggcaaagaacaaaatgtattcaaaagtcagtgattgtaacacttccagaatggcagagtaggtacctccaaaaaaaccacatctccataaaagcaacaagaacactggcaaaaattgtcaaaatcattttttttaactctagaaattaaccaaagacttgaaacaatccggggagcatttgtttaagaaagatggctgaattggctgggcacggtggctcacgcctgcaatcccagcactggaaggctgaggcgggtggattgcttgaggctaggagttcaagactagcctggccaacatggcgaaaccccatctctacaaaaatacaaaaaattagcggggcatagtggcacacatctgtagtcccagtcacttgggaggccgaggcatgagaatctcttgaacccagtaggcagaggttgctgtgagccgagattgccccactgcactccagcctgggcgacacagtgagactctgtctcaaaaaaaaaaaaaaaattgctgaatctcactaagaataaagagcttcgtgggattttaacttgccctattcccattcacctctcctcagctctgcagtagtcttaaaaaccaacagcctcacaacaatagctgtgaaaatcagcagcctagcagccactagagggggcagaatggagttggaacacctaccctccccctcccccggccaacgccaaactccatctccagagagttattactatatggcctgtctggcaactccctggagatgcaccattcttagggcttctctttatttaaccaggctccaggcttaccgagttcatacagtcatatctctatggcatttgtcaaaaatatcaatggtaatgctgggtgcggtggctcacacctgtaagcctagcagtttgggaggctgaggcaggtggattactggaggtcaggcatttgagaccagcctggccaacattgcgaaaccctgtctctactaaaaatacaaaaattagctgggcgtggtgcatgtgcctgtaatctcagctccttgggaggctgaggcaggagaatcacttgaacctgggaggcgggggttgcagtaagctgagatcgtgccactgcactccagcctgggtgacagagcaagactccatctaaaaaaaaaaaaaaaaaaatatatatatatatatatatatatatatatatggcaaataagggactaaccaaaataattaaaagaaaaacctggagaatgagatgccacaggggcttttaaaagctttgaaaaatttctaagaatttagtatgccatgcacacaagtaggactgtgcacatactcaggaaagccctaagaaggatctaatctttcacctttggctgattttgaggctatgcaaataggaagtgaagaatgaggcagagttataaacagctagtgtagaaagtgtgctccaacacacacacagagcctctcagygaagtctgggagacgtattgattcaaaacatttaaggaaatccctgttcaatcaaggcttcagtgactacactgattagttcaggagagtcactaaaccacaagcaggagtagcatcagcagcaaccacaaatattagcaaaaacacaccctggggaaagatttccatagtttccacattatatgaattgaaatgtttaattttaaacaacagcaaagattaagagatatgcaaaagtatgggaaagcatgacttctacaaagaggggaacaaagcagtcaatagaaactgtccatatggaagcttacactttcaacttactaaacacagactttaaaatctgctgcttaaaatatgttcaaataactaaaggaagtagtgtctagaaaaccaaaagtgagtatgagaacattgtctsattaattaaagaataccagtaagtaggtaaaattattgatttaaaggaactaaatagacattctggagttgaaaagtataataactgaaatgaaaagttcactagagggactcaacagcagatttaaattgacagaagaaagagtcaataaacttgcaaataggttaactgagattatccagtctgaggaacaggatgaaaaaagaatgaatataaatggacaaaacatcagagacctatggaacaccataaagcatgccaacatatgcataataagcatgccagaaggaaaggggagggagaacatgcttgaagaaataatatccaaacactcctcaaatttatgaaaaacatttatctacatatagaagaagttcaacagactccagacaggataaactcagggaaattttcacctagacacgtcatagtaaaaatgtcaaagatgaagacagaatcttgaaagcaggaagagaaaagagatttgtaagggattctcagtaagattaacagctgacttctcattggaaaccttggaggccagaaagcagtgttatttacattaaaaatgctgaaagaaaaagactgtcaaccaagaatttcatattcagtagagactattcctcagaaatgaaggagaaattaaaacattctcaaataaacaaaaactgagagaaattgttttagaactgccccacaagaactactaaagagagattttcaggttgcagtgaaagaacagtaggcagtaactcaaatccacatgaagaaataagaacagtagtaaaggtaactacagaagtaaacaaaaaaggtaattaaatgtatttttgtctgtaacgcttttcctatctaacttaaaagacagccacataaagcaataattataaaactgtgttgataggcttataatgcatgaagacataatttgtatgacagttctctacacaaagtggggaggagggaaaagaggtatgaggaaagtttttgtatactgttgacattaagttggcattaattcaaactatactgttttaaattaaggtgttaattgtaatctccagggaactactaagaaaataagtaaaaaaaatagcaacaagggaacaaaaatggtatgctagaagatatccatttaacataaaagaaggcagtaatggagaaatagaggaacaaagacataaggcatacagaaacctaaagcaaaatgacagagataaatcctaccttattactaattacattgaatataaatggaataaacacttcaatcaaaaaacagagcgtggcaaaatggattgaaaaataagatctaactatttgctctctataagacacacactttattatgttttttaatttaacttctaagttcagggttacatgtgcagatttgttatgtaggtaaagttgtgtcataggagtttattgaacacattattttgtcactcaggtattaagcctastacccattagttatttttccttatcctgtcccccctcccaccatccaccctacagtagtccccagtgtctattgttaccctctagctgtccatgtgttctcatcatttagctcccgcttataagagagaacataaagtatttggttttctgttcctatgttagtttgctaaggataatggcctctggctccacccatgttcctgcaaaggacatgatctgattcttttttatggttgcatagtattccatagtgtgtgtgtgtgtgtgtgtgtatgtgtgtgtgtgtgtgtaggtgtgtgtgtgtgtgtatatgtatatgtatacacacacacacacacatacacacacacacacattttctttatccagtctaccattgatgggaattgattgattccatgtctttgctattgggagacacacttgagattcaaaaacacaaatagcttgggataaatggataaatgttgaagatgtaacatccacacagtaaacaaaagagaaccatrtgaatattgcacagaatagactttaagacaaaatttttactagaaacaagaacattttataattataaaagggtcaatctatcaagaagacataacaaatgtgaacatatatgcatctaatggcagagcccaaaatactgaagcaaaaattgaatttaaggaaaaaatagaccattcaataattataggtagaaacttcaatacctcacttttgataataggtagaatggctagacagaagaacaaggaaatagtaatactacaaactacttgaacaacaccgcaaactaacttggcctaatagatacttatagaacagtccacccagtaagagcagactatatcttctaaagtgtacgtggaacattctctaggataggccatatgttagacygtaacacaacctgaatacgtttaaaaggattgaaatcatacaaagtagattttccaaccacaatggagtgaacttggaaatcaatgatgaaaggatatttgggaaattcacaaatatgtggaaagtaagtgacacactcctaaataactaataggttaaagaagaaatcacaggagaaattagaaaacagtctgagacaaacaaaaacaaaaacacaacatatacaaatttatgagatgcagctaaagtaaagcactgcttaaagggaaacttaaggctatacatgccttgctttaaaaagaagaaagatctgaaatcaataacctaaatttctaccttaagaaattagaaaaagaagagcaaactaaactaaatctaaaacaactgaaggaagaaaattaataaagattagagcagacagaaatcaaacagataatcaaaaaaaaacaaaacaactagaaaaagatcaaaagtcagtgactggaatagccactaggaaccagagggtctagtcaggtaaagctgcaaaggacagtgagtgaggctgttttgtgaagggctgtggtgctaggctgcattctattttgaagtgtgagctggaaggagacattgaaactttctcctgaaagagaaacaaaataaaataagtattataaaggattattttggtggcagtgttccagatgcactataagtagctaaagaataaaattagtaaggtgaagcaagaggccatgtaataatccaggcagctagggacacaaccctagagtggaatagtggcgtagagggtcagggttggtgcaagggagattaagaaggaagagagaygtcacaggatttgatggctatttggacctttggtctgagaagtcacaaaggagagaaactgagttaagtcctggctccataattttctgccatttgttcttagrcaatttctctgagccttgtgtcccctcaactatgaaatgagaatagcaatgcttgcctggcctacagcagaggattttgtatggtttaaatgaaatctggtgtataaactaggcataatggccagttgtgaactctcaaatgctcgataaatgtgagggtttgtttgctgttgtcatcatgagttcagtttctgacatgctttttcaatagtgagaacatccaagtggaaatgttgaatgggcagctgaaaacatgggagggcgttctggagagaaattagtgtcagaactaacacgtgggcatcacctgcatatctcggggaaaggagaggaagctggaatgggctggggataggakggacaaagactcactcgctggagaagtcaaaacggttagggatgcaggcaggccagggmgggaaggagccaaagggtcagggcaggcttcacagtgttgcaagtcgccagtacctgagacatgaaagagagaagacagccagtcttgggatggggaggtatgtgttaactacacacaggagtttccttaggaaatgaaggaagcaaaaatagcattatcagaatttagctggaggatcacgaggaaggaaaggtagccaacagggtagactccacatgttaaacaattggcttgaagaagagagaattgggacaatttcagagtcttgtgttgagatttcagagctctttatttgtgtggttctgctgttagtagaagtgccagggccatgaggaaagccactaggaagacaaggacctcatcttatgcctgcctctggtgctctgagttttgcaaagggggagctataccacacgtgacagataggtgggagcccttgtccatagaagcaggagagagatacctagcaaatcagagaaaccctggggtgtctgtcagtcacttttcaatgacttgagcctgagtattgggagaagcagcccactcaagccagcagagctcattttggaggcttgattcttctccagcatctgccctctcccctgtggtgccagccagagtgtgcccagtttcaggaccctaggatgttcactgatgacagtatggtgctaaacttaggctggggtgtgattccaactcagggctgctctgggagctgactgttccagtgggcccccttaggacatggcatgcaaccttcccagcttcttcttctacagagtccagctgtttctccagcattgagcaaaataaagcctgaggcagagcaagagcttcctggcatctgtgtgcacatcacatcttctactcttcacagtagacccgtgatcactcagcagtactgcgcagttgaccttgatcgctcagcaatgctatggagttgtgcagaggagggacttcctgtgctgggaaagagggggtatgtggggattgggaaataatctcaacagcttccctggcaggaagattgcagaatcaagttgtgcacttggtcacatggacctctgggctgctcagtcatttcacagccttaggatgcttcttaacatgcttgacctcagaaaacaccagtaaagtaaaacagcaacaattaagcccagctactctgcctacttcatctgtttcttgcagcctggaaatgaaaaataccctgcctttcactgcagttcagtgacattcaggagctctgcgctgcagccctcgtggccactcttgttctccctcccaacaactcttccatctttctcattcccaaccctgggcttaggcgaggatgaaagttctgggatgtcagtggctgggcggtatcttgagygagtggatcctcaaccagccatccccaccagttccccagggatcatgggcacaaaggaccactggagaaaaatcagtgttttgtaggttagggctttgccccaggcccctggctggtcccctacatcagggagctggcctcattaccgtaggcctcaaggacccattttgtatccatgagagtctgctgcctaggtattcctctcaaaaccccaccatggtttcatcatggccttccataagaacaaatatgcctccttccaagtggaggcaggtcctctgcagctgactgtggcagccgcgagaagttccgagaggagagggagcaggcacagctcagtaattccagagacagagcttcaaaacaggaagactcttgctagagagagaacrctgtatcccagcattttgtgtccagccatgctcttgcccctctgtggagggtggaggggaagtgggagcctctgcccctccatggaagttggaatgtgtagccaagatcctgcactcaaagtcacatttccttctaggatcctaaggatggtagctattttcaaggcttaggcagagcacttaaaggctcttatttttttctccatattgatcttgtttagatagatcagtgttgtgaatgtgtcaacaaggtgtaacagtttggggactagatttcttcaacttggtgagttggaggtgagaggaagtggtgagcaaagtaagcagaggtaccagtggcattggtgcatgagagggagtcttatcaaaggatttgcrtggccatgcaaagatagactggaccraaagtaagattttagtcatcttagtgagcctagatatcatttccttatgactagttctatgaggttagaatcatatctaatagtaattgtttggaaataatgktccagtaatctcagagctgaaatgtgaccaagtcatgtgctttcttttataaagttcccctgtcacctgcttgaagttttgttaggatagagagtttgggactttctccccaacctctggggctgcctgttctctggggtgacctgacaggactcctaagacatttcagaggttcaccccttaagtgatcacatggcatccaaataggacttgataagtctaccattttgagaaagaacttgtggccatttaaaggttatgacactaaattatctgagcacatggtgatcgccattacaggaaacccgattctcatattcgaattgtacaattggagcttgctggtttgaggagggtgtgtgactacacacatgcgctttctcatgatgcttgaatattaatggctttctggccttcagctggggctatcaaaatccttcagccccccagtgaatgcaaaatacacagataaataggcatcccaagaaaaagagttgctgatgggtctgagccttaaaccatgtctaaatctaggctgtgagagatgctgacagttggtgatcagtaccgtctctgcccttcttggctgtctctcatattccaggggctggaagcctacaaacatttctcagacttcctcactataaagaatccaccagggagaagcctgtgcctgagatttggaaggtaggagagaagcagaagtcattgttgctccagcaggtcagtgggaaggctcacgggcttcagcagatggcagacatgagggtttgaggttttgccagtgcttctgggtatcctcctgtgaatggtgatagaagtgccacccacttttttgctgtatgtagctgagaccatgcgtgacagtctcctgcaattcctatatttttcttaaacactagcagtgaactttcttgacttttgcttccttagttttttcaacaattttataagcctctaagtgcctctattaagttccttttgctaaacatacctagaatggtatgtttagcaaaatcaaatgccttgatttttttttccatccagccctggtgcttggccctggacttgtgtgatttccacgagaggagtggacagatactgctattacagctgacatttcttacactggcagttaagaatggcaccagtccccacagatcttcttgggcttcatccctaacctgtccacttagggaggccccacagttttcctcttgtgcttttctgaaaactcaaaatggtcaggctactggagctttatccaaatgaagaaggcacaagttctgttctccagctgctcacagtctagaagacaygaaaataataatcaaataattctgtatgatatgcacaatgctgtcatagaaatgatgttctgtgcctgcgcagagcagagaagaactcactcgttcccaaggacaatggaaagcttattctccaactcaaattctcgaactcagccaaggtagtatttcattggcattatagctagtggggatatgggttaatctgttgtaacaaatatacaaaatatacaaatatacaaaaaaattatagtagtcaatcaagatagaagttgcygcttttctctctaaacagtttaaaggtggtgtagggtgagtagcactctgcaacaggaggtcacgtggagagccagggattgctactcctctgggatgtagagtgttgytctagtctacatgattgcgactggccatcagcatcacatccatgtcctagaccggggaaggggaaagagaggggcggaggacagctcattttcattttaaaggttgtgacctgtgcgttgtacatataacttccactaaccttccattagttatgtggttctatatgattacarggcaggctgagaaatataactacgttgtattgtattacaaataaaataagtcagtcttcatgtgagattggctctgtggaggaccagatggtcggatgctggtggagatgatgaggtgtgtgaagatgacggtggkggrggcagtgagatgatgttggttgcagacgtcatgacgtggcctctgtgacagtgaatgtagaggtggcagggtctgtttaataggctggctgactattcctgactttagttccttatattcctccactttaaataagagtcatagagcttgtccatcctttccttttacaaatgacaaaatagatcccgcgaatgacttgctcacggtcaccccactaatgaattgtagaacagaaactcaaactcaagcctcttgtcttctgggccaattttcttccctctgcacgcgttagagttcttgttgggtggggcagtttgagaaatgggggctcagggagcaacccccagagaattgagcatagggaagagcacctgagaactgctaataaatgttctcatccctagccctcattcttcattctagaaagcagcttttttggtttttgaacatggccaatccctcaactttaagctactctcagccgttgctgcttagcatgggagccgtccttcccttctcctcaccttcgcttccccactagatatcatgccaatgaaataccaccttggctgagttggagaatttgtcatttttacatctccacatcctagtgtcttctgctcccagtgacaaataaatccctgggctgatggctggccccggccattcattaagcaaataaagcccagcatgggagttggaggctcataaatagcccctggtgtttcaccgctaccccacctcctgctgcctcgaaggctttgcatattgataataaagcagcagtgtttctgacacaccgttatgtgtgggagcaccccgtggggaagggcaggtggcggcggctctagctgagatggagggagccccgctaaccggacctggtggagggcagttgccctgaaaccctgaatcttgatgctctcatcccagcagggctgaattagggtctctttctagttcagcacagagctggccctggatggactgagagttctgatctggctttccgccatggtgggaggaggagggagatctgggttgagtagcagctcctgcctgtcatgtcctgagagagaggctcatcatcayctcagaggagggaaatggctgggagacttgtggagcccctcagagaggccaggcattctcacacctggacaacagccaagcaacctcacctgagcaactatgtgggtgaggasctcaacttcctgcactgaggagcaggcagaagaggagaaaaagtgtatgtctgtaacaatgagaacgatgggaatcattaacagggatatttagcattaaagatggggttaaggtttacaagcacacttgcatgcgttatacacctcactacatatgctcattagctatggactaagtcagcctcttacctgatgaagatgccactgatgaaggctcccctaccccaagcatgtgcgcatgcatgcgtgcacacacacacacacacacacacacacacacacacacacacacacagaatacatctgggccctcttagagtatcatatccgccaggcagcacttgttgcttaaagctttccagaggcaaaaactattgtttttatagagttgcacagtctacatgagtacactgtagtggatgtgaatttaatttacattcccatttcaccatacagggtggggacataaattgtgatgataaacataagcacgaataatgagcaactaatagtatgtactaatcctgaaaggaattcttgggacatgctaatatcactcccctggcctccacgtaccaggtttcttcctaaagttgccaaggttggctgatctcagacatgatcccttttgtcgaggatcttttgcactatgctaagacccttgaggttgaaggtatatggtctctgaagaggtgccttggcttctcagagtaagaaaatactgagcacagggacygtttttttttttttttttgctttgttttgagttggagttttgctcttgttgcctaggctggagtgcaatggcgcgatctcagctcactgcaacctctgcctcccaggtacaagttattctcctgtctcagcctcccaaggcatgtgccaccgtgcccggctaatttttttgtatttaatagatgtgaggtttcaccatgttagtcaggctagtcacgaactcctgacctcaggtgatccacccgccttggcctcccaaagtgttgggattacaggcgtgagccaccgcaactggccagggcctgtttttaacactcatgcaagggcctgtgtttcctrgtttctcatcatacctggatacagtgccagatggaccagcgtttgtttgttttaatatagattatgatgcatcagtgaattttaccttttaaaggcatgagacagaaggagaaagcattacaggtaaaaaaggagtttcattcataaaatgttggtctccattgcacttdtatgcrtgctgtgtagtgtactggctgcagtatacatttcataccttaggttgtactcaaaaaagtgggcagccctgggaagactgaggaagaaaggactgtggacttggagcagaatcccttttctttgtatatgagcaggacatcaatgacctgccatgatggcatgggagaacgtcagactggaagaaaccttggagattacccaggtcagtggggaaactaaaggccagagattggaaaagactggtccacagtctccccgcatgttagtggcagaggcaggactagaccccattgtgattcttggggcagaccccctccctataagtgataagcacaagagcctcaggaatctctttagaagcaaatmtcttcatgtggctgccagggtgacttggcgtcaccccgactgagggctaactcatctctgagccagggcagggcagccacttaaactatcacaggccacgctccttgtccgtctggggagagaagacaagacactctgcatccaattaaaagcaacaggagggtgtaagggagacagaaagtaattctccttcttggaatccagccagagcatcctcgtgctaagactaagaaggataataacaacagccataattgtgggaagagtaaagcttctacaaggcctcagagacttggcaaaataatacaaggaaaaggaaatsaagatggacactctgacctttgcagatctcctgtagaaaagccagtggccccgccccttactggaagaaatgtccttctgaaagtgcccagcattccacaggggtctctggtggactcggcatgtctgaggacgagctctctgtgatggtcaatgttatgtggtagctcagttaggctgtggtctggtcaaacaccagtgtgctatgaagattttttttagatatgtttaacatttaaatcagtagacttttcatcaagcagattactcttcataatgtagacgggcctcatccaatctgccgaaggccttaagaataaagactgaactttcctgaaaaagaaagaaattgcagtcctcaagactgtaacatagaaggcctgcctgagttaccagcctttgcactcaactctggttggagttggcttgatttgcagattttggacttgtcagaccccagaatagcatgagccactttgtttaaatctctctttctgtatctgtacacscataccctgttggttctgtttctctggagaactcacatgcacttgccctctcattgccacctttctttcatgttacagatgctttcaaccttgtcctcacccascttagagctcttggtctctggtctcttccacctccttccacctgtatctggttggttgacaagcctgccrgtgttttctctgctccctgtcttccatccagccctgtcttgtcattctccagtcagtttcttttaatccacatctagacaattccagtggcctccttagcttgtcacttgtgctctctccccatccatctccctatgcctgcctctacccgtctctctctccataatatggagtgttggtgatgggtgggcaccttgcaggtcatgagatccagaccctgctcatgggtctggattaacaaggtgggagggacactggctctggggtcaggtgtcttgcaatgggatcgaggcctatcaacttcctagcattattgtaaacctttatgcctcagtttccccacctctgaaataggaataacagtgataactacatcttagaattatggcaagggtgaaatgagatgattcatgtgaagcacctaacccaatacaagtactcagatcagtcttaactgtcttaataactattgtcttaataactattataacttaataacttaactgtcttaataacttaataactatgtaggaagttggcccaaagagatgaagcgattggcctgctgcacacagcagtccatggtagagtggagccacatatcaggtatttcaacttttggtctgggcctccctctatgccatcccactagcctgccatccctgccagctcatggtcctagagccctgccgtgtggggtcacacttagaatttttcagtggttccccattacttctctaataaaattcatactttgggcctggtatttgttcagcaaatatttatggagtagaaccatatgccagggtctggactgggtgttagggatacccactggaattcctgtcctcacgaggccaacattctagcaagaggagacagaaagcaaagagatatatataacctctatggtggtgacaaatgctatgaagaaaaagcagctgaataaggggaaggtggtccagacaagtcttggaagaggtgaggttcagtaggagggagtgagccatgcagaatctaatgcattccaggtagaaggagcagcaggtgcaaaggccctgaggtggcagctcggctggcctggggaggagcctggtgtggctggagtagagggagtgaggggagagcagtaggaggggactttgggccaccgtgtgtggggccttggtggggcctttgtgccaccgtgaagacttgtccgtgagtgagttgtgcagccaggagaaggttttgagccaagatgtgatgtgatctgacttgtactcttcttggctgctgtgtggggaataatctctaaggggaaaggggaagagccagggagatcagagttcaggtaagagatggggtcaggtgacagtggtgcaggtgctgggagatggcatggagtatatttcaaggaggagtccacagggtttgctgacagtagggattgagatagaggagtcaagggtgatgcctttgttcaaggctggggaaatgggaagcatggatttgcctctactaagatggggaagctcagtaggagcaggtccagagggaaaccaagaccgggttggggccacacactcaggatatattttagaccttaaagtggaagtgcagtgtaagttgttggatatgagagggttggaggcaaagacataaatttgggagtcacctcggagtctaaatccttggractaaatgaggtcaggtagggtgctggatgcacaactggaacgcttcagtgtttagctggaggaggagagtgatgaggggctgccagagaggtgggagggaaagcaggagtgagtggcatctggaggcagaggagggaagtgtcrcaggggagggatgaggctactgtgccaaccatggatgctgctagatcaagcaggrtgagagtcaggaatgccgattggatttaaccatgtgcaagtcatgatgattctcaggaaggcaatttcagtagaatcactgggataaaagcctaatggggttggggctcaagaaaggaaggggagaaagtgcaaacagaattccctttctgtaagggaagctgagaaaggggatgactgctgaagagggttctggggctgaggggagggagggtattttaaagatgggaaattcaccgcatgtatgctaatgggagtggtccagcagagaggggagctttgacaatgtaaggaaagrggcacagttacaggaaagagttccttgaagaggtgagaggaggtgagatccaaatcacacaatgggtgatgaaggccatccatgctgtggtcttaacctaacttactaggattatttttcatccactggaaactttactccagagaaaattgagatattcaccattctcaattttggtttgagccttcaaacataccttgtttttttttttgttttkgtttttgtttttccccactatagctttattggaccagtccattagctatcttagaaaactctcccatatctcaatctgtcaaaatgttaccccttcttcaaggcctctctcaaatgcgcccttcctcaccccatgctgcattcccacaatagtcctgctggaagcagtgcctcctgagcttctgggccctttgcttggggtctccagactgtcagtgctgagytcctggataagcagacagagcgcatgctgatagcagtagcctggcagggcacccrtaggcggggagtaaatgaattaagctcccatgaacttatccagaattttggcattagaaaatctacagagaacctctgttcatttcagcatactcataagtcgtgtttaacattgcctattgtttttatttagaattacatattagggagtactataatttcttttctgcttaaggctcccaatgatccttacctggccttgtttgccctccccagttccytaggaagctctatgcttcttgagcaggaatttcatcccaccagtcttgggccccctgaagcacccccttagctccacatacacatgtgctaagtgggaagacgttgttttgtagcagtrttacatggcaactggaggccctgtgtgggatgggattctgacttggggaaaggtagagtgttgggggaaaaaaaggccttattccagaactgggaggagaaggagaatgtaggcctgcrtaatgggtcaaggtccataatactcagcccaagggaaggctgacccccaagccacttattgagatagggcccagcatcccaccatcccctactgagggggaccccctgaggggtacaygcccatatttggggtgtgacagtgtatatgttttaaaaggaggcaggctttgatctgcctgtcattatttcttctgagaaaatcaagtctgtgccagctcttccttcttccctcccttcctcccctttctgacccccacttcccatccatacacacctttgcaaaacacatgcagagtctctgacactgttctagcccacaaagaatagaagaccaggaggcagtatttcagaaccacagggaagacggaatctttcttctatctatctaattatgtactggtgtgtctgtctttgaggccatcactgcatacacaacttacctcctttttattgattatgacaacatccctacagggtggttattacatccacactttatagatgagaaaaactaatttctagagaagtgaaaggacctgtccacatcacatggccaggatgggacagaatgcatgtttaacttcaagtcctctgacttccggcctcccatgccagtgctctttctgctgcaccaggactcaacaaacttttccagaaagggctagattgtaaatactatgggctttgtgggccagatsgtctgcagagtgattgcaactactcagctctgctgttgtagtgagaaagtggtcatagagagcatgcaagcaaatgggcttggctatgtttccataaaacttctatttataaaagcagctggctggccatggtggctcatgcctataatcccagcactttgggaggctgaggtgggtggatcacctgggatcagaacttcaagaccagcctgaccaacatggcaaaaccctgtctctactaaatatacaaaaaattagccaggtgtcgtggtgggcgcctgtaatcccagctacccgggaggctgaggcaggagaattgcttgaacccaggaggcggaggttgcagtgagccgagatcacaccactgcactccagcctgggtgaaaagagcaaaactctgtcgcaaaaaaataaaaataaaaaaaagaaaagaaaaaacagctggcaggccagacttaacccacaggtctgagggagaagaccctagacttcctccaaagttgccttctaccttgctcccctttggtgaccacagctccacatggcccttgggaacatcccttccacacctctaaaatggcccatctgtgcagcacctgctggctgttcaagctcttgtttgagtctctcttggctccgagatgggcatttgtgctcctgccttccctccagtcccattggcaattgattaagatcccatacttttctgacagcagtggctggcagaaggggctgcgtggctgagataagccagagtgtgctggagaaggggctggccacatgggatgtgggtttcattcctggagaggcgtaataagcatgtaattggcattatagaaatgtgcaggctgctggaaagcctatttctcccacacaccatactcccttcagagcagctgaagctggctcaccaagagagaggatcagctagatgcagccttcatgagcaggtggaaatgcacttgtcctaaatgatctctgtaagccgtatgatatgtgggagccaagaggctgatcagggcaagacagaaggtgggttgatcctaccagcaacacaccttccctcccagaggggaaagggggactgggcttggggaggccattcccaggccaagcatgaaagttgaggagtcgaagattaaaaatagcttccccggggtgtcaggtgtcttgggtgtatagataagcccatccttatgtgattccggaggccatcttgaattttagccttaggtgggctgtgccccactcccaactttgtgctacccagagagggtgctctgactttcctgagggggaccagggactgcttgaggtattttgcttctttctaaacctatttgttccctggggtgtcatttacccacatgacaatactataaactatggctgtgttttgaatggaaaagttctagcaaaatcagctttccattgagcttcatttttggttcaatctccttttaatgaacataattaaaaaatacagttctgtggactgagtgtattttcatctcctggataatgatccaacactgttttcctgtgtgatagctgcaaaacacacttctctgacgtgtgttcccaagtccctgactgagttgctcatttctgacagcagtggctggcagaaggggccacatggctgagataagccagggtgtgctggggaaggggctggccatgtggaaagtgggttttattcctggagaggagtaataagcatgtaatcggctttcacagagatatattcatagggtagactgagccaccgctcgccccttactcaagtgcaatttcatacttaaattctggcccaagagtaagcctttctattgtagaaagctgttcagttgttaaggcacttttacagtatcctttcacttaattcccgcaatgaccctgtgacctgggcaggccaggaatcatgatgcccactttacagagggacagtctgatgttccaagtaggtcttctggggtcacacagtgagtgagtgcagagctgggactagaatccagtattcattctttcctctgcctcaagctgccactcccaggaaggtccagtctggaaagacagcgatagccacttaacctccatgagaaaccctggttccccctgggactatcccgtcatcatcctcatgactgtaggctccttgagtgcaggactgggttgtggggctgtgtggtggacccgtgttcttctgcttagctgaggccctgcagagcacagatagcttctcagagagtggtcattagataagagaatgaatgagcccaagtcccctcaaaatgacagtgtggctggggcaggtgagttaggtgtcaggtactaggctctgcagttctggaaagaaggcttcctttcaartgaaaattaaarcaaaacccactcraaataaactctgataccaacaaattctcaacccaagytggaatttaaattaagacgacattatttcaagttgaaatagagtgtcagcagaagggctgagtggaggcatcgcagttctgtcctctctgagagttgcctactctggggcttctgtcccagaagtgagacrtatgagtggtggtttaggagccctgagttgaagtctggctgccttatgccaggctgtggccctggggacatacttaatctctcctgcctcatggagttgttctcaggatgatgtgagatggtgcccaataaagcactgagcatagtacctggagacaactgagtccccatcaccggcccccttcacgctgtcatttgtgagggggcctggggtcactcattcattctcttgtctaatgaccactcactgagaagctctctgtgctctgcagggcctgagctaggtagaggtcgcaggccccaccacacagctgctgagcctgcaggccacaatgaaaggtcatgagggccgtgtgctgagtaaaattagttttgcttttttgttgttgtcatcccaaagaacctgcacaaatttcctcaccaactcatttccatccttccatccccagaagccctcacttttccagatgtcatttgtcaaataccttaaaaataataaaataaaaaaagcagtccccascccttctggattcttgatatgatttggctttgtgtccccacccaaatctcatctcaaattttaatccccacgtgtcaagggagagacctgatgggacgtgactggatcacgggggcggtgttcatgtgacagtgagttcttatgacatctgatggttttataaggggcttttcctcatttgcctaccactctctgtcacctgctgccatgtaagacatgcctcttccccttccgctatgattgttaagtttcttgagacctccctagccctgtggaacgtgagtcagttaaacctcttttctttataaattacccagtctcaggtacatctttatagcagtgtgaaaacaaactaatacaactcttcagcaagagtgaatgatatatggtagtcattcctctcaagtccttcggagctggctctttctcggcctgggccaggggtacctggagggccctgctgccctgtttgtgttaaatctgcgagcctctgtctcacccttcttgctacttgctctccaaggatttcttctgcttacacatcatcaggcccctttcttgtcgtgaaaattgtttctcctgaggctgggaagtgctgagtggctggccctgaccgtactcgggaaatgagtggagtacagcccccaaggccgaggccctgtggcgagggcaattttacccttgtcaccataactacaggtgcccttattactcacacagacatctcacccttgttgaacaacatattaaactattagtctccatgccagtgggttcagttagttcacagtggcaaaagctgatcattaaatccccttttccctgcttaatctcttttaaattggttgccttttaatttcatcaagcgccctctttctcagccattccattgtgccctgtgcagcggtgctggcatctctccaggtgagaggtgctgggctttctaggccttctcaggtggtctctgtggactgcaagatttgggcagaggctaaagaggattttcttgcagagtgggcccccagggagtagtgaagggtgacagattttgctcctgtctgactctcccctgactcaatacttggagcaaagggtcccagtctttaaaccctttacttcattaatctatctaagaacctggatcccctgcaggtaatgattaaaatcttgtgttttctcastaggaaatttaaatatttataaaaatgggtactctgttatatgtattatttacagtaaatttagctgtcattaagatcatagtggagttaggagaattcatattggaagggcccatcagcaatgcctattgtgggcaagggaacagaagatggcaggtatatgctgagtggccacagtcactgctagcaggcctgatggcttacaggaagaacatcctggcttgcaaggggccaggggccaagtcatatctgttgaaggccatggacatggaggaagattagagtcttaggaacctttctgaaaatgtgggaacaaaattcatatataaagcagaaatggcattaacagaaagagcatgggccagacagactggggtccaaattagaagtctgccatagctagctttgagacccttgcttaaccataaagtgatcatcacattatttgccttgcagggtttttgaggattcagtgaataatgtgtacggttcgtccagcacagagcgtggtatgttgtgaggatgatagctaacacctcgtgatcccttttgtgtgccaggcactatcctaagctttgtaggtagtgctttgtgtcttgagtcagattccatagaagcagagccttgtaaatttaatgagagcactcccaggaggaggggagtgagggaagcaagacagggcaggcgggggaagatgctctgcaaggatgtatctcatagtaggagatttcaacctggttccaaggggagccttggagaagagattgctcagccactggcaccagttgctccctggagttggggatatacctcccaggagaggcaggtcttgttctggggggcaggtctctgtagaagtttgcagccagcactcctagcagctgagagatgggtgtgcaggcccagtggaaggagttcgtgtggggcacagtggcacccactgtggttcatccctctatcctggtacagcttctctgggattctgtttagtcccagtttctaggaagctctgtaaggaaaggtgtaatcgcctgaattgtgtcccttctctaccctctaccattcatacgttggagctctaacccccatgtgactgtatttggagagatggcctataaggaggtaatcaaggttggcataatacaatctgattggtgtccttacaagaagggaagattagaaatccagaaagagacattggggatgtacacacagagaaaaaaccacatgaggactcagccagaagacggccatctgcgggccaagtggagaggcctcaggagaaacyaaccctgttcgcacgttgatcttggactgccagcgtccagagctgtgagaaaataaacttctgttgtttaagccccgtggtctatggtgttttgtgatggtagcccgagcggatccatgcagaagggctagtagagcaaactctaggccctgctgctgcaattgtttgtgactctcatcatctccttcctcctctacccattctagatttcatgccccctcagcctgcttcaaggtctcgtttaggcagcttgtctggtgggatgatcccagtggctctggttaccaagccaggatccaccttgcatttaattgtaatagtctcttccaatctgtgatgtctttccttgtcttacgtgaccttgacacgctgaagagttctagtcagttgttttgtagaatgtctctscattgggtttgtctgatgttttctccagattagactgaagctacgtgtttttggcaaaaatactacagacgtggtgttgagcccttgtcagtacatccttataggrgatatgtgatattgatatgttttattactggtaatgttaatcttgattgcttggctagggtggtactggccagcagtctccatcataaaattactctttttttcccttttgccattagtacattggaggatgtactttgagactttgcagacattctgattcatctcaactgttagcccatcgattttagtatagatggaggcagattttccggaccctttttataaggcagagttgccttctttctgcaattctcctgtcaggagtggatttggggtgccctgcagaggctgtagtcactaactctcaactctcactggcagagagtgagttcccatctctttttttttttttttttttcctttgagatggatgttagctcttgtcacccaggctggagtgcaatggtacgctcttggctcactgcaacctcagcctcccaggttcaagcgattctcctgcctcagcctcccaagtagctgggattacaggagtgcaccactatgcccagctaacgtttttgtatttttagtagagatgaggtttcaccaagttggtcaggctggtctcaaactcctgacctcaggtgatccacccacctcagcctcccaaagtgctgggattacaggcatgagccacggtgcccggccaagctcctgcctctttaaagctagcgagtggttgattcttcagaggccacagaactttagcccttccctccctcctttatgcattccctcacctgctaatttacacttctgtctcatgtttccttctccttcctcttcctttctctggggttcttgttgaattaattatggcaggaaagactggtgtaagggtacaacccacacagaactttgcactctatatacatggtaaacscaggggtgctttagggatcattgactcctaccctcttattctacgatgaggaaatagggagagttcaagtgacttgctcaaggtcacactgctagtgggtggcagatagattgggtctagaatctgacttgctgacctacatgtatcgtgtgtcccagcatgctgcgttcctcagggctagtcatatggggacctgttcaggccttcagaagggggcatccactggcaagcagctggatccacactgcttctcaccatgcccctgccaggaggtgaaggcttgcttttccttcagtcttcagtttctctgcctcagtcctggggaaaagagtttgctctctgtgtggttggaaactgggggcccaatgcctctctgtgggaggggcttctccctgcaatgagttgcaacattgtgaattgatacagcaacctactggagagcccagagcctcactagctatccagatccagagctgatgggtacccccttgccttttttggggaggaagggggaagggagatgttcacttttattctcatctttagtcagcttctcctcttaattgacatttactatgtgcaagccactgctttttacctacagtattttcatttaattcttaaaaccctgtgaaataggcattattctccccattttacaggtgatggaactgaggttcaaacaggttaagcagcttcctccaaatcacataaacagtaagyagtggagccagtgtcagagcataggtcttgagaaaatttaggttcatctgttttcattccttaagtgcagctttcatgaaatcttacagggacagaaacttaaagccattgtctgcacaatcgttatttttagattgtcagagtctataacacttttgtagtgtttcatgaccattcccatagctgtttacttttagttttgtaattacatagattcagtgctctactggttcttctgctccattcttgggttttttattttgaaccacctcttcattgactgcatgtgggaacaaaattcatatataaagcagaaatggcattaacagaaagagcatgggccagacagactggggtccaaattagaagtctgccatagtggattctagtggctgcttcaaaatgggctcataggtgctgtcatycctgagcttggatgtgggaatatcacactcctgctgtccgtacttgaacggcacctcagcaggttaaaatgcttctggtcacayttggactcagccccgtgggtgttgcttcattatccgctgacatggaaagctgccgcggggaagtttgaggtcagctgaacatttccccttctgtaggtgacttgttggttctgcctgggtgcttgatgatttctttcttgcatttggaagttcgatacctaaaccaggaaacatcttcgtgtcaatccctttgtatcaattttttatggaatgtggtgtgcaattttgatgtgcagactcagatctttattcatctcaggaggtttttatttaaaaagatgaagactgttttgtgtgttccatctgtttctctgcttcaggttcaccagttttctgatgttggatcacctttgctctttctatacattttattctctcctgtagttgctttaataatttaaatctttctcctctgagtcccagtgacttgcccaaggtcccactgctcaagagtgtcagagccaggactggaaccctttagttggtatcagtaattagatttcctgctgtgcctgcactgcttcttggagtttcaacatgtatttattggttctgcaaaagtgttttgtggttctcagttttatcattctttattccattgctttatttaatcatctaatcctttagctcttattttattaaattcatgcttttaagctattccatagcatgaagcacgtttgggtaatttccttccatttgtttagttgtttttatttagactggggtttttgttttgtgtgtgtgggtggtgttgtttttggattttttttcatactgtgttccattttgttggtttgtttggttttggttttggccccacccmcacaggggcatgtttgcatcattgccatgcagttcctttgcatcttgcttgacctacacaccctgattcagggcaagttcattcttaacccttttttcaccatgtctgagcctgttcatttcctccacaaggcatagtttgagggctgtgagttctgtgtctgtccccttgtctgtagcctgagggccttggtggagtgaggtgggaagggagagctgcactgaggctgtgagcagtttttattaccaacctctcagagagaaaagccacactcctgcctccaggacacacgctgttttgtggaagagacccaataaacaggtaactataggtgctgccataagaagaggggacactattaggttgcagggaccagatttgcttgcttccttaaagtcatggtggtggcagtttaatggaaggatgccagtgtgtgggaaccagggttaagccagaccaaaagtccagggcagtacttgcagaccacggcaaagaacttggcctttattctgtgagtgrgatccaacygtgtcttagaagagccattccagcagcagtgtgaaaaattaaatacaggtctaaagacataaatccccagcgcttatctgttggtcggctctgcaaagagaatgaggagatatcttctgtactggaaactgtcaccaaggagtagagaatttcctgagcagactggcgttccccacccttctttgcccctgcccgtttcaaacaccttcagctcctgggcatcagctgaagaatgcctagcttttccccagtgctgtggatctctggagatgtgtttcccggctgagcgttatggcagccagagccaggcggcacgtccagagaacacatctcaaggttgttgtttgaagtacaaacagagcagggaccaattatggagtccctctgcacagcatgcctcctgactgtgctcggcatggggtgggcagaggctggcagagctgaggagccagctttggccccctgaggggtagctgggagggagaagggagagtatcatagatttatttgctgccagacaggtctgccagtgtgagctcatctttcagagaggcgccctctcctcttaacagccaggtgcctcctgtggccccagggtggcactggatcctagatcctgtgagcagaattttgcatctatttctggggaagaaaagaccatggcttctattacactgaaaaatagggccctgtctcctcaaatagttaaggatgcctctgctatgtaacccctatattttataggtgggaaaagtaaccagagacccagtgagcagaaatggtttacccgaggattcaaggttgtggaggccagatctaaaagtcagctcttactgccccatggacatacaacgttgtcttcactttgctaccaaagtggtagctattcttttttgagtgctaaaagtatgcctggcacagagcttagtgctttacttattttagtccattagatccgtaaaatggcatcacagttttgcagaatagacagccagacagctaactctcagttgagggagagaggttaagtcacttcccaaggtcacagagacagtaactggaggagagattgcagacccagctctcgtgggtgtccaccctccctatcccttccctccctccttcctgtgcttctgtctcagtctagttaattcctgtaggcctaggccaaggcttgcctccctgctgaacctctccctgatggcaccagcccttgctggtcttctcttttctgaaaagccaggcccattgaaagttttttgtaggcaaaatggttctggtttcccatcttgccacttccttgctggccacagttgatcagattgagagtattccaggcagaaagccctatgagatgggatgagatggatgagaaagggaagaacggccagtgtggctggaacataatgagctaagagggatggggaggggtaagtgtggagagtttgcaggttctgatcaggcagggccttgggggccacaggaaagagtgaggacagcattctgagtgcagtgggagccrctggagggattctgagccagaatgggagagacrggaacgaatgtcatcttgagacagagtctctctctgttgcccaggctggagtgcagtggcgcaatcycggctcactgcaagctccacctcccgggttcacgccattctcctgcctcagcctcccaagtagctgggactacaggtgcycaccaccccgcccggctaatttatttatttatttattttttgtatttttagtagagatggggttttaccgtgttagccaggatggtctggatctcctgacctcgtgatctgcccrccttggcctcccaaagtgttgggattacaggcatgagctaccacgcccagccacagatgtcgtttttaagaaggcgactttgggccaggcgcagtggttcacgcctgtaatcccagcactttgggaggctgaggcaggtggatcacctgaagtcaggagtttgagaccaggctgaccaacatggtgaaaccctgtctctactaaaaagatacaaaaattaggcagatgtggtggtgggctcctgtaatcccagctactcaggagactgaggcatgagaaccgcttgaactcaggaggcggaggttgcaatgagccaagatcatgccattgcactgcagcatgggtgacagagcaagactatgtctaaaaacgaaacaaaacaaaacaaggtgactttggaaaatgaattggagggatcaaatgcagtattccagaatgcagttggtggtggttgggtatggttgtagagatgggaaaaggagggtggctggatggaggcatgctttgcaggcagaaccaacaggacatggggatgggttagttgtgtgtgggttcaagtgattagagtgagatttagaatgaggaagaaggaattgtmgagggtaactctcagattcctgacttgtgcagctatgtggctggtggtgccatttctttacttgtgaaagcctggaagaggcaccagttccaatgggcaaatcaagagttccatttgaaatccatgcaaggtgagatgcttgtgagaccttaagtgggcatgtccagtaggcgtttttttgatattgttctggagctcagaaaagagatctgggctggaaaactatattggaatcctccatctatagaaggttgtcaaggcacaggaatggaggaagtcacctgtagggagagtgtaacgagtggagaggagggaccagggctaaatccatgcacacttccaacaatgagaaaycaggggaagggaggagccagagaaggaaatgaagaagatgccaaagtctgagaagcccaggagaaagtattctgaaacagagagacaaggaccctcgaaaggggcttttccagggggtaggatgttgctgaagggccaaggaagatgaatgtgccaaattgtgcctyagtgctgagcatcmagtaggtgcccaataaatgtgagatcctcttccttgccctctgcctcctccatttgttcttctttcattctttctgcatatctattggccttttccctcagtttacagtaagaactcaagaaataatgaataaataaatgaatgcatgaagtgaatgaatgaagtgaattgcaaattctgctgtcattatctcccctcctgcagcccggggcattgattttgttcaagggctaagccagatgcaagtttcctgggaacctatggcccttgtctagcagagggccctccagggagccatttctcatgcttgtctggcatcctggcctgagcagtgccacatggtccccggccacccgtgcagggagccgcctcccccagcaggaagctagagtccctgtcgcctttcctcccggagtggtgtcgactgcactgtaatcacacaattattatgccattaaaatgtcacatttgaagaaatccgtataaacagagcattaacaaccgctttaaaattgtagtctttaccactaatgacctactttctctatgcaccgcatcctcccaccacccatgctggctgcctctcttccagccttgattttggaggcaggcgagaaggtacagtcatcttttctgcctggaaagccttaatgcttaatgtgctgagagtgactctttgacaggactggagacagcaaggctggggggagccatttagtgagtgagaygtggatgtcacacccatgcagatctaaggttctgaaggaagggacctcagagagaatctggtccttggaaactgaagagagctgatggtgttgaaaaatctgagggttggcagggtgcagtggttcatacctgtaatcccagcactttgggaagctaagatgggaggattgcttgaggccaggaatttgagaccaacctgggcaacatagtgagacctcacctctacaaaaacataaaaaataaagaaatcagccaggcatggtgtcgtgtgcctgtagtcccagccagctactcaggaggctgagtcgggaggattgtttgagcccaggagtttgtggctgcagcaagcaatgattgcactactgaagtccagctgagtgacaaagcaagaccctgtctccaatatataaatraataaatagatctgagggttggggttcatcccattggttttgacttcctcttcttgggaagaagagagttattttgagaccttggccattctcacagcataacaaaattgcaggagggaaatgycctgctcagaggttgtgggccagagagctttggatccctgccactgcgagttgagggcaagggcataggaaggcagaggcaaaggggtgacaggggttttgataattttaatctcatttccagaatatggctctggaaatttgtttagatactcaattttctttgtctccagaatctgattttaatgcactaaggaaacggataacttaagggaatcttgcagtgagtacttttataaagtaaaacrtaaaccaaagcagctctggtgaaatgattaatctgttcccaatgcatctgaattgcaaatctggattcctatccagttaccrgatttgattaaagagcacacctaattctgaaaaagcgaaaagaaggccactgtggatgtaaagaagttggattcatgtgggagacattcgaaatgtcactctaacaccttacatccttccaacagttcaggatggacctgcagaagggatcatgccaccagtgctttgatgaatggacaagaatgattggtgacacgcgtgtcatttggggagcaattacttatgcttcccgaggtcagggaaatgtccctgtaggtcttgtttacataagcaagtgcatcataaatcccattctgatagttcatctaagattccctgggcgaggttcctgctgcgttttggagatggccagtgttgagatcaggcatgtaggatttctcccagcttctcagcccactgccatgttcacttgccacgtcgcctgtagcactaaacccgcccttggttgaggcagccatcctgccctatccatattcagcaggcacagcgtctggatactcggggtctgcttttgacataaaaagagtcctttctattaaaagccagccagcagcccccayagagtcccacgagataaagtcgtttcaaagtcattcgctcccatcccacacctacatattcagcagctgacctagttttgagagagctagagggtatcttgatgtcaccttatttacagagaagacagaaaatgtgctaagctctgggcccttgctgtacatactatctggggagatctatcctccccctagcaggcgtagaagagaggggaacaaattctgctcagctgaaagctggaagcttcttgctaatgtcacctttggggattgagtggcagggcttaggggcacttgactctgaaactgtcttcctagccatattccagtttagcacctttgggcacgtggattaaggaagggggttccagaataaccttggcagaaaatgtacaactgtgcttcctgccatgcctcctccttcatccttcccaggtctrtctccagacaggcactggttttggaagcctcactctatgaatgatcccctatcatggcagggactttgcaaggttgtgcatggaatctgcgtgcctgggtttcatcccagcacctccactgacttgctgtgtgaccttggccaagtcacgttagcaccatgaaactcggtttcctcttcagtaaaatgggattaatagaagcacctgccttgggtttgttctgagtatagaacgagggacattcttaggatagagcctggtgtgtagtaaacgctacaccactattagttgcagtagttgtcgttgtcattattctgggtgattgtatctagtgtgagaagtagtcactttttaaagccagttctttcgcctggcttcccacagcttcccatctttatttctctcaaggttatctttgcctggcaagaacctagagggagatttgaggaagctgcaaaccatgctaaacacattcctcgtgagtgtgactgttggaccggccattccagcccatggagccaaagtcctgggaggcatggagaagtcccttcgggactaagttcagacgaggagaagggaccagaagtcaagcaggaagctctgaagtccaggttcctcggagtatggggtctcaggcaggtccaggcttctaatctcacccaagtctctctccagaatcaccctgcacagcttctgtgctggctccagcccccactctccacgtgcataaaaagcaagttagcacaaagctcaatttctagccttctaagctgataataaccttatgtattacgcttcttaaaatagttttcttgtcttatcatttgcatggcactgtgctcaaactcgtgtgagatggagctttgggtagaaaacacctgctgagtcccaggaagcattcacattgataatgaccaattctcacagacggacagtgaggtgaggcacccggtcatctgtggatgctgtcagagaccccatttctgccacagggaagggagaagcagctaaacttaaattgactgactgtaaattgcgttttccctccattagcattcagtcaccaaaagaaataatagtaaccacagctatgttgtaatgataatatgttgtgtatgcattatgttttaccaagcaatttttcatgtctcatctcacttctgaagcctaattcgggctatgaagctgggtgagggtgaagattagtattgtccttgggaggaggaggaaactgaccacgaggttctgaaactgaccagaaaggatatgtttagctgagccaagctcaggacccagctttctggaattagaggagtcatccctggggctgcgcttccctttttagcccatctccactccccacccccacacacacaacacagaagctcttggggctgcatttctgtccagctaaaattgggttgaaaacaacaaaggatcccttgaaggagaaaaatcacaaatgcataatgtttactatgatcacttttccattgtttgattcttcccttcttttccgttctttacccttttccttgtattcccttastgtcctaggggtcacaatttggtggccagcaggccaatgtcagcccatgggcatgttttgttttgcccaagagcaggtttaaagcagtgtaactaggcaggtattgtgcggcacctacaagccatccactctcgctcacatttctcagtgactccaggtctgctcattcatgacccctgctagataccttggttcagagggcctcttgaaaattgcttttccctgtagctatttcttatggctagagagctttctgatggtgccttaagatatgttccagtcctttgcagtgagctaaggaggggagagaagcctggcttttggagggagagctgctctgtccctgataaatccaaatcttatttttagggttattttcctcctagtggttttcagtggggtgggcatctgactcggcccctccctgtcctgttggaggctgctctggccacattgtggggccaccctgggaggatttggcctcctttctctgatattgctgtctctgagagatggctgcagcctcacccttgcagacctgccctctgtctgatgagttgaccctgcatccaagatggctcaactgtgcacaccagagacagcatgtttcagcatccagctctatccagctccatccagctgaagctgccctctctgagtcacttccagctttgctctacctacatccaatccctccccttggactctcctgggtactggttcctgttctcagtgcctgttctcttccagtattggcctcctggttataggcaaattcaccctcctgtgcttccacccagtccaccaaatcctttttttcctgagtcccctgtggatacctggctccctgcctcctagatcacctgctccctgggtaccagagctggaggacacagactcttctcctgttccagtgaccagcttgcygctctggtctctgaacacaaagagaaggggatgcagaaataaagcgtgtgggtaggaccagctctctcagtcctcatgtccaccggcaattgggatgtgttcttcagacaagtgactagcaatccaggatgcccatcgacataagggagttttgggttcagtctttggtggtggaatttacagggtgttgataagaaggaagcagatacatcagcattagagctcacgcttcctggcacgtgcctgggagccaggcccgcttccccagtcatgctgacttagacttccctggcacctccttctcgtgctaatttgtaagtaaattaatctccatagaaggtccaaatatgtgagtttctttttctattccagaaacaaaaaccgggcttctgtccattcagttaatcatattatgtttcactgttggaatttttaggcaattataataattattggaacttttcttcttccagaaagctggaagcttcccccaaagttgtaatgcatgtggagcgcaattgagacatgggtggggagagtgtttatgggcgaagtggtggggaggagagagatgggcagtggttgcttttgttgtcagagactaaatgagagagaaatcaaatggaaaaagactcccacactaaagagggatccaggcttggcctggctggcagaccctccgggggctcagagatgccacagcagagcaactcttagcagacttattttctaggcacctggctgttgagggaggagggtgaggaggaaagtggggaaaagggacaggaggaggtagaacagaaaagtaaactcatccctgctgaattatgtgctacctcatttggtgtgagaaattgccctttcttcctctattatatgtccattctatctatcaaactatttaaggagtgcctttcatataattaatactaaccattaaactacaacattgaaggagcaattgcttaattctgaggaaaatttaaatttattaccagtacctgagataaaaatgaatactaaagagaaggagagaaacccccacagaagataaatagaaagccaagtgggatattgacttgatccttctccagtgcagggtaatttggcttctaaagtgagttagagcataataaattaaatttagatttctgcacatcagttaaataactcccaagacagaattccagtgagaggaagaaggtgataatacatggaggaaatattaaaatgaagatcttatctaataatccataattgatgtggggtccctcggtgaggggaaaggattttccagctctttcctttgcatgagcccaggcaagcgaagggctgggtgcccctccttcctcactggaacttgttctgcacgctgtggggaatgtctgccactgacagtcatcctcttcccagaccatccattctctgcaggtgggagttatattagcagtatgatatgggagcatatggtgatatgttagcatttcactggggattatgttgcaccgtctccctctcttggctggcccttggaaaaatatagtcactccctaactggctggacaacagaaaggtataggggtaagcagatacttttgtatttttatgactagctgacagtggggaagagtggtcttgtggctgactggagcatctggtgatatggaaggaacacagttttgaaatgaaaagtcttggattagaatctcagtagtgagttcacttttttttttttgaaatggagtctcactctgtcacccaggttggagcgcagtggcatgaactcggctcacttcagcctccgcctccccacttcaagcaattcttgtgcctcagcctcccaagtagctgggaccacaggcgcacatcaccacgcccgggtaatttttgtatttttagtagagatggggtttcaccatgttggccaggctggtctcaaactcccgacctcaagtaatccgcccacctcagcctcccaaaagtgctgggattacaggggtgagtcactgcgcctggcctgaattcactgtttatatgatttgcagaagcccctttgtttctttgagcctcagttttttcatctgtgaagtggtaacagtataaccagcctggctacttcataggggtagtaaaaacgagatattcaagtgaaaatgcttcgcagattataaacaattttcttgggcctgtttgatattgactttccatcattattatttcatttctgaaagtttgatttggttctttttcaaatcgacccagccattttttgtcttttgttctttactaatttttattccatattttattttacttatttttatttgtatacatttggggagtacaagtatagttttgttacattataccatattttaaacattttatctacagttatgccttattctatatctagtattcctgtatccagagtccttggagcatctaaatctgtttatagtttccactgattcttacattgtagacttgtcttgtcttatagtgacttgtttccttgtgtgtctggtaattttgtrttgtggtttcatcttttgatgagctttgtgggaattctggggtcctaaattggagatgttttcctccacataggacttacatttgcttcttctgggagccagggtacaactgatctggaccactttgtccccttcttgggcttaattacagaagactcaggtttagcttttccaccttttgggagccacggtttattttctcagtgacctttaccctgagggcagcctcacattttacctctgcttatcattcaactaccctacctctagtttccgcatcctgtatttttttcctggcttcactccttctttcatgttgaagattttccttctagaaagaccagaaatgcatcagaacccttgtagaatctagttatggtttagcatgaagagtcccctgggagtatctggtttgccgtggtgctagataacagaagcttccagctagtggaaagcaagggcactctgaggggtatcaggtagccagagctggctgtggtcctggagatagcctggctacatggagacgagaactccagggccccacagctacttaaaactaggtctgttgaaaagagggaagacagtacaggctttgagacagacatcagttgtgtgaacttgggcaaatcatttatcctccctgtgcctcactttcctcatttgaaaattggggatatagtttcttactatatcttaagtttgtgggggttagaattcactttaggtacccctcactcactagttccctctgggattctaataaggggagatgtgatggttaattttatatgtcaatgtggccaaaccacaatgtccagatatttggtcaaatattattctgctgtttctgtgaaggtgtcttttggatgagactaacatttacattggcagactttgygtaaagcaggctgccttccataatgtacgtaggcctcatccgatcagttgaaggtcttaaaagarcaaaactgacctccccaagcaagaaggaattctgccagcagaccaccttaggacttcaactgcagctcttccctgggtctccaggctactttgaggattttggatttgtacctccataatcacatgagccaatttcctagaaatcaatcagccaatcaatcaatctgtcctctcaatttctgtgtatacacacacacacacacacacacacacacacacacacagttggtgatatttttctgtagaaccctgaccaatacagaaacacatacaagaatctgcaaacaaatgggaaacgaataatacttttattaatttcatgacctgagacaagcaagctcctctaatcctaaggaaaggctttgggtaaaagctgagttggacaacgtggaattgcctgaggatgaagtggagcttcctatatccccacttcagctctaaactaagggaccagaacactcagggtttagggagagatggtggcacagaccccagatctacatattcaaacagccgcttgggtgagataggcttgcttctagaaagtaagcctagtgtgtgcttactacctagggacaaatagaacaggacaacctgttccacctggacagtggaagtgcagactagagggctaggccatggctttaccacacaggagtcctgctcaccagcaaaacatgtgtggctccaaccggtgagaatagttttgcctcccttggggaggagcatgaaaggatggaaagaaacactggaagtgtttacgacactcacagcaatgccctggatagggttttacgtgttctcctgcactgactgtgccaggctccacaccatattttattttcttaggagataactcttccatggaaatatgatctggtgggtgaggagaagagggttctcctcctgataaaatatggtgtagagcctggtgcatagtaagtgcccagtgaatggcaggcattaccataggcacagcattttcacagaacaacatctgtccatgagacgttgatataaaaggtagcctctatgctgggtgatatctcccttttcatagcacacatatggcagggtctccactgtgtttgaattccttgatgaacccatctgacttcagttggtctagaacagttagaccctttgctacctgtttcacactcctgtgtgttaatttttyggaggtgcaaatctcagtgatggtaccaggggttggaagatctgggaaatattataatagctgccactaaatatttgaagactatgaaagagaaagattagactagtaccaaatggccatgggggcataaccagatccaaaagggagatattaccaggagacagattcttgatcaatataagaaggacatatctagaagttgcagttctttaaggttggagtgggctatttgggacctctgtgtcactagctggacccaggagggatgtccatggggcagtggcatgttatgctgaagcttccaacgttggatggatagattcatgatatcctctttaaataagaatttacatcgctgttttctactctgaccttcttctacgttaacctggcagcacatccccgccttcttgcaggaatccagctgcagaatacctccttttttggccctggctgttaggaataagctcactgctgggaggagaagggtttctcagcaaggagagtgaagagtagaggggctgatggtgaagggagtgcagacatcctttgaaggaggaatagcccgaagcaaagaaagaagttggctgaggaaaatgacaggaaatgcacagatagtgagtctttgaagatggtccaagaaaatggcagtgaggctgtgataaggccgtgctgcctaatggcaaagaacatgggggctggagctggctgccggagttctaatcccagctccagcattgacaagctgtgtgatatcagacacaggacttgggacctgttatttctgtgcctacatacccccaattatggaaaggtaatattggtacctattattgtgaatattaaatgtaaatagttatgacacatagtaagtattcttcctgggtgttagctgatttattacagggtaaatttgagacgttctcttcaggatcagacacagttcatggtaggatagaagctgtatcaaagggataaagagtttctcattttcagggtgaaaaagaagacaattgggacagtaagagagaactagtagtaccaagctcaggaaagaagggagagagacaaaagcatgagtgggaatgtacaacagctttaaatcctaacagaagggagggatacaccaggatttcagagccagataatctgcttgaagtgagagggagtaaaaacagtcccagggaaggaaggagaaaaggagattcaagatttctccttgaagcatggtgggaggagagaaattaagcaacttaacggatgtgccatcgagctttagtttttgatgccagattatttaagcaatggtcttggccaggggtttggcagacttaacgagacagtttctgttgaaaagattatgtcttagtctttctgtgcctggcttatttcgcttagcataatatccatccatgttgtcacaaatcacttaatttcctgctcctttaaggctgaataatgatctcgtttatatgtgaagcctaaaaaaagtcaaactcagagaagtagagagtagaatggtggttaccagaggctgggggagatgttggtcaaagagtacaaagtcagttagacaggaggaataactatagttagtaataaaaatatattgcatatttcaaaatagccagaacagagacttttaaatgttctcaccataaataaatatttaaggaaatgaaaatgttaattagcctgatttgatcattccacagtgtctacatgtaacaaaacatcgcattgtaccccataaatatatacagatattatttgttaattaaaaataaaactttaaacgggataacgtttgtgttttctgtttgtggcatcatacttttgaaacacattccctctaggttgaataaattctagtcagaaagtgaagcgggggcttgcttgggggccatgggtgctgatgaaggccccacaggagtgggcccagttctgagtggagccctttgggagctcctgggtatttgttcttgttttcccgggacgtatcacttcctgtaccagggaagtgtgggaaggtgagcatgtgtgttcagaagctttcccggatatttgtatgagccaggaaatggaattcacagtatagatacaatgtactgcaaaggccccatgcagagtcagggaggaggctggtrtcctgtgatggtgtggccagaacaccccacactgtgccctcctgtggcactttgggctcttggaagctggatgtggggactcatgaatggaagagcttggaagccaactcccagggtctttctctgcctaccgaccctcagtagaggagatgcttcttgttgtttctgtctttggtgttgggaggtttaaatcagtggttccatcacttaacagccgatgaccttgggtcagccacctaacctctctaaactggtcctgccctgcacatataggggttgggtgaggattgcatgatgatatacgtgcaagctgccttataaaatataaagtgctattgaaatagtgatattattttattttatttattctttatgtagtggtattattttaaacacaccttcaccattatttaatacattcagatattgatgtagaaaagcccagctcccagtatgggctgttccccctcagggggtctcagtgcagcagactatgactgcgctttgtgcatatgacagtctgaggggaacaggcccctccgaggacaccttccatgacttctttcaatttctcatgccagcctggctgctgctctggcttgctgggggacagaattccagagttccaaaattctggagagctcacagcacatggtgctcccagaaggcactgtagccagggatgctgggatgttcagctgccctgtagggaaaccagcagcctcgggccctcttgggcccatgcctctatctggtgtgaatagagagtagaggtggggtgaggccaagaggtcagttgtgcccaccctctctggtgtcgtcatgcgtgcctgcccctccacctgcctctccagcacagggaggcaatgacccactaggcaggccccagttccagcgtcccttcccacctggctagatggctgaggccgcttcccagctggtctccttgtcctccacgtgtggccagagacgttttctccatgacctgcttcaggcagactcaactacattctggagttttctttcactcatgtcctctttgcaatccacattccggccttgctattcctcagttagccattccctgaacagattttttttctctgggccttcctgcctgtgatggttcattttatttgtcaatttgactgggccacagggtgcccaggcatttggtcaaatgttattctgggtgtgtctacgagggtgtttctggatgagatgaacatttgaatcagtagactgaagaaagcagattgccctccccagcgttggtggccccgtctaattcactgaaggtctgaaaagagcaaaaaggctaagagggaattcctcctgctgatgtctttgagctgcgacatggcttttcctgcgttcagactccactggaaacatcagctcttgctggatctccagcaccacagatcctgggacttgtcagcctccataatcacataagccaattcctatttataatacatatttttctgtgtcaacttaaactatatatataaaagatcatatagtactatgcagtgcccaggtatggtggcccctgtaatcccagcactttgggaggccgaggtggaaggattgcytgaagctaggagtgcgagaccagcctaggcaacatagtgagatcccgtctccacaaaaaataaaacgtaaaaaaatgagctgggcatggtggtgcacacttgtgatcccagctacttgggagctgagataggaggatcgctggagcccaggtgtttgaggctgcaataagctatggttgagccactgtactccagcctgggtgacagagtgagaccccatctctaaaaaaagaaacattaagcaatttcatccttgtgtgtgaatgtcataggatatacttacacaaacctagatggtagagcctaccacacacataggctgtaaggtatagcctgttgctcctaggctataatacaaatttgtacagctgttcctacaccgaatactgtagacatttgtaacacaatggtaagtatgtgtgtatctaaacatatcaaaacagaaaaggtacagcgaacatacagtattataatcatatgggaccactgtcgtatatgcagtctgtcattgactgaaatgttgttatgcatatgtggctgtatacatatgcacatgaamacacacacacacacacacacacacacacacacacacacacacaacattggttctgcttgtctagaggaccctgactaatatactgccttttatctggctttttgctacatacttattttccctctctatcctcccttaagcaaagtaagatccctactcatccttcaagatcgaactcatttgacaccttactcaagaagctgtccccagttcccctcactcctctgctctcatagccttgtcatcgtgctcatgtaattgaactcactttgcggtgtgttacaggcatctccatgcatgtctctctgcaatgttgcaatcccctcgagagcaggggccttccagctccacatcgctcttctctagctcggagcaccataagggctcacaacttatttagaaaattgtgatgaattaaattggaaacaagccagtgggagacagttytatggcccttcccatgaggatgggatttcaaggttaccgtggggtgatgttccaagcagaggtcacagctatcaggctgtgacattgcaaaacacaggctgggggtttctcacccccaccgatttcctctagaatgttctgtagccgcagtatcacaggacattaataaaatcaattattggataaaaatctctggtctccaaagcttcattttatgctattagcaggagaatgctgtttttaaaaaggagrtaacagagagagagagatcaattactggataagctcaccatggtgcccagatgaacatgcacactggccagcagcccctcttaacctgccaygtgggccaagcccctgcactgctgtctgtggagcctgccctgggccaccctggtcaggtttcccgagtgcaggaggtgcattctactcagtaatgggatgggcagctctcagctcagtgcccttagttagtacccatgcagcttgagacacttgcacggccactgggttcagtaacacatgaatgagcatcccaccctcagggacaatgtcagccccagsataccaacaaccctcatgttccaatcagaacctgatcagcactttcttcctggaaacacagagtcttatgttttatgaacttgaaagttctgagctgttttagatacagaccagctcctccccaggggtgagagtgctaacatgcattgggaagtgaccaccaaatttaagtgtccagcttctcaaggccttgaagtccacacctcctgctagctatgtggacagtctgttggctgtggaaccggtgtgggcagggcagacccacactaggcagcctgggctgtggctaggaggcattcccttgcctcctctgctggaggggccacagagactgagctctgctttgagctctgccccttcccacctgtgtgacctcagacaagccagtcaaccttttggaacttcatcttccctactcagttcagaaggtttgggtgaagatgaaatgagatcatgaatacagaagccaccttacaattctgaagtgctctatccatgtacggtgagggttgttactcactcccccattgatgcttcttaaaaataccagattcctgggtaggaggaagaaaggaacagatagggtggtggtgagtagcacaccactgtagacggaactcctccttccttcccatcgctggcccttctacagcagaggaggaatgacagtcattcatgaaactctgtgccagccatggggcaagcactttcataccaggtattctcagattgccctggagagatggcctctggggttgggatactagaattgaagttccagttctgccatttcctaactgtgggatcttgggcaaggtacttacctctccaggctgttatctcatctgtataataagggtatgcacagcatccctctcatagaattgctctgagaactacatgaagtaatgtgagtcaagatcctagaacagcacccagtatatagaagtgctcagaaaatggtggcagccatcgttgtcatagttctgtttttattgttgctgatggtttagtttatgttctgcttctgaccccatctttgagccaaaccttgccagaataagcctggtctctggggttgggtactgataggcagacgggggctagtggaggacagggagccgttctcacagacttcccattcgtgtcacgcagccttcggacgctgactgggacgacctgtgggaccagtttgatgagcggcggtatctgaatgccaaaaagtggcgcgttggtgacgacccctataagctgtatgctttcaaccagcgggagagtgagcggatctccagcaatcgggccatcccggacactcgccatctgaggtacttcctccttctcccactctgttacccccgcagtcaaaagagatcaacagcaggcttgatctggggcctgctgtatgcagcaccagtgctaagaaccgggctggaccatctgctgccagttgaacactaaagggattcggatttggtgattgaccctggctgtgttgcctactgcttactgctgagagcaatcccaaaccccgcaggtcccaccaggaggctgggggcaggggtggcctctttcactttaacctgctcctcaccttagggatcatttgacacgaacccatagagcaccaaaaacactacagccaaggcctgtttttccctggcagattcccacacccgaggctgggttccaaagtaggggaaggcaggatgattggaccctggggcaggtaggtgggcggtgttttctgtgactggcagagagccttccagtgccagccgttggacatttcaccatgtgagaagaggagccagcttgccattggttcttctgtctgcctttggaggggctcattcacacagctccatcctgccagcctttagtcaggccatgccttcagtgggttgcagagatcaggcctggagctacgtagaaagttttgtttcctagcaagcagaggctttgtgaagactttctgcctcacgaccgaccctttatagagtcatagcagcccttatgctccctggtaagacctagtaagcaggtcagtctcaatctcagctcctccactcccgggctcctggcctccaaactgggggcccagaaatgccaaagacctgtgtgggcctttcttgtctgctgcaggaaattgactttgcaccagtcttaaatagcagactggcatgctgagaagctgtggtactggtgttagcttcttagcctcttatatttgtttgggtctgtgggtactcacattgtggaaactggggtttatgagcagtagagcaggcattttcatgacttatgaggctgattcctctggcagttcttaagatggtaccctgtgaaggctggcggactccatttccccaactaggttgcactacttggaaaccttgtcttctaaacagcatgtatgctttggagtgactcaaccagtccttgttaatccccatcattgccaaaagcagctgaagtattggtttccctatgaatatagcaaggggggtgaactagatgatattacagcttcttctaactctgactttctgtgaatttaactctcccctcgagggacccatgaggctctgccttagcagcagttcctggcagtcccctactgccaaagacccagagcgtgggctatacctgcttactcccttctactggcctgaaagtgtctgaaaatcagagtcttgtattattcctgtttaaattcctgggcacttgtcctactccttggcatctgagagaattttatttaaatattaggttattgtatttccccgagcagaaactgcagataggagagaggggaagagggaggagacaggagacaggaacctgagaagctccgctgggtcttaggcaggtggacccttgtcctgagtccagaggccagggctttcttgagggacaaagggagttctcctagccaggaaagttgctggcgcacctggatgacagccccccgagagacacctgtgactgctcccacctgcagaaagaaggcaacaagtaattcactgagcaggcaggtacttggggataccctgagcaggactagtttctacacttaacttcttctaccatttagaggcagaaactaacattttgcaagrgctaggcatatgtggtggtaggtgatgaagaactgagcctgtttccaaggagcccagctcacggtgtccagttccgggctttgcacctagcccagtgtgttccrtctgttaagaaagtgtgatctgctgggattacagcaagaagggaagagaggatttagacagaatttakactcyctttgggaagacaaaaagggaaagtgtatcagccatatgtctgcctcagggcaygagccttgccctgtgggagctgggattgtgttactcagagaatttcasacttaaagaacttactctgaatgtgcatgaaawggaaaggtcaggtgattgagaatgagggcaagcacatgggaccagcagccatctagggatatagatcacctactatgtgcaaagccccaggctagcactgtgaggggccaccaactggatcagcaatctccaagccaagtttagtcatcatactggtgtcacccttgtggtgatgagagctccaaagactgccagcaaagccctgttttcttctttcaactgggcccttccgtctataggatctcatacttccagctcttagttctcagggaaaccctgactctaggttggagtcatcagctatgtctcttaatccttctgtgattccagcctccccactgtgtcccggcttcatcctgatgcaattcctggagcttgcctgtctgggctgacagggccctggggccttttgggccctgtctgcctcagaactgaacagctaatgctgctggtgacctgtgttctggggaccagggattctctgcagcactactgaaatttgggggtagataatactttgttgcagggtgtcctgtgcattgtaggttgttcagcagcatccctggcttctacctactagatgccagtagcacattccccaagttgtgacaaccagctatgtctccccaccttgccatagacatccccttgaggcgaaattgcagtgaagatctctgctgtgaatccagctctactttttacctaagttctcaaaaatgaaatgtaaatatgctttatcaaccccatcaccagcaacaggacaaggccaagccttctttttaaaagcagagttgaatggaaggcagtaatagcccaggggctaaggatactgatcctgggatcagattgccctgtttacagtcctggttgtgctgctgactaggagtaaacttaaagttgcctagcttctctgtacctcagtttcctcttttggaaaataggggtaaaaatcacaataatgatcctacctaattcagtttttataaagatcaaataatatatatatatactaatatatatatttatatatatactaatatatattttttatatatactaatatatatattttaatatatactaatatatatatttttatatatactaatatatatttttatatatctactaatatatatatttttatatatatatatatatatataaggtatttacctacctaatagtaaatatttttcaaattctagttgttgctattattacagggtatgtgggtaggctgatactgaagggccaggaatggaaggagaggtttctgtgagaaaactcaagatgatcaggcaagagatgcaactaaacccccaaacggagcacacatctataccccaagtaccaggaaagagcattaagatcactaagttgtcagggatggtgaggggggcagaggagaacagaggtgggtttcaaggtcaggttcaatgccagagaagtggaagtgagtggtgtcaaatccccatgagtgtggggtgctggtccttagcatcggtcatagcatttctcaatccaggcttcttacaagaatcacttgtggtgctttctttcaatgctgatatccagactccaaccagctgaagtatctcttttctaagctccccagccagggttaagaaccactgctctaggtaagcgcttcttaaacttaaataggcaaacaaagaacccctctgaggatcttgttaaaatctgatttagtacgtctgagatggggcccgtgagtccacatttctaacaagctcccaggtcataccaacgccgctagtccacggatcacactttgaatagcagggacttagaacaactattctcaaattctggttccccaaaccagcaggccaccagcatcagcttcacttgggaacttgttagaaacacaaactcttaggtttcacccagaactactggatcagaaactctgggggtggagtttagcgatctgaactgattgtgtctcggcaagagctacaggtgattctgatgccggctcaagtttagaaaccacagagcatcagcctgtacctgtggcttatttttgtggcccaggtgaagttcataggtaggactggtgcagccaaaaggctgagggtctgagtcgagagtagaggccctgcaataaggccaccacctcccccacacactacagccctctccatttctccactgacatgacttctgtctcgggctctgtggagactttggcctctctggttccttcttgctcctccctcctttcccagttcttcattcacaggctccatgtcctgccatcctcctagcaattggcatcacctctaccgagaagctcctactgtggggtcactcctggccccatcgccattggcccactctggacttctggttccttgaggacacccaatcatattgatacagtctttgcccctggtgggcctcctttgtgttcccatcatgccttgcagctaaggtcctactgatatcagttgccctctggggtgagtaacatgttgagcatctcctacagtgctttccttgtgtgtgataggaattcaataaatgttgaacaaatgaaagggagggtaaccctggaaaagcaattgaccaccctctcccacctgctttacgtgtagcaaggaaaagaggagctaaaggaagccccttctcctcacccttcgatcctcaggggccttgtagaaggaatcaggagaatagactctgagttaaaggaaaaatgcttttcccttaaagagttctcgttactgaaaaaagaagggtgaagaaaccgcatgtgggaggggtctgagcttattaaatttgcttccaattttcttaccacagtaattggattctgatttataggatgcktttggacagtgcctgaaacagagaactattagctgagcattagagcaagtgctgccaggagggcgggtgttggggtgagcagctcaggaatctgaagatgccgcatgatgtgggaggcagcaggtgggggaggagggggaggagggggaggagggggagggaggaggaaggctgtagaagtttcacccagcaggcagctgtgctgattgaatccccagatgcaccggcggtgtggaccccttacaagcaagccatgcagggcaccatgtgataaaagaagcccagagaggcctgggggcttaatttccgtatctggaatggaagcgagtagccatttttcttttggttcttcgcctgtgaagtccacggtattttacgagagacagtccagtctatgtggagtgtgagatggcagagggcaggagtagaagaagctaagacaggggcaggctttgagcctttctcaggatttccagggtccttggcagtgggcactgagtgatgctacatccagtatggctcaaaaggtaagttctacagcttcgcaggcatgccctactcattcatgcttgggcttagcaaccttcccatgcccacctcaccccttacatgcatttgatgtgatcttcactgttgagatggaaaccwmtgtcgtcagcctgtagacatgcatgtctctgctgcaaccttgtcctttcatccctagtctcargctaggtgacaaggcaagaacaaggtacccctgagtggctttcagcacatccctgctcytctcagcctcgtttgtcagctgtgaaataaaggtgttagactggctaacctcgaagcttcatcattcctcaagtctccacacaattatagatgaatgcattcttccatttatggtctcttcattccagatatatactcatacactggcccccactcacctcaatcgaacaaaacatggagcttgcctggggacatcctagctccaacttcccctcatgaggtcaacaattctgctcacacagaggagagacttcatttccaggtcactgcttaagtcctgtgagatcacaaagatgaataaaatggggctacatgtactgggggtgggaggtaggtgatgtgttttaaataacgaattcactgtaaggaasagacaacttccagctggggtgagtctgagatgattgtccagaggagttctgmtgttcatatgttaggttggtgcaaaagtaattgcgttttttgccattacctttagtggaaaaaaccacaattacattttaatacaatagagaactattagccacaattacatttcaatacataaagcattgaccggttcaacaagtagtcctcattttcgagtcatcccacttccatcccatcaccccattctggtgacaacagctggatttgccattatccaagtggtacataaaacatctggcagacaagcagccacaaatagagacacacccctccaggagggagggaatattttgataaagcatatgtatgttcttgctagcagcgcctattatggggttgctttgatttcagggagcagattcagggtggactgagctcgtgagccatgggctggaaactctagccggggaagcctcattgggtcacctctgcctggcctggctgggtctgtgtgttttcttccacatattctcccagcctttgtccagtgcggtgctaaatggctcagacagtggggcgcccatcacttgcctgtagggaaaattctacactttgatacatcccaccaggaagacatttttccttggctccttttcctcctgggaaatgaaggggcagtggcccagcctctcgtagcatttctccctccttctacttactcggttggaatggctgccaaagatcatcatcatttctctccttgtactcgtcacttagcagtaataggataaaaatctttacagctggaatggcaaagcataaaaaatgttcatattccctcagagtcaaggctattccactagctcagcacagcgttagtgattccacaccaaggctgaggggaggggagggggagcccatcacagatacttagcttttgcaaacaagctctccccgtctgtgacattctggtcccccatgtgccacttttcaatacaggatgtgagcctgttgatagtgggcctaagtgccttcactccagagcatctgagtttgatctctgrgttcactccagagcatctcctcctctgggggaggaagggaagagcaggaagagttgcaggacatcctggaagtggctctgtagcagaactgtgtccacagcccggggcagtttgcagtaccatcttgccagggtaagaggggaggaacggccacaggggctcctgccctgtctgttttctgtgtagttatttttgtcttggccacgtagcaaagcacaggagttagcaagggcctctgggtcaggattcctccccagtcttgatctcctgatttccttgaatcctgagcctgcaggcccctcctgtgttctttgagtgcctgtttttttgagtttcagggagatttcccgaaggggtaactcctcagacttcaaaaggggaccagtcaacaacactgatgagaattcatctaaactgccttagctaatttattttcttgcaccttgtttcctagtgaattcctgctaacgttgaccttgcattgtacatttcattcattcattcattcattcattcactcactcatttgctcattcctttactccacacatttattgagcaattgccatatgccaagtcctgtgttaggaactagtctccactcatggcctagtgggccctaggagctcatggcctagtgggagaaatggacatgagaccaattcctgatgctcaaatgtggattgcgctaaggccatacccttgctcttggaattaatacacgaatttcctgccctcagtgttcaggcacccagctcctgccctgtccctggtttgggtgtagttatttccatcttagccatgcagcacagcacaggagttaggagctgtcctgtgaaaaagacaaaatagcattaggctggcctgtgaaggagaaggaatttacacgtggctgggaggcagaggcttcttgaaggagatggcgtgggctgcagttagtgtgctggcgagtggggcacgtaggattttaccaggtagtaggcatttcaagttgagggaagagcataaggaaatatcaggagatagaagagccagtgttttataggagtaagcccaatttacttagggtgtagaatgatggaggggaggaatggaggagaatactctggaagataacttggggacatgttgtggcaaagtcttgaattcaggataaggagattagagtttattcagtaaaccctggaatgcttccatgttcacactgtcactgcctcattgtcacagcaacactgggacatgccctaaataacacattcctggccagcaccatggccagtaggaagaaagccaaagtgtgacagagaaaagagtaccaggcaggagtggtgcccctgccccaaggctggacaactgtcccaaacaaagtgcaggctgaacaggctgctggcccgggagctagagcctgatatgagaacttggcctgaaagcattttcatcctcagggtggggacattggatcttccactggggagttcgttctgaagtgaggcaggaacagtgagaagcaggagctagtcttaggggagaaggagctgatagggcctggaaaaggactctgtccttcatccccagactcactgctgggtttccagactgagcaccagtgtgggctgcacagacttgagcagaacagcaagactagcagattaactccacacctaggtcaggggacccgggctcagagaggttaggggacttgtccagggtcacacagctagtccatgcttggctgaaatgcaaaatcaatttttcagattgtgggtccatatattttattttattctgtcacaaacataaaacttcttattatgtctaaagttcactgagttagagaaagtgtgtgtgtgtgtgtgtttgacttgtgatttggggaaagagaagaggtgatagatgaggattctgggtttcctaattaagatggtttgattattatattttagctttgcccagaggtactaaaatactacatttcagccatataattcaataaatagtgtcatctggtgttctgccatctgggccaaatgcctgtgggcaggtaacccaagaagaaccttgtgtggcttcgaaaggtaccaagtggtctttgttctggggacagatttcccttctccctccctaagtttgcctcctacatttcacattacctggggaatgaggcaggggaaagagatgtggaaagagatgtagagacattttcaatgcccaggatggaaaactgatttggattaaatatttgccaggaataattcattcaacaaattattgagtctaagactattaagtatagatcagtaaaaacaacaacaacaacaaaaaaaacagactgaaagtgtgccctcatggaacttgaatgcccccagtgaataaatccctcaggtggacaagtgggagctaccttactaccctccccaggcccctagtacctccccaccttacagatcactttccacaggaggcatggtcccttaagctagccttgaaaataagccctggcccgtgaactcagggtttcagtaacaccaagggcagtgtggtatcagttctcttgcctctgaattatctgtctttaaaggacagaggaagaggggtgaagaagattccctggatttgcactctgcattccgggggtgctctcctcagtgttatggggaacacaggaggggtggagaagacaatactgttgagtttggctgcagcttttgtctatttcatgagctttccatgtcccagttcagtggcttttgaaatcttcttgcacaaccaaaatctgccgcaacaccagaaactctcttcatcttttctcaaggaaatcttttattgaaatataagatacatatggaaaagtacacacctcctgcaggtatatcttgaagaatttttccaaagagaacacacctatgttcctgcatcaagtacctacatcaagttaaagaatattctgtgtttgccagaagccacccttatgcccgtgccccatcagaattctccgtggctaccttgtcttcaaaagctgtagattgatgttgcttggttttgaactttatataaatgggattacacagtatgtactcatgtgtatctggcttccctcaaagttctgtgcatgaaactcagccacattttgcaagacacagtttgtttattctcattgctgtgtagtattcctttataagaatatattacaatttctatatctactcgactatcagtgctcatttggggtttttccagcttggcttttatgacgagagctcctatgattaagcttctacttgtcttttggtgaacaggcatatgtgtttctgtagggtgtacccctagaagcttytgtagatatcatcaaatatttaatgaagtacttacagcagagtccctgttgcaccaagtcctcattatcaatcacttgctattgtctgtctgtttcatttttgcctaccaggaggctgagtggtggtgtcttattgtggtttaaatttgcctctccctgctgcaatgaagtggcacacattttcctcagtttcttgaccgtttgcatacccgagcaagcgttttgccccttctctctgcatctgtctatgccttttgcccaagaaccaggcacagagggcctggctgtcagttcccccctcagtaacctgcctttcttctggatattttttgccattttgtccaacattgtgaggcagcatgataaagtaaggggaagaaataactggcctgagcctgcgaaagtgcatgccctttctaagatactgcccaacaatgccttcagctccctgggtgtctgtttcctcccacgtaacatgagagaagtaagccagagatgcttattaaggtcagttccagctctgtctgctggtttgaaaatacttctgccggtaaaagcatgcggaaactggcttaggtactaagtaagttggacgctatttccagaaacatgaagccctcctgctcggcagtggtgcccctccccctgccctggattactctttcccctcgcagacttcccttcctaacaggactccagggccctgcagagcatcagagccctttttattgccaccttgtccatttcttcatgcaggccttctccaccctctcatgccctccacgcagtgcaggtcaccagacctctcctagcctgaggtgcacatgtaggctgrtttgacatgtcttctcacttatctgaaagccccggacctattaaacacagcagcagcagagatgcttgctcctggagttggcacatcacgtagaaggcagtttgactgcaaacattggtgacctgcccacatttttcagtctagaataaggagctgaaacacacagatgtcttccctttaaaacctggatcactgtcaagttccattaccatttgcccccaagtgcttcaaagaaccactggctcttatgatataacacatgtgcctctactgccaggaagaaatagggctggtaggattggcttgaggaaatttcaaggaggctctgtgctgggacgaaggtcctgggataattcctacaggagaggatgaaccatgcagtaagcccttagagtaagactcttcatgccttgtatttctttagcccaggctggagtgaagtggcctaatctcgaaccacggtgcccccaggttcaagcggttctcctgcctcagcctcctgagtagcttggattttagatgcctgtcaccaagcccagctaatcttagtagagacggggttttgccatgttggccaggctggtcttgaactcctgacctcaggtgatccacctgccttggcctcccaaagtgctgggattacaggcgtgagccaccgcgctcggcccatgccttgtatttctataggacttcacgaagtgctttcccagctctttctcatgtcctcagtagccctttgggtgaagaggtcattgccatttcacagagaaggaagctgagacccaggcaacgtaactggttgactgagtggctgggctaggtctcctagccctgtgagctttgacatacaacatctctgtcacttactagctggaccatgggtgagttactcaaactcccagagaccccatttcttcatctgtaaaatgggaataataatggtcctcagggtgaggtgaaataattgatgtcaaatgccgagcctcatctttaacctctagtaagcacttggtgactgtttgctagctgtggccctgagtagtcaagttagtactggcatcaggagggcagctggggcctgctgcagtcacccaggcaagagggggcatcaggaccagcaacagttctggtttcatcatctttcctgctgctccgcagctgtgggccaaagcaggtctggaaggcagggcagacaggtaacagggccaggggtggagaaacgggtgacatggatgaatgtagagaggtccaggctctgcaccctgctctccagctctgagtcagggtgctgcggctcatgtgagtcacagtggagctgagaacaaggtgggctgggtgcagggcatgtgagcagggaagtccttagagagctctgggcctcggccttggctcctggctctgaacattccatttgcctgaatgtcagacttactttaaaaactggaaagcaaaatgagcgaggaggcgactgcagtgccacatctggtgaaatttgtgcttgaaagatactggggatggaagccaaggccagcagagggagtgatttagagccgggggccagcaactacaaaatgtgtttgacaagagatgaaaagagcgggagaggagatgacagctgggtgggggctgctrtgggagggagacctctgagccgagggtggcagacacaggatggagtgctgagggccacgtgaggccccaggtgactggcaaagtaagcaggcacaatgggatgtgatggaagcaggaatccgctggggactctgtggatcacwgagcagtgagggtcccactggcctagygaggggcaagatcagtaaatgtccttgagcttatctttgctgtccctgaggcaacaagaggaatccctgatctccatggaaactttattgtattatccaaactgctctcccctcctgactctcatgataaccgtggcctggccagagctggcgtggtggttgagtctcttctgcttccctgctcctccctgtctctcctccttgattcctcataaggtrgcatcatgtactccttgtcccacaccttcctgccctgcctctcaaggtagcaaacaccctctttgctcccgtctgcttcatctcaggccgggtgccaccacccttcagactttcacccaagccctgatctgtggcatcatcctgctctccccccactcccattttgttgtctcctctgagatatctcttgctccctgagatatcttgctgccaaactcagccgctgccccctctcgtctgggtgactgcggcaggccctagctgccctsctcattgactctggctttctaaatgcagaaggatcactcctcacctgaaactcttcacatgctgtgggcrcacagctcctgtcaccaccccarccctgaagtcaaggccgcccccatcaggccatggcctgtgccgactgtgctgtgaggattcaggcctcatcattgctgctttctctattcaggatgcccttttgtgttttgggagtctgggtggagggtgtcttcttcaggaagaccgcttgcccctcagacaatttggcagcccctccatcctctatgcttaccctgagcagcaccccttgctgtgcattgcagacatcagcttactgtctatcacccttccaagcccctgagcagctagcacaggaatgctgacttatctttgcatctcctgagcctagcacggtgcctggcactcacactgtccatcagtatcagctgagtgaataggggcccaaagcgcacctcgtgattccttctcaagctactgaaaatatcagggattgggagtgcaggtgccggtgagcgagtgaatcctcagaacagagggagaaaatcaaatcacaggaaatttaaaaccatcctcgctcaacagagaattatccacgttcacgcataaatccagcgccacaattggcaaacacgtattgatcataccatccccctgatgtgtgggaggcaccatatatatgttctctcggttcagcctcacaactttgctatgacccttgttttagagatgaagaaattgactccggtagcttgaataacttgtccacaggaatttaaagaagtagaaacgtggcccctgcctgcaagaaggcagtagttacctaggaagatggcacagtgatttagaaaggggaatagtcataccaggcggccatgtggagtgtggtggaggaagtgatttcagcgaaactgcacaacagtgacagtttgggcagctggaggagggaaggtaacagaatctagggaggtttgtggaggttgtgacacaggtacagtcaagggcagtgactgggctggtttagcagggccagaaggctcctgcaagggaatgtgggggcagggtgctgaagagctaacacgagggtggaggccttgagatgctggtgaaggtttaactgcaggtggctctgaaggtcgggagagggtcctacagtgagagcagtgtgttaggaagatggaagagagaacggctgtggagagggtgggaggagtggttggaagtgactcttctgcaggcgggaagaatagttaggaagctgttgcaggagggcaaaccaggggtgtagatcaggcttggtgatataaaaaagaggcagatttgagtgcagtattggctcaggggtggattgactgtacgaaggtgcaggaaggtatgggaagcctttgctttttccctccctgcttcagaccagaatggcgcacggatgtgagtcccctggggaagaggcataggacccttgaccctcaaacagaccattcctgagctcagggtgctgagtctagcacattcctggagttccttggctgcaggccttacttttgctccttatagctgttgcaattggaggaactttcccctttcaggtgaaaggagggaatgatgcttctctgatcctttaggtggaaagtctgaaaaatatcatgaaatagctctaggagtatcaaggggagatactatgctttagcaagtgagggatgacccacacccatgattttccatctttccagaatcttccagcatgcagcgttcaagataaaagacagagagaagggctgggtatggtggctcacgcctgtaaccccagcactttgggaggacctggtgggcggatcacctgaggtcaggagttcgagaccagcctggccaacatggtgaaaccctgtctctactaaaaatacaaaaaattggctgggcatactggcgcatgcctgtagtcccaactactctggaggctgaggcatgagaattgcttgaacgccggaggcagaggttgcagtgagccaagatggtgccactacactccagcctgggtgacagagtgagaccctgtctcaaaaaaaaaaaaaaagacagaaaagccaatatggaataaaggtttcagaggcagtgagtgtggataatcttcaaagggcattctcgtggagctcgtgagggcaccgactggtaggggggaaccagaccatctgggtttatgttgaggccccaccactcactcattgtgacttkccctctccaccaccatgagaagaggaattgcagcacccacctcggggagttactgtgcaggctgaaagctctgggaagaatacctgagacagagtgaggattcaattgtgtcatctattattactgttgtatgatgtgatttgagcagggctaaaataagacatgaaggagctctggtcccagacaccaaggtatcttttttaggaaacatttcaaaaataagtcttggcccaactccacactttctgtcccagctaggctctgcatttgccttttgagaagattcttttttgcacacacacacacacacrcatacacacacgcacacgcacatgcacacacagctgccrtctgggtggtgcttggtaccggctaacacaggtcctkccagtgtccctagagaaacctctttgcagcctccatagatctgctgatcttcctgaagagcagaagctgccacttcccccagggtttccaccaaacctcagtgttccactcacttggaaggggctaggcaatgtaaaagatcaagattagttgtttagaaaaacagaaggatcctggtgcattggagtaatggccatttctaggaggtctttaaatgcagccagaggagtctacgttctttaagtcatgtggtccttctgagcccagattgcacgagtcagtacaggcagcagaactgcctgaggaggtagattggggccagagattgaaaaaccctgtcaacttgctatcctgagcagcactgagagctgagatggatctgctggttccagaacaaagagtgggagatgtctggccttctgtgttcagtaattatgttttttgctgagagtagtcaaaggcttgtcataattcagtggaacaaacccttgaacagttctttcagatgccagttggtaaatgaatgcaggtatgatccatggaattggggaagagaggagacaggagggagattttctaaattttacaatttcaagctaaattttacaatttaaagagttgttaattattctgagattgtggccttttctggtgtttaaatactctttctttttgaaatgatgatgatggtaaatgatgggattttaaaaatacatactttctcacaaagtaaaatgtcacgaacttaattactgtctctataatgtttttattttattttactcataccagaaaaccaagacctagaaaccattatccagcagtaacattgaaattttaatttgtattatataccaattaaagttcagggacaacttaggacaatgatttccaatagaaatagatgtgagctgcatattatttaaaattttccagtagtcacattaaaaaaggtaaaagaagtgaaattaattttagtaatagatttgatttactccaatgtatccagatactaacattttgacatgtgatcaattttaaaaaagataagtaaaatagttcacctttgtttcatactaagtgcttgacatcttgggcatattttacatttacagcatatctccattcagagcagacacatttacagtgctcagtaactgcatgtggctcatggctgccctactgcataatgcatgtctaggagaagagggtgtctgggcctcagtctgtcgaaggcttcagtctttcccctcttgcttcatcatcgacatttttcatcattcttggaactttggtaaacaagaacatcccagccttttaaacacagttgagtatttccagcataacagacaaaacttaagacctctccacggacaccagatgccacctgatattccccaggacacccttagcccaaggcttcttatcgccagccccctccccaactcatggctccatacttcagcttccagattcttcttcagtttgggcaatttctttggtctctctttgctgtatcactgaccttggcctttgctcagcttttactgctctggagctccctgtgagggtgtcacccatagcttggcaaaggacattttcctctccagctttgaccccaagtaagcctcacctgcctcccaccttcacttatccctccactcattcttcagacatttatcgtatgtctagtatgtttagtcatcatcctgggtattgaggttacaactacaaataagtccttgccttcactgcagcaacagtcggtagaggagacagaaaagtaatttcacagtgcttggtaataaattacagcaatggggtgaacacagggtcctaaagaggcacgttggaaaagccttgggagactgaaatgcttcccaggggaagtaacttccaagccaagattagaagaggaaaaaatagcctggcgttggaagcgaggagagtgcatttcagatatatgggagagagacagcacttgcaaagttccagaggggacaaagagcaggtgaagcagaatgtggctagaactttgagagtgcagagggcaggagtcagaagtggtgccaggccactaaggatggtgagccatgattaagagtctcagtttgattttgtgagcagttgagcagcattgaaagaggttaaagacgcagttctggaaagatcattctagctgcagcatgcagggtagattgaaaagggatacagccagagaggaagttgctgcagtaatctagaaaagacagaatggaagtggagagaaacagccagatggagagataaagaagacaaatgcacaagactacatttaatcacattgggtctggggcagaaagaggcaggattagagaatatctcttggttttggcacatagtgcatagtgagctggggaactcaggagggtcagcaggcttggctgaggtgtgggaagcagagggtggatgacaaggtcatctcatggggtcattcaagagaagatgctcatcagggttagtgttagaggttaaaggaggtaggcactgggaactctttgaaagctgcccaccagagcacccgaccaagttcctaagcagttcacttctctattctgacccacttattccctttctagaccactggaattaataatatgttcagcacttcaaaggtggtgatataatggaatagcgaatctcactgttatgttaagggtcttttctgagacacaggatttctgtaaccaaagtgagggtggctattgaggcaagaataagagcagtatatgtttatgtgaatgaacgaattaatctgcatgtgaaatcccagcaaaattgacatgaagcaaaaatttcattccttacagtgtatcartgttgcccatgaaatgagattaaaaggaatttttgattttatagttgtcatacttttcatactgcttgcatttttctcttctaaagggttcagtttgaaccaaggggccagccacagattcggcattttatatttttcctcatagctgagagcaggcttccttacatagatctgagctgtggaggtgttagatgttctcagatctaaaaatgaaatctgtgattctaaaagccagtagcaagatcactgccctgagtgctgagataactgacgttctggaaaggtcattggccaagagcttttctcckctcattctttcttcctcacacacattggctctgagttggggctggtggtgaggaaaggaagggatgaggcattgtctacaaagccatctgtgctagcactggtgatggagtgatggagggatgtggaggagggaaagatgtgcctacgccacctgyacctgggatccatagattgtcacctccatggggacagagagctctctcccaggaagttggtcccattcccactttatgttttatgtttgtgtttctctttgcctttctggccctggaaattagggaaaatggaacatgatgaaaatgacccattcattttctctttgtggstctgrcctctgcaatgtgtgctggaagtgcaggacttggaaggaaatcctaatttctatttaggtcaacatagctttttgtttagtaatagatgtgcatgaatcacctcacccagggccttgctgaggtcacatcttcgcccacctgatcagactccagtggaagcccctgtttaggatgtacccgtggcagcccaccagcggtttcccatcttcctgttaccacccaggagcagcagccagtccctccctcctggacaggtcgctgtacctgctggtttccagagctcagtagaaaccgcctcttcgggtggtcattcaagagtgggcatgtgagtatacacagtgtacaaggccacagaatagacctgagtcacaattggaacagtcctggttcagaggtattacaacatgtgacgaggacgctggagtccakcaggcctggttcaaattccctttgctagttggagtgagttcctcagcctttctgtgcctcagtttcctcattagtgaatctgtaaaccagtagcagcctcataggattactgtgagcagtaaatatgtgaggtgctctgcgtggtgcctgctgagaaaggttcaatgagcagtagtttaacagctttccaggaggtggataccgtcatcactgtaaaccgggagctccaagcagcgaaggttcagtcccagtgtgtcccacgccacgccaggcctgtttgatttccatttcattgtgctgtgtagttgcctgaccttttcccattctctaactgtcttcagactcccgtctgggatgccagagcccacctttaagattcggagccattgtcaattccagagaagccagagcggcttctctttgacactgacatttcagtaataataattacgctctcctctccacttcagagttagtgggtatgcctctccatcactccctcctggtttcatgctggagaataaaatcctgaatgtttctaatttatgaccaagtcttttctcccatgaaggcagcatgccgcaggaggaagatcatgtatctgggtgtccgagggcctgggtcctggccccggcagacaagccacggaagcactgggagccctgactgctcattgatgaaatgggggtgacagtgatcatcatcacgctctccgttataggctgctgccaggatgtaatgagctcgtggggtaaaataaaaggcatcgcacgcatcatgacatgactgccatgactgacagcaaccatcactgagcatgtttctgacatgccaagttgtcacatattcaggtgcagggtggggggtgttgtgggggtgagcaggaggcagtgactgtgcagaggaaagaggggccactcctccccagaccctggggttagcatctcagagcactttcctggaagcattttcggacagtaagtggcactgaatgctccagagcctggcagtgcaggaagcccttggagccccagttcaagttggggaaaattgagagtcttcactgagtcattcattaaaaatggaagagaaagaaacagcatgtcagcgatcagcttagaaaagcatgccttcctcatgagctgctgtggccatcacgtatagagatcccgggattctgtttccccaggaggtgaggctgagaccagagtctcctcctggctcatggagactcttcggtgtcccccacaccccgcccccaatctttcccgctcactggctcttcttccagtaaaacactgcatctttaataaattatcaacgtacttgctcgtctgtctgctggcgccagagctcagtgttggcagggttttccattccctcgtgcccctaatagatctcactgtttgattgatcttttagatctctcccacagaaaccctactgtctgggccgactctcctcaccatgtccagctttctggatttttttctcagactctcaaccttgttgctgcctatccccatgctcatcccttggtccttggaccacagatgactcgtgtgtagggctccaaggcaggtgccttgaaccccggtgagttcacagggagactgtagggacgagcaccagattaggagtcacaggatgtggatttccctcaccccagttactcagcaggtgtgccaccttgagcgagattctgagccttagttcagctcatctgtggagtgggggcggttgtgagggtcacctgagacaaggggtgagtccaggctcctgagctgtgagcaggggcaggaggagagtcctgtgaagctttttgagcctgtgaggtgggggatggcaccccactacctgccctccctgggcctgtgctggaggagctcatagggtacagccctgttctttactctgcagggacagaggctgggggtctcagagaccaggaggacaatggctcagtaagccattactgacacacacctggtgtgtcagtaaggtgggcccagtttaggaggtttaactgcgtcgtctccatggtcctttccttttctaaaccatgagcttgtgattctagtcgatgagctgaacctggcgtgcgggccggctcacccactctctgggcgtgatgatagcaattctagcttccatttcctcagcaccctttaaacaccacgtgcttacgtgcatcatctgcagtcttcacaacaaaaatgtgtatttatcctcattttacagggaacagtcttgaagctcagagagggtaaatgatgtgtccaagggcacacagctggttctcgacatgtccagactcaaatgcaggcatcagagcccaggttcttttcactcacattgacgctgcatcctttgatctctgctcctcctcttgcctctcaatgccccttacctgcttgtgggacaggacagaaccccccagcaaagatgcctttccagcccctgtgagatctggttccacccagcaggcagagtcgtctgcagatttgggccgatgctaaaaataataatagttactatttgtcaagcatctaacgtggcactatgtaatcacctaacatagtaatagtctaagggagaaaatcttccagaattgttatctccattttccagatgaagaaactgaggcttgggaaagtaatgtcggatgcccattgacaactgagcctcagttacaaaatggcatttgtgacattcctaaccatgcgtattgaatgttagctatggtcagagcttctgaaagctgatgctgtgagagcatttagcaggagagccttgggcccattccgtgttacagaggagcagatggaaagctggagaggtgggtgattggctcacgtacccacagctggtcagtggtatcctgatcccccaagccaggattctgggaactgcctcacgtggtctgtaggtctagttctgtgcccatgactggaattctgtgccccatttctgtctgtccctccctactttacccccatgagatccagcagctcctcctccacgaagccatctttgccactccaggcagagttatgcctctgcgtaactgcgtgtgtgcatgcatctgtgtcactgtggtcaatatacctgcctcctcagctagtcctccaaggcaggacaaatggcccctgtccccaaaagctctcaaaggagataactctcagtaccacctccctccccaacttgcccctgagtaacttgtaccacaaaagctggggtgtgtggtccccctgcctcccagcatgtggaataggaagcatccccaaggcagtgccttcgtcctaaccccatgagggatttcagagcatctttccccatagcagggaccacagcagccaggagcagcttcaggcctggccattggacacacccggtcctggtggtggcaggctgctgagtcactctgcttgggctctttttcctctgctgtctcttatggagagaccaggaggctctgctgagctctgtgacttgttgcctcctgttagagagacagatgctggccctcctccctgacatccacttgttcctcttggggctgaccatgctggctccttcccctctgcctgggcctctccaagcccctccatgctctcacagacctgccacctgccagctaacactccctccaggtctccctcaaccctggttccacctcaactacctacgagcaatgccctccctctcctctgctcctaagtgagtcaggtctgtgtccaaagataagcaaggccaaggtctcttctcactgggagctgtttcaaggcattctccttccctttttctactgcttatctaatgtacaacaaatcactcctgattaaactttgtggtgtaaaacaacaagaatcatcgattatcttcacagtgtctgtgggtcaggaattcagagcatcttggctgggtggttctggcttggagtctcattgaactgcagttggaagtctgttgtagccactgtcatctgaaggcttgactggagcttcagacccacttccaaggtgactcattcatgtggctggcaagttggtgccagccttcagcaggtggccacagttcctctccacctggacatctctccgtagacagggctgctcgagtgtccccacagcatggcagctggcttccctccaagtggccaaggcagagcctgcaatgtttttgtgatttaaccttgggagacacacaccgtcacttctaccatattctatgggtcatatgagctgccctgcttcagtgagggaggggctacacaaggacataaaacccagttagtgaagatcagtggcagccatcggcggctggctgtcacaccttagaaagctagaagaggctgtcttcagctgacctaggaacgcacttcctgacttactttctccctttctctatcaatggacaactggtatacttaaaccctgttctagtgatgtaaagatggacaagggcatgggccttccctggaggaactcacagtcaagttgaggagagtctcatcacgagaactgcgagaaaagagttatgtacagaatgatggcaacacaaaggacaggtccttacctatttgggggagtatggaacaccttcacagcagaggggacatttgctctgggtcttgaaggttgaataagagtcctcaggtagaggaaggagaaaggacgttgctccatgcagaggtaatagcatgagcaatggtggagagtcatggcagcatacaagactgattttgaagggtgtagaaggctgtgatagggagtttggacttcatacatcaggaactgctggagggattcaaaccagaggaagctttggcagagctatgtggtggacaggacatgactggcaggggcagagactgaaggcagaaagatgggtcaggaagctgctgcagtgctcccctgagaaaaaaggactgtctgagaggccatgggcatgagaggaggggtgaattcaggaggtggggcaaaaggacatggtgagaaattgtttctggcagagaggacaggcttgaaggacaagacttaccttttccaccatctctgctcctggggccttccttccctaacttttggctcctcctggatgacccacgcccagcccatgcttgagtcctgatcagagctgcctggctttttctaaataagttctctggaccgacaccatgagccttcagcctatgcccctatagaaaaaactgatcagagttatctgagaggccaacatgacaccagggccattagcctaggactaaggatcttaaatgctttaggccacagactttcttgagactagtgaaaactatgaactatctttccaggggaaaagaaatgcacatttatacacacagtttgcaaacaatttcagagggctcacgtgtcccttgaagtccatccctgggtctctgaaccctatattaaaagccccaggcctaggaaaaaaatagataatgaaaaaagcaaatatttgactccctaaagtctgttatttacttcatcttttaatatcccccagctccccgcaataattgaacatcccccgaaatagcaagaaacaggaggaagcatttacccagtgatagcccctggtgccaccagcctcacttggcgggtttattttcattattatagtaattttcaagctgcaggctacaattttcacttgcagcgaggtattaaattgaaattaccccagatgtaattgtcataggaaataatcctggatacatggaagtgaatgccttttcaagatggggttttatcacttataccagggtttggggctctgcctcttttacatgccacatttaggtgtgtgttgcaggggctgggcgtcagcacaacatggtagcctgaagctgttagcccagaacacagtgaagcctctgccgactggaatctacccactggccagtggtgtgggcagatgggctgaaagggtagagagtgggaagcagagcccgacttggggttgtgttcatgcagctaccaggagccactgtgcactggctcaggcatgcaagaaataccacanttattttcagtatatcaactcaattcgtctccaagccnaggttcccccaaggtggtagaaaattcagatttagtcattcttggagctccccagnccctcttagggccaggtgaagccgtggggtcttacctagtnctctgcagctggggaagcccttctagatatcaagcatctggcatagggatgcccacccagatgccctnggttctagccctccagatatgctttgtccctgaaggtctcacttgccctgtgcctttccttccccagatgcacactgctggtgtattgcacrgaccttccacccactagcatcatcatcaccttccacaacgaggcccgctccacgctgctcaggaccatccgcaggtgaggcatccttgcttgtctgttggccagctctgggccagcacttggtgacagtgtgtctgctccccaggtgcccagcgctgtactaggagcaccagacacatctaactacrtgccaggcactattctatatgtcacatgtgtccactcagtcactcctcacattcctgtaagggaggctattatcccattttatagaaagacagaggcctgtggtgttaggtaacgtgcagaaggtcaaagagaataagtagaagaagcagcctcagagccctcggcctccccactctgccaggctgcctctagagcatgggttctgacttccacaaatgaggaaggggctgaggccctgaaaggctgagtgcacaccccagccccagcatcaggctggggtcagcacccagcaccctgattctctgccctcccacacacttgccaggggccatgcaaatcagaacggcctgcagcaatcactaaggcttgccttcctgaccatctacctgcagttccatccccgttcccctgggcttcagtccactcatcctctgggtcgtgttcttgctctaataggtgtatcctgctatggatggcctctggcctgcgtgggtttttgatgtgcccaagtcccagtgccagtccctagcagaactcccctcagaacatagacctgcacccagaaggcttacccaggatttcctcccccagattctccaaagactctggctgtttcaccccccttcccccatgcccgccctcccctccagaagtcatctgtcctcttctccctccctcaggccaccagcagtatctacctctcagatggcaatgacagcagccgccctcactccagctcctctgcgcacatattctgtgcacctcagctgcagaggtgaggaggccactgccacrcccacttcacagctgaggaaactgacattggagatactaaatcaaggtccagtgtcgcctagccagtgatagtgaggcaggattccaggccttgcactctgatctcagagtcctccttcttgtcagcctgagtagggagaggctagtcccagtggtggtgttcagcatccttcggggccaggaatgccacagccacgtcccgcagctgagcaagaacccccagtacctccatgtccccatgaaacgcggctcattagacccttcctgtcctgctgagcagcacatcagctggtgccgatgccacagagaaaaaaatatgatgaaacatgggtcagagagcacacgaaacacagcaaaatctcattgtttccatcatgcaggctacacttttcctgtctctcccgccgccgcatggctgtgggcagtgggaagttccaggtgatgggaggtaagtcctgcagtagggtcaccctgagggaaggcaccaaatcttcagctccacctgtcatgaatgatgaatgtccactgtatacagtcaccacatcccttagagacatagggagggacctgcccagacacacagtttttagcccagtgcttccacccatccaaggggacagccctgtctgctgtttagacatccttggcaatgtcaggctggcttcttcctccagccacgtgcccatcctggcttctgtaatcaccccaagagccacctgattcaaatttgatttcccaaccaggcaatagctcttgacaagaaaatgtgccaagtcactgtcaggtgtcaccgggagtctcggggtagattaacgataacaaagcgcctggctggttaagtgtggggacaacagggatggaggaggcccaattctcctgggtctcctgtggtgaggggaggagcgtctggggcatccaggctgagaggacacacagggaggtggaggtggctggttctgaagtgccagaccacagccctgccgttgtgatgtgctggggcaccagggggggttcatggagcagaccaactgcaacctctgccttccccaccgccatggtggctgctccaccggtcatgactgggcatgcctgccagatgtttccatgagaacagcgttagcacctgagagaggcccctcgctttccaggctggcctctccctgcccatcctgcaagaagctctctgatgctgggtgcctccatcccctgacaccatcacacacatgcaccccatcaggggcttcctctgggcccttctctacatatcactactccagtacttgctgcattttttcagcatgtaaccttcagtgagctcctttagggcaaggacttatcttatccatctcttaacctcccaatggctcagtatcctaaccaaggaaatgagaatactaatcgtacttagtgcatagggttgctaagggttaattcggctaaaggactgagaacagtgcctggcatggaataaatgcttgatcaaagaaaggaggctatgggatacttaaaagggtaccacacttggagtcagaagacctggagtcaaatccaaaccctaccacttcctagctgtgtgaccctggggcatgttattaactacatctgtagaaaatgatgataaaaatatctttcatgtttctaattctatcacatttctacaataaacgttcctctggggaatgtctcagacatttgggggcattacagtgtatgtaatatgggggcttctaggccccccaggcctccctaacagtgtttatgtcctcgagggtaccttarctgctgtgctcagactctaagacatgtttctcctcttcctgccgctcctccacctctatgtggtattaatgatacttaataagattaccgtgttaaatgtatcctgagctttgtggcctgcagaacacattccttctctcactccagttggagcctcatcctgagcctgtggggcaggtggtgcacttgttgagagcagaggcatcaggcgtcagctttcctgggtttcctggaggtacagcgcggctcctctgtctgcctgcctgttggagggctgccctgaggccctggaaccctgcactctgggagggttcttggcgcccatcagccctgtacttttcagaagacacccatgacgtgccagacgacttagctgagagagcctgtttcctgcctcctaggaacttcagatgtcagccagccccgagctcagacccaagtatgacacacacaaacagcaaaatggagacctgagaggcatgtgtagacaaccaggagcttatatcaaaagcaggcagggcagaaatgaatgttaggggtggaggcaggaaagattacttctagaaacttccatgccttaagattctatacctccctttcactctctatcctgttgcacaaatgaatcactagccactgagaggggactgactgaaggacatgtcctgtctcagaggtcttcaataaagggatcttctctaaagtacctttcattgttaactttctggaattctggacaggctttgttgtcaggctctttgcaacccccctgcccagaccctctggccccctaagctctggagttagctggggactagacaggctcacgtggggaactcagagccaggtagaggctcaatcgggcacacagatgatggggtgggtgtagagaagcatgaccttgatgaattaggggacattctcacttagagagaaaacaagccctgaagagtggtttatcttgactcctgatgcagtgagtctgcatgtttatgggagacccagcgctgtcaccttccttttggggcatccttcaccgccacccctcccatgggggctctgaggcatgggcaatggatccctttatgtgttgagtcttctcactgttgcttttttataatatcccagatctaggggagccatttctcagagtaaggtggttaagaatttggactctggggccagattttcatggctctgcccttaacaggtgtgtgatcacaagcaagcaagttagcctttctgcctcagtttccttttctgcaaaacagagactgctaataataactacctgacatcattgtggagaagacaaagtaatttcagatagggaaaggacttggagcagtgcctggcatatggtgagcctgagcggtgacaacaggtgtatattgtgagcctccagccctggcagacagcagagttctaatgcaggggctctcaaacttgagcaggcttcagaagctcccggagggcttattaaaacacagtttcttgggccccatctgtagaaagtctaacccaggctgggcacaggggctcatgtctgtaatcccaacattttgggaggccaaggtgtgcagatcacctgatgtcaggagatcaagaccagcctggctaacatggtgaaaccccgtctctactaaaaaaaacaaaaaaaccaaaaaattagctgggcatggtggcaggcgcctgtaatcccagctacttgggaggctgagtcaggagaatcacttgaacctgggaggcggaggttgtagtgagccgagattgtgccattgcactccagtcttggcaacaacagtgaaactccatctcaaaaaaaaaaaaaagaaagtctaacccagtaagcctagagtggggcccaagaatttgcatttctaacaagtatctaggtgacrgtgatgctgctggctccaggatcccacttgggaaagttatgcatattgctattattagcttcaatattattaatatcaataccaccattcagagagcagctgctgtgtgccaggcatggtgagctcctttcacacagctgaggaaattatagtgctgaaggttcagtacttactgaagctctcccagctagtgaatggtggatacaaagaaacagtacttgaacccaagttagtctcactccagaatgactaaactcaactgtcagccggccttgggtcttcattctactggtatttatggagcgtttgataaaacctgcctgcatagagcaccgtggagttcacaaagcaatttcaaatacatttccttatttcacaggcacaaaagcctgtgaagtaggtcaagtattaatatcgcctgcttttacaaggaaaatgtaattacaggaggaaatgaaggctgggagcgaaccaacatctatctggttcaggattgcacagttagtgggtggtgcagcccacctggcctctgagcctacactgcccacgctgccctgcggcctctgggggctccttgagggccaatagttagggtgcagcaggtgtagaagccacctgtgtacctgccctctggcagagagatgagctgcatatagaagactctgttctagaacaatcccaggcagagtgaggagagcatttattcccatgctgaggcaaaggaagggtgtggggaaggcagctggagtgggggtgaggctgagaagagctatcctctgctgggcctggacgaatggatttgctttgctgtagaggcagtggtgagagcaagggagggagacctgagcaaccattccctcccagggtggagggaatgagagtgggtgtgcaygagggagggccctggaggaccacctaggccaggctaggtcccttggactggacttgaccttctcctctgaccacccagagcacgtgcccacctcaggccctcccagctgcaggccatgtttaaggggactccgccatcgctccaattgttctgattagagaagcaaaaacaagccaggtgttaccacgaaatggtctaattagcactcactgctgactatttcttttttttttcttttctgttttaaaccctggacattttttattcactaatcatctctcagttcaaccagtgcagagccgcacgcgatttaccttttgatgttcgcagaagagaactcttgaatttcaaagagctggcagggatttagcagaattgaatgcagaagctacagccgtaatcaaacctcattaggggttattcttccagcaggttttccgctgtctcctgcttccctccctgattagagggctggttgttgtttgtatgtgttttctttgggacgatcatggtgaacagtcccattccaccatcctctggcagaggctgcagccttctttcccctccctgaccatgagctcccgaagacagagacagtgagctcacgactttgtgttggggttcctctctccatctgatactagttgccatggtgagaatcaaggcttcataaatatggtagctccaggctaagttctcttccagtagagtctgcatcctgcatagaaggggtagtgctctccagtcagggctcagaagggtcctcctgggaggagggctgcatacagcgcctccacctgcacccattctgaaccccctctccaacatcacagggaatcccgtgatagctggtgtggcccagccatgtttctgagtagtcacgtggtttggggtgttcaggagaagcaggatccagtcatctcagtcagacctaagacacagagttaaccttgcccctggatagagatccacagcacaggaggggtaagtgagtcagttagattcaaaaatcattaatgatgcaccaaattaagtgataataaaaaattgcaaccatttgttatcataaagtgccaaatatcatgttaaatgctttttatacactttctcctttaatttgctcaactgcactgtgaaataagtactcctattatccctgttttctagatgggattctttgctgcacagagcagtaaagtaacttgcccgagattacacagcttgtagtaagtagctgctataccacaagcttctggagggtagaatcatcatatgcccagtgctgagcacatagtaggtgttcagtaaatatccctcgagggaatagttatggaccaaggctctgtgctagactctggcaataaagagagcaatgggtcaagggtcttgccctgggatatttccctccagaggggaccacaggcgggtgaggtacaaaaccaaacttcagggctgggaagtgagaaaagtcataggatcagatacaaactactaggagatcccagaggaggaagcaattaattctcacgtagtggcttggaaagctgttagggaggaagtgacattcaaactggtccttgtgggcagcacaggggcatttcaagcagcggcagcagcaggagagaggctcttagttatgaatgagcaggacagcttcagacagcggcactgggcatgggaggtggggaaatgtgggccagcttctgatggcaaaggccttaggaatgtgctgaggatttgggatgtcaatagtgaggagcccctggggggctgtcagtttatttatttgcattggcgaggagagtcacacaatcaaagctccttgtcagaaagttcgctctggagaccacgagcaagatggcctgggagaggctggggcaagttgaggctataaactagacagaagaggttaaatcaggggagagatataagaagtgaaagtgatttgagtgacattttccagtcaaaccagccagtctttactgatttgctgtggggtttcagggagtaggagggttgccgaggttaactcctgggcttctgtctgggtggctttgcgggtggtggaggtattcactaagatggtgaaggcagaattacattcctcctggctcacagataagcaatatgactggacaagcccgttggtgctctgatttttcattccttaaatgcaatggtatctatttaaaactcgggttagtacatatattttgccactagaagttccagtgatttttttctgtttccatcttgcagtgtattaaaccgcacccctacgcatctgatccgggaaatcatattagtggatgacttcagcaatgaccgtaagtcatgttgctcacttgctctttagacacgaatgtctgttcccagccactctgtaacaggcagaggtgagtccactggttttctgggaatggggaaaagcccaggtttgtaatagktacrgaagtctttgagcgtccgtggctaggctcagaaggagagaagctttatatccaaaaaacaatttctcgggttctctgcaataatctgcagtctgagctaaggccctcttcctatcatttcctgggaggtctaggtgggccctgtctttgggacctncccaaccccgtgggacatcctgtcacctggccatgacacagtgagggytgccttccaacctttccgcattcttttcttgctcatttcctaccttgtgtcctccagttatcctatcaaagaacctgagtctcatccaaattcacagcaaatccactctctccaagaaaaacatgtgtgtcttaccagacactgtgcatcaaatttgaaatgtacagtaatagttgaagcattgtcagaagtaatgtactggtagtgccgacacctcacctgaaggccgtcctcccaggagcctgggtacagttctgtgcagtcaatcataaccaagcagaacaccctcttcctggtgacgaactgagggaaatggaatgaccactgtggacagctccaggtcctatcagagtggagtccacccccactagttctgaggctggaagctgggcattgggagccacccccacactgcggtctgctgtacgaaggctggaaacccctacccattggtgctgcctcagaacctctgggggtgatgcagaagtgggctgtacatgaggcctagagtaatgagatcaagactctgagttctggaacgtgaggatcggctctcccttccccagtgaggargagcttggaggtgggcagacactggccctgctgaggggtagcctggcactgaagcaagagaagagagtgctgctggattcacttgcaagcagaatagcagtggttaaaacatggactctggagccagactgcctaggttcaaatcctagacctgtaaatcactcactagctatgtgccttgggcaaataatcaacctggtgcatgtcagtttccttgttataaaacagagatggtatatatggtttatataaggattaaacatgttaacacatttgaagtgcttagaacagtacctagcccagaagcctgtgtaagtcttttctgttattctttaaagttcagagccaagcagggaggccaaggtcaataaactaataaagcaaaaccacaatggtggagccaagatatggagttcagagccagggagctggtgaaccaaaggagtgaggagcagcaggcaagccagggagtaacagggacaaatgcttaggatggggtttcctgtatggtggagaagtgaaccagctctgtgtaatgggaggcatgctgagtgggacccttccaaaagcaggtctgtgagctgaaaggaaagtctaaaatctcatttattcttggccttccagcagtttttaccagacctactaaattgaccagtgctttgaatggcctataagaaaagagaaatggggaacgggcacagaggctcatgcctgtaattctagcactttgggaggctgaggcgggaggatcatctgaggtcaggagttcgagaccagcctggttaacatggtgaaaccttgtctttactacaaatacataaattagccaggcattgtggtgcatgcctgtggtcccagctatctgggaggctgaggcaggagaatcacttgaacccaggaggtggaagttgtagtgagcagagattgcgccactgaactccaacctgggcgacagcgagattccgtctcaaaaacaaacaaaagagaaatgagattgtttgtattaataacaaggataaatgcttgaggggatggatactccattctccatgatgtgattattacacaytgcatgcctggatcaaaacatttcctgtgccccataaatatatatatctactatgtgtccataagaattaaagattaaaaatttaaattaaaaattgtttaaagagaaaaataacaaaaaagaaaagagaaatgtccccaggtgactaggccaagattttccacctggaacattttcaagcaagtatacaggtgccattgtgtactgacctgttccaaagtggcccagttgaggcctctttgccctagactggccaccttgtatgacagcagtgatctgtcagcctctcatagcctggaaacaccctggagtcaggactgcactctgcagttaggggacagtggacagggctgcctcacctacccttcaggttcacctgcagtgcacacaattgtaacacgtaggtccatccctgggcgctcaattggcttaaccttttgtctttgcagctgatgactgtaaacagctcatcaarttgcccaaggtgaaatgcttgcgcaataatgaacggcaaggtaggtctgagctgttgtgcgggagcctccagtgtgagtgtcggggggtcgaaggtgtgatggtgtgtgtgtgttggggtgatcagtggggaatgctgggtggcttctccctggtctcgctggacaatggagtgacagtggcacccacttcgtcatttgttcctgactgcaggtctggtccggtcccggattcggggcgctgacatcgcccagggcaccactctgactttcctcgacagccactgtgaggtgaacagggactggctccagcctctgttgcacagggtcaaagaggtgagtgaggctgaggagcagggccgggcctcgtgccccagctttctccaggctctctctcaagctcattacttcacatgtgcaacccccagttcttctgggaggtgggcagaacagatcgcagtcccgattttattgaygaaggaactaaggtagagcagcctgtgtgaggtcacatggcagtcagtggtggagcaaggaccgggatgtgttgtgactgggactgtcacccatagcaggcctgcacttgggacagctgggwtataacatatgcagtttcctgggcaggaatgaactgcccagaaccggttctaccggagagcagaaggttccagaatgggaacccttatgggtgtcttttgtagaaaggaggcagcaaacttaaccaggcttcatcccctaattcctggggcctctgtcttacttctaccctcacccaaaggctacaccaagcaggcaggctagatgctaagagacctgaattccttgcccctctttgcccttaaattactctacaattctggatgcttcattcctccagtgtctcaattactccccaaaaagtgaaaggaaatttaatttttcttattattttatattccctgaagtctatccacttccctactgatctacagaatgtgtggcaattgcagatggcagtatcaattcaatgactagcattcgtactgtgttcctcttcctgagttattgactcctatagccattctgtgaagtaggaggtcaggtatttttaatatacccacttcactaaagaggaaacagtcagggcaattatatcactaggtctgatgttttctacttggtaccaccagcaccagaacgctggcgttacctcaacagcatcttccctgtgctgtggttatttcctgctcactcttcatggtagctcctaaactcctacctgcataatgacattgttaagaggactaaagaatcaagctatgtcgtctgctcagaagaaaacaaggaaatccttcccaacattgttcattccaatgagataacctcagtgggtttacaaagttctgtcacatgggcctagaggttaaggcccatcagtaaccattttctctgagattgggatggctcgtcttccacttagtgttgtttagaaaaatctcctctctagaatcgcttgaacccaggaggcagaggttgcagagagctgagatcgcaccattgcactccagctgaggcaacaagagtgaaattctgtctcaaaaacaaaaaagaggaagaagaaaaatctcctctcctactcttttttgatatcttctaggcaaagaggtctggattgggaaatgttgaagggcctctcctggcactgaagtcccttccaaatgcacgcctccctccatgctctcttctgcagccccttgtccctggacatgccatgacattcccactgctccagctctgaccaagcccttcctgtccctggatgcccttcccctcctctccacaaacccgcttgctctgtggggcctcgtccacggctcccctcctctaggcagcctttcctgactgcgtggccagctaggatcactactggcagtcattgctcccttggcccaccatttcctcttctgggttagtcctctgcctcccctaatagcttacaaatccagtgggggcaccaatgactccttgtggccaccctgcctgtcatagagtaggtgctcagtgttcagaaatgataataaaaaaccggatgccatggggaggtgttatggttggaagaggagaaaatcaagcttgcttcctaccggtaaatgaatcaacagacgtttcctgagcacctattttgggcagtgtcccaagggttggaatgggctgtgtaaaaggtatccataccctgcttagtaaggtccgctgggttctttgtgcactggtgccacactgcttcacaaatgacctccagtaaagggaagcacagtataagtgacmgcaagtagaagcaacacaaaaactctagaaagaaggaaatttggctgggtgcggtggcgcatgcctataatcccagcactttgggaggccaaggtggatggatctcgaggtcaggagattgagaccatcctggccaacatggcgaaaccctgtctctactaaaaatataaaaaattagctgagtgtggtggcacgcacctgtagtcccagctactcgggaggctgaggcaggagaatcgcttgaaccagggaggcagtggttgcagtgaatcgagattgtgccactgcactccagcctgggcgacagagcaagactctctctcaaaaaaaaaaaaaaaaaaaaaggaaggaaattatttgtgaggaagaaatatggaaaacatttgagcacctcctggttatagaagtagaggaactctactccgcagcaggaacctttacctccccaaaaatgtctttctgcctgtgagttgttgacactaccctagggccagctatgtcgtcctgctgccattcatgcctggagttaaaaggaaacyggagtatgttaaacaaaaactaaaggttaaggttgcagaatcagaactgagtctaggagtacttagctggggaagaaactggtgggagttggagatagtgtctctgtttacaggggattttatacagaagagacaaggtgttccttacttaaactcaggtcatatttttaaagtggatttcaaactcagggactgcagtatagtggaaaacccyttggcaggggatggagtaggctgcgacttaccttatcttccattacaacagtaacccatggtcattgcagacattttggaaaatatggactggtagaatgaaaatgaatcaaccaaaattctttttttttttttttattatgctttaagttttagggtacatgtgcacaatgtgcaggttagttacatatgtatacatgtgccatgctggtgcgctgcacccactaactcgtcatctagcattaggtatatctcccgatgctatccctcccccctccccccaccccaccacagtccccagagtgtgatattccccttcctgtgtccatgtgatctcattgttcaattcccacttatgagtgagaatatgcggtgtttggttttttgttcttgcaatagtttactgagaatgatgatttccaatttcatccatgtccctacaaaggacatgaactcatcattttttatggctgcatagtattccatggtgtatatgtgccacattttcttaatccagtctatcattgttggacatttgggttggttccacgtctttgctattgtgaataatgccgcaataaacatacgtgtgcatgtgtctttatagcagcatgatttatagaatcaaccaaaattctatcatgcaaagacatccactgttaacctttctttccattcagtatctttttcctttgcagaaagtgtcttttttaaatagttactataatactgtatttatatgatttttgtattctgcttttttcccttaatgttatacataagcattttctgagcaacttttctaaggcagtttgctccttgccgagagaatggcagatgcgttgtagtgtacgcttgcagtcaagaagttcatctcagaaagaaatgaggggctgaggtccagggcacggtgcagtgcacacttggcacttctgtcccctcctcaggctgttcacccctcaggacctctgcctctgaccagaccccttaccctctcagtttgctgaccatgcaccctggaactgaagttcctggggccccaggtctctttggatattgggggctgctaggtgaggtcatggtaaagactcagacctgaacccaggagctctctgcccagagctgtgcccaggcctctatgggtgcagccgtcacagcagtggactcagtccccatggccactgcccccaaactgatttcatatgagtgtgcatgtgtgtatgtgtgcacgtgtgcgtgcatgtgtgtgcgtgttttgtgtgttgtgttgtaaaatacatataatgaaagttaccattttaacctttgaaagtgggcaattgaatgattttagtatattcacaaggttgtgtaatcaccactgcttaattttaaaagttttcatcaccccaaaaggaaaagtttttattaccccaaaaggaaacctcatacccatgggcaatcactcactcctcattctcctcttctccctgcccctggccactgctaatccgctctctgtctcagtggatttgccagttgtggacatttcatataaacggaatcacacaacatgtggccttttgatactggttcctttcacttagcatatctttgggctttatccatgttgtatggatattggcatactgtttcaagtatgaatgcatgtattggcattcattttcatggctaatactattccatggcatgtgtataccacattttgtttatccatccaaccattgatgaacacctgggttgtttccacctttttacttttgtgaatagcgcagttataaatatttgtgtacaagtttttgtttgagtctctgttttcaattatttgggggtgtatatgtgaattgctgctggctcatatggtaaattgatgcttaacctgcagggacccccaggctgattttgtccctgcagaatgtgttaagggagccttgctttcyttgggcacttaatgaacctctgaagccctttccatcccagtggtcccaagttcatctcagaaaccctctctgaaaagtgctctcctttctacatccatggccagccttacctgctggtcgggcaaagccttcatctcttcgtttccgaatgtgagcaatgtctgcctgctgccgacgctccttctcttcctaagctaagctcctgggtccttgccccacctgagctaaagcttttgtagcaaagaggttagcaaagagacaaacccaggagccatggtccagctctcaccctcccaggtctgcagtggccttgagggctgcagaggtttttgctaagactctgactcctttaatgacctggaacagttcctctgggccagccctttggggacagggggtgagggcgtgagtcagcctgtgtttcctggtgtctttgtatgtgtcttgtctcagagtaggacatgatttgatcctgtgagtggaagtggaaattttaagctgtaattggagtttgggattttcaaaaatagaaagagataagaaagagactgggcttcagctgtcatccgctgtcctcagctggtgttttccacattgaaaacctccccaattttccttcttttcctttcaattacatgatgatacttgaaacaagtaccaagttggggtttttttttaaacataagcttatttttttttcagtctccttatccacgtagttctttagtgggaaaaaaaagattttaagaaactccaatctctgcaaagcatttggtaaatttatataaatcatagcttacatattcttcaaagtcttatcacatgcctttctctcttgtttcctcacaaaagcccagttagagaggcaggatagttttgcaaataataatttgtctttcttttatagatgaaaaaccgagtccccagagctggctgatttagttcaggtcacacatattctagatggcagaatcagaatgggaacccaggtgtcctgtcaacccagctgtccttgtctttccccacaatgtcacctccttgaggattcctccctgtgttccccacccctcccttcaggccagcttagaggcccctaggctgtgtatctatacccacatcagaaccatctactcacctgtcctcgccttctctagactgtgaggtcttactcatccttgtacctgccacgattcctaaatcatagtaggtgctcaggagtgctggttgatcacaagagtggacatctctaggagctttttgattgcccattcacaatgtggttttaattacatgactcagcggagaaatgagaggcctgatggcaggggtggtagatggccacgggctgatgcattcagcctcttgtagttgctcctggtgagggttgggtaggagttgggtggagagtagggacttggatttgcttggaggaggggagaggagggagtgtggtccaggatctgcaagggttccaccagctgcctgcttgagcctaagcatggaccttgctttaaagatacatcctgctggggcatgcacacagagaactcagtgtgcctcggtgctttaattgagagtccctccatcccctagcctacaggaggagaagccatcttattcagctgtaattgacccacctgcttgctagcagcactgacacaatgtccttagagggagctaatagatgccctcttttagccagcacagattgaacacctgctgcccaccaggctttgggccagagctgaggaatacaaaagcggagcaggtactgacctcccagggcactcagagaggtcgtgtcctgactttggtgactcattataaagcctcttgcaggcccattcaaggtcatagctttatacatacttagacccaaatatccctcactacctatctggcctccaagactctcagccaagcagataccacaagtgagctatgacaggaataatagaaggacagaacccctcagagcttacaggaggagtgcaccagagcctgttgcagccctggagacagagcccatgcatggcttctggggaagtctgtgaccaaagtaagcaaccagcattttattttccattgcaggttttaaatactggggaaagattttttttaaagtcaaagcaaaacaggattgcagtctgggggtccccaagactaccctcaggtttaataacttgctacaaggactgagaactcagcaaaactgttagaatcatggttatggcttaactacagtgaaaggatacaaattaaaaccagcaatgggtaaaggtgcacaggaagagtccaggcacaagcttccagttgtcctttcccagtaggttgtacagataccacttacttttcctagcaaggttgtgaggcaacatcacagagtattgccaaagggtaaagctccccgcaarcctcgatatccagggtttttattgggtgtcagtaaatagacatggctaactaccctcatggtctccatgccttttcagaggtcargttgagttggtaccacacggcccaaggtcttctccataaaccacattgttagcatagattatctggtgtagcccacagccccaggtaaacaaagacagtcttctaggcaggacatyccaaggggttagaggttacctcccaggagctgggcaagggccaaacatatctttgggcatggttaatcctttattgcataagagtcacagaaggacctagtacagctgcagaggccccaaagctcaaagcaaaggcaaaaccaagactttgtcagacatacagaagatatctctgaacttctgaggtcatttcagaattcaaggaacaattgtgtgtgtatttgtgtgtgcacgtccaggtatttgtgtggatggtggtgtttgtgtgcctgcagtatgtatccatatgtatccatgtatcctgttgacatatccacagacacacaatgacagtggcccaagagccccagaggaactgtggcagctgggcaggtgcagtgctgactatgaatgaaccatctgtgacatcccagaggtagaagtaatgcattgaaaatgagcatttctttccatgtgggccaattggttttcagaggcaccttgttactgtcagaatgagtcacatgtgggaggctgagggccaaattaagtctgtgaacttaaaatcaggcactcagtgaatctagagtttaaaataagaagacaacctcatttgggggaaagaatgaaccaggaaattaaatggcttcaaggagaaacagaggttcctgcctgtgctggccaaagggtggttggtgcagaggattggaaaagcagtcctgcctggttcccagggacctgctggttttgatgggctgcctgattcccatttagctgtccaaaagtttcggtgttcacagctctttgacacctctctgggcaatgtggggagttttcctcactgcacatcaggtacagggctactcacccagaaatgagaaatttgaaaaatatatgtacagtggctcgatggctccaagaagctggtgacttaggcttgcatattttgaaaatgtttcctgcatgattttgatgccgtagatggggtggcctgagggacgtagcaagtaatgaggctggaaagctagagataggcctgttcttgatggtctgggatgctatgctaaggagtttgtactttgtcttagaggcagttaaagtttttagcagctgagtggcagagtcagatttgcaaatcagaaagacaactttggcagccatatgtagaataaaaggagaagagcaggagatagagtggggtcgggtttaggagtccattgtagtactccaggcttgaggggatggagaagaggcaggctgaactcaaagagcagttttggagttagaaccagcaggatttggtctggttgatgggctgggtgaagcttcttcatttagtgctgcggggagggaagacaggtgatgattctgttaacagaaatagggaacttaaggaagggagcatgtttggggagaagacagtgaagtcaacctttgaaaggtgagtgaaattcacatggaggtggccaatggcatattatatctgggtctggaagctaacagggaagtcggggcctggtacaaatttgtgactattcatctgcaggggacaattaaagttaggactctgggagatgctattcatcaacttatccatgaaccacaggcayagaatgaagcaccatgggtgtacggttttgcttcttggggctgcagtcttggggtcaccttcccagctgtatcagtccattctaacattgctataaagaaataccagagactgggtaatttatagaagaaatgaggtttcattggcttacggttccacaggctgtataggaagcatgatgctggcatctgttcagcttcgggggagacctcaggaaacttacaatcatggcagaaggtgaagggggagcaggctggtcacatggccagagcaggagcaacagagcaaatgagtggggaggtgccacacacttttaaacaaccagatctcacaagaagaacatactcgctatcaccagaacagcaccaaggggatagtgttaagccattcatgagaaatccacccttatgatccagtcacctcccaccaggccccacctccaacactggggactgcaatttgacatgagatttgattggggacacagatccaaaccgtatcaccagctaactatgtcctctgcctcctagagccccactcgtggtgaaggccttctggagccccttcttctcgattgcccctttctgggtgtgcaatactctccagccagcctccatcatgtccacctttcttagatggccactgcggcagggaggtcccagcagtcaaggaaaacctcttagcattttaggcatcagaactggagaggtcccattgcccagtacccccttttatagatggaaaaattaagatccagagatgaaagggctctatgaaggccacaaaactcatctctggccctaccctcacgaggccatcccaagctccctgactcccakctgggctcctctccataagctaagtgsgggtctgttgtcttacaggactacacgcgggtggtgtgccctgtgatcgatatcattaacctggacaccttcacctacatcgagtctgcctcggagctcagagggggtgagttgggctaacacctcctccccagtaaggattttcttttcctctcagtcactgcttttaagtggggagagtgaaggaaaagctcttagttgcttgtcgagaaagctcagcctgcaacctgcactataattaccttagcttggcccttaccaccaggactgtggawggaagggctagggggtgggcaggatgctcccagcacccagagctccagctctaagatagggctcaccccayttaatgtccaaaaatgtgatgggagcaaggatttcccagctacatgtggcctgcattgttctgatgccagcagtgggcaccaccctctcctagagacgtgattattctgttaacaggagtagggaccttagagaagggagcatgtttggggagacccaccccagctctccacatagggcccactgttgcccccacttcaagaatgacttttaggtgactcaggtagtttaagagcctctcacaaacctcctgctcacaccttcctgagactcagtgccaaggcccacattccatgactgtccatcctgtcatcctcggccyctacccctaggctttttatcctctgccctttatttctaaccctacacagcagagaaggctcagagaggtggtagtgggtagaggaagaacaggaagctgtgaacggcgctttggcagccatgctgctgatcagcctagggaaacctgcaatcccagggaccggcctctttgagacctacctctccaggacctgggtacattcatgaccttctggagagggtgcagaatgagcaagtgcttttgagagaccaaagcaggtgggttggtgctgtgttgtagggtttgactggagcctccacttccagtgggagcagctctccccagagcagaaggctcggcgcctggaccccacggagcccatcaggtaagtgggaagagtctgtgcaggggtgggcagaccatcaccactggatcctgtcaagtgtagggaggtgctcaatatcagatgtcaaagcatcaagcagacaaagggagccctttgccaggccatctccacttttgcctttattttaggaggtttctatcctcttggggacttcttgctaaggggatgggggccagcagaggcctgtgctgaggtgtgctgcccaccctcacacatgccatgatgtccttgtgcctcctgctaatgtcggagcccaacgttggttgagtggtcccattcggcctctagtgaggggaaagatggtcccttagggccaggagcaaagtcccagggtcttggacatcaggattcagcccagagatgttgagtcagccactgctgtaagtggaggccaatatgaaggtcactgtgacatattcataagcacagctgccctgttctctgcaggaagatgacagtggcatgaactctggctctttgccaggctgtgggtggctttgtactgacccacattctctcccaggccccactgtgacccacagcatattgtggctagggctttgcatggggcctggggaccaactgagggcttggggtagagtagagcatagtggtcaccacacagaggagcctgtggtctcagcttcaagagtgatggtcttggtgtcctacctactggacagtaaaccagtcccgggcctcttgggaatacttaagctaaaacaagcctgcctcaggcagggcagcaggaggataagaagtgtatggatagatacagaggccactggatttctcagtccagattagggatgcccaggactagccaaaggcatctctgtgtctctggtgttgccacatagtaagtatttaatcatttttgttgagttggctgaagtcaaattgaggayaaagggactagcaagagctaagaatgggaatgtgaatggtgaccttccaaatgggggtggggactctgagaactctactgtggggtaggaccttggtctcatctacctgatggcccctccttgctcctccaggcttctctatttggagagataccaagaggaaaattggagccagttggtacccaggacaaagtccttcatttctaaagggagagggaggaggagcttcttattatgctgagcatcacacagctcacatcagctcctcaccaggggcagtgcatggtgtgggtgtgggaagagcaaagggtcaaggtgatgctgtgcagctcccatggggttttcctgcctctgtcgcaggggtggcattctcaggacaggttctcttcttgtgggatagctctgctcatcagagggcacttgtttcccaggatgaagccagttctcagaaaacagcaggatgtggcagcatcaggagacctgggcttctgaccagctgtccatcaattacttctttgatatggaagaaaactcccttcaccctctggatccactgaacgggggccaggtctttgagggcttgcccacctatccagccactgattattagcttggaatctgctcccctcctgccttccttggtagccccttttcaggcatttctctggcatctctccagagaagtctggggactgggacgaagaaaaggaaaaaaatatgagggtgtgtgagtttgctagggctgctgtaacagcataccacacacggggctgcttaaacaacagaaatgtatcgtccygcagttctggaggagaggtccgagattaaggtgtccacagggttgcttccttctgagggctgttctaggcctctctccttggccggtagatggccatgtcttccctgtgtctcttcacattctcttccttctgtgtgtctgtctctgagtccaaatttcccctttttataaggacaccagtcatattgggctcattacctcattttaacttgattacctctggaaagacttagtctccaattacagtcacattctaagatactgggagttaggactccagcatatctttttaagaaggaattcaacccataacagaggcataaagagggaaaaaaaaggagagagagcccagtttcaggaaacagatgtgctgctaccaagtgccgcctcagcccttctcctctgcgtggtcggtagcccactgtcccttctcccagtaacagagctcccaagagagccctgctgtgcagagcctgtggaagaggcttggggaagctccctgggtcatcggaatagcaggagtcctgagtgagccctgtgtccccatgggagatatgctaatgagtgaatttgcctgtctgcaaggtcaggagatttacartcacaggaaaaaccctggagcttgttctcattttaggtaactggaaaatrtactggcccttctcgagaggaacagaaatgggaagaaaatgagagtyttcttccctcaatggggttttctttccccaaatgggaaatgggtgtttcagactcaaggggccgaagaatttgagagtgatctccccactagaactgatcccctctctttttcttccaaatgcacaggactcctatcatagctggagggctcttcgtgatcgacaaagcttggtttgattacctggggaaatatgatatggacatggacatctggggtggggagaactttggtgagtccctgcctctgcatcctgacctatgctgttctatacaccctggggattggggcggggacctctgtggttttggatccaacaccaagctgtcagagagtgacacgtgctttggatgaggtcctgggagatggtgagttactcttttgggggaaagcgggtagggtgccaaaggaatagttgttggagggtgttgataataagggaatctctccatgaggcggctgcatggatgttgagaaccagggaaacacgctctgacagactgttaggggaaagctgagatgcaacagccaggaagaccaaggaggagcaccaagtctgaggggtcagatacaggcttgagcaaggagtgatgcatttgaaaatttgcagttggaaggagcttgaagagaaagaatgaggaacaggaacagcagtgacatccattaacatccattaaagtctgttggcttctttgattgcagcactcagtttcgggtaatgaggagggtctggggatattttgcccttatcttatagtgggagaggaagggatgagggaatggggctgggttataggacccaaaactgtacaaacagatggttggatctggtcatggtgggatagagctgaggcttgcagccacaggagaaacagcacagtcrgaaagacccattccatctagctagtgatacttaatactcatttcccttgtgtattaaaggtgttaacgtcaggatactagctctacttcttggggctgttaaaagccattgaagtaaatgtgtaaaatcttggcaccatgcaggcataatacatgtcagttccctccagcaggtgagacctaggagatcactaggatagaagctgcacgagggcaggggttggggtccattttgctcctggctgtctccagtgcttagcatagtggctgccaggtaggaggccctctgtaactatttgttgaatgaacacatcacagtagagtaaaagggagcctcccaaagtgtcaggacccttccctctctgggtaccgtggcacatgtctgrcacaggctctctgagcaggggctcaggccaagagaatgatccatggggcacatcccagcatttagcagtaatccatgcattgtctgctgccattgttttctcctgtttctgcctccagggtgttttatggctttctycctcagtcactaagagttatttcctggaaatttatggcttctggcctgacccacagcatctgttctcccaaactgggcagtgtagagaaatgcatcagaaaagtcagtctcctgccatacagggtccagactggatgcccagcaaacaaaacagaaaaacaccccaacacccacacaaaatcgaatcccttccctgggacccagcccatgaaggccttctggaatgtgatagggggctgttggtgtggggttcgaggctgggtctgcctccaccagcccaggagaacttggagcaggtggacctttggtgttctcagtggggtagggacttctctcttatggggtggagcccatttttatgtcttgacaacctcagtatttcttatagttagtgatttgttccagcctttctctcagccatcagatgaatcctctctacagcatttcttatagacagcagccatccaatctctgctgaaatgtttcttataatgatgcattcgctatttcacagtttggcatattctgttgtagatatattttttgttgaactattagagaattcttctaagtcaaagcctagctaccccatcttctgtctgtcagggcttgtagtgccctcttgaactgcacaaagtgattcttcttccacatggaagttctatttggattcaggcagcatgaatttcaaggatggcacagtctggtccattttggtattggtagcaatacctttccttatagcaatgttaacacacatctgctcaaatcaagtagcaatctcatctagctggcttccgactcttttggcatcaacaagggctgattggaatagagaagttggagagggtgctgggaggtgtgggagagacatttgcaatccatcacaaaatttttaaaccacaaaaaaagcactgccaacagctatcacagggaacacttcattttatcccaccccaacattccattatgttatagccagctaacagcactttgaaagccatttctggattttttttttttttttggcattttatatgccagaaaatgcagtgcttttccagtggtggctgtgtcacgtggacagtgtcacatctgcgggtggggataacaaggcacctgagtgcgtgaaggaggaatttgaaagagggtccccgtgaagatcagggatttggatggggtgtacgagtgatgctccagctgcgaaggggagatggcactaaggggtgaagaaaggagtcctggctccagagtgtggcaggaagggcctcctacccaccaagtcaccaagtcctgcagatcaactgccctcagcatcactcacatccgtcgccttctctccatctgctccaatactctcctcagtggtcctccatctctattgtactatcgaatctgagctctcacacccctgccaaagtgcttgttttgaaatgcaaacctccccaccccttccgggcctggcattctcagtggctcccttttgtcctaaggggagactcacactcctcagctggatccctccctcccatggccttgcctgcctctccagcctcatcagcctgctcctgcctcagccttaggtccagaggtaccaacagaacctcccactcttcccagagtgagtccaacccactattaggacctagcttcccttttccaccaaagttactctgctgcagaagctgaccctctacaggactcagccctggggccacctcctctagaaccagaaagctttccctgccctacctctggcccaccctctccctcattctgcacccttcagcaccaggttctcttcatcactgcactgagcccttgtatgtgtttgtctctttcttcttctgtgtctgccgcccagccttctaccaaacctggggctccttacaggcaagatcattcatttgacttctcattcttgagccagcagtggtagaaactactcactaaatgtgggttcaaaaagccagagactgaatgggaatggggttcaagatgggaagggcaatatatatgaggctccatttaaaataagtttcattggattaaatggagccctagagagacatgtttaagggtttccctttaaatacgagaataatagcagctggtagagacatctttcctttctaagtaatagaatttctgtgtgttctagacatgtttgcatgtattgtgttgtctttatttcacagcacaaagacgcatgagatgattgggacaggctctggccagagtgtctgtgacctactcaatagcacatggcccttgccctaccccatcttggttttcatgggttagaagcagccactgatggattggctgccatggccatgtgaaagccgtgtctcatacactcacgtgccctgacctcagtgccaccatttccaaagtatttctaaggtgagctgaatagttttgatcattacatgtgcatttcagcctatgagcagatgttagggaaatgtggcttttagattttttttcagaagttgatttgcattaaaattggatgcttaaactgcaatttacataacacagtgtacatgtaatgtgtctactttgagctgcatcctacttttagcttttggtctttagagataaaaggagtctgttagagagagagagagagagagagagtgtgtgtgtgtgtgtgtgtgtgtgtaaaaggaatctgttgccctagtataaagtctgtgtgtgtgtgtgtgtgtgtagggtgtatgtgtgtgtgtaggtatgtaagcggtgcatatttccaaaaaggagcccttggcacatatatgaagggtgaatatgggattcctgaatttaaaatgggggatttccaaagcacagcaggcacaaaaggctgccgagaagagagaggtgagttggggcccagagaggaagtaccaccacctgctgtcccagaatgtagtcagggacaccaggctatgccaggctcggctctcctgagtgtgtaagtatgtgtgtggtggggggtgggtgggtgtgttatgggaagaatgtgggctgtggaatcaggtaagcctcagtttaaatcctataatcatcactaagcattcataggcctgagtttaaatcctgtaatcatcgctatgcatccttgggaaagttacttcacctcactgagcctgttcctaagtctttaaagtggagactgatccccatagtagggagaacagccctcccaaagatgtccacaccctaatccctggaacctgtcaggatgttaccttaggtagcaaagggatttcccagatgcgtttcgggtcattaatcagtgacctgaaggtagcagattatcctggcttttctgagtggacccaatttaaacacttgagcccttaaaagtagagaactttctcaggctggaggcagaagagaagtagcagatgaaaccagagagatgtgaagcccgagaggtaccgaccacggctgctggagggggcgacatggaagtagccgagagaggccccaagttgacagccaggtggaaaagggaacctcagtcctgcaactccaaggaaaactgagttctgcaaacaacctgaatgggcttgaaagtggattcatcttcagagccttcagaaagaagccatcctgttgacaccttgatttcagtctgagaccctaagcagagggctccgccaaacccacccactaagtttgtggggatttgttattgcaacagtggaaaatggtagtaggccccacatcacagggctgttgcaaagattaattagataatgaaagtgcctgttctccaccagggtgagctgccttctctttcagagagcagggattgttaaacgaggattatgtgtgacctgctggagtagtttattgcttgactttctctttcagcctcaccctttccatgattggtggctcaagattagggacatgacctcatctgagaagagcatacaagtgtgatagcaagtcagcttttcccccagatggagagtaaagctaatgcagccagcactttgttccttgtctgagctactggctaaagccccatgcccaagggagaccccctgaggccgtcctttcctgctgcttctcaacttccctacgtgtaattgagtcccatcagacactagttgctctgtttgcatagagaatatggaaagataaaggtgtcacctggcatttgcagtcgtatgggcattgcagatcatggcatgcctgtggtcaatacttgtctagagtaagaggtgtggatggagacttgattgtcccagctgtgggtgaaatgcagttttgctcacagattcaaggcgatgttttctgggccaataagattatctctacccaagtcccttcattcattaaagagtaataacagaacttgctttctagcccagtagatgttgggaacttaaaaattactgaaaggcaaggttccccattgtacataaatatgtgtggacttatgaatgacagtagccaggtgagtgtctgtttctcagacagaggtttaaacttggccaaaagtagaatggacaatgctattgtatacacaatacacacacatatacattatacgaggctccatttaaaatgtagtacccacgtgtaataattctctttgcctttgtttagaaaccaggctataaaatgaaattagaaccttgaccagtatggccaagcagtggcatatgaatagtcgtggtttgcttcctggagagaaagctgctccttctcccctgaattcctgcccaccatccatgggcttgccaggtagaagttggttctggtgaagggctaggaccctgggaggggtggtaagcactactgatcagctgatggagagacagaaggaaagtggggggaatggagggcgggagggcaattcgctctcaaatatttacctgacgtttaaagaaagtaagattataacagtgccccgatgaggatggaataattacacatctgcatgcctggaattcaaagtggatttgggtctccgtgaagtggcattcatcaccagggagattatgtgggcgctgactcagcaagaacccccagcaaactctctacacaattcttttttgttccctcctccctcacttcagaaatgatgactgtgcaggtgctgcagcctcgaagatcagaggccctaatctgtacctggaaggtccaccacctcacacgtgaatctacagcacttctgatagcacttgtccaagcccccttcacaggacctcaggtcctgtgactgtcccaaaggtctcagcagatatctacgaaccaccaggcctggcctgcaatcctgagaggatacacatcatttccttgaagctggtgatgtagataagggtagagcacctgtatatcccacattttaaataacccacactgtcatccctataaatcatcacactgatctgaaaactccaagccgcatccctcagactgcctcttgactctggcagcagcacagcgatccatgtcaagacacgtgcctccaataattccaggcataacaatctgaactccagagtagagacactcttaactcatctcggctgcaggttcctctgggcggcagcagccagcctgaaggagacctgagatggacatccttcaggactggatgagtgagttgatagggtaggaatgtgacagctaactatgtatttgtcactcttgttagtttgtgagtgccttgaagttggtttctttgcatccacagctctactggctggtggaagatgttcagtatggaggcagggtggtgtcaggggaagagcatgaatttcggagttggagagatgtgcttccctgcttttgaatgccaccagcttctcgctctcagttgtcctatcagagttgcttctgcatcgcaaaataagaacattaataacaatggagcagggttgttaggactaatcagctactgcctgcctggcccagaagtaaatgaaggggtcattttcctcccatggctaatgcttgcagaattgcaatactcaatttttgtactaaggcaacagacataagaaaattagaaggaggaagaatgtctttagaggaggcagggctacagcaggctgtaggaagatgctgagggcataggagatgtcttgggtgtgataatgtcccgtccatctcaatagatacctcagccaatcatggaaagttggtgccagagcttggggcagagttggggctggtaggatggaggtgagtcctcagcatagagtgaactctgggagcagaggcgacagcagtgtcaggaaaatgctcagaggcagagcgttgaggggatgtaggagaagaacatggggagaccagaaggaaggtagagaaggatcagggccaggcaatggtgctggcctagctggggacctgtgcatggctgtggcagaagggaggggtcagtagattcagagagaaataaagagctgggaggagggatcataggaaaagaaacagctagtggagaacggtggtggggcatggggtagaggcccaggttggagggattcgctttgcaaagggacatatgtctcatttgaatacaaggaaaggaagagactgtagatgaaacccgtacatatctttagaagaaagctggcacaagatgtgtaagttatatctagcgagcaaggactccatctctagtgttgaggaattggagggttttccattttgggaactggagcaggccctgttttgagtctctggagaggagttgattggagcacagacatgagactgaaattcacacgtgctgacacaactccacgcaccgacctccaggttcctctatgtgctactgcaagatggggatgtgggtgccaggcagttggctgagctcactccttgctcaatgactcatgtgaaaaacgattcaaacagtgccccagccaaatgccaactccctctgtacagtgggactttatggagagtcgaaatctcaaatgtgaagtgcacacatttcaggtgtctcctgcagtgtggcagaagatgggaagaagcatctgtaagtcatctaagaaattaaaagggggcacaggtgggtgatgtccatgttttaaagagattggctttagagggatgtctcataataactcctgctgatctttcaatcacacttagcgtttacacagttgttctcaaaattctatttgatttgatgctgacggcattccagtggagtgtttttatgacatttgtttgacataagagcaaatcaggcctccgcgagcttaagcaggtttcccaaggatacagctagctggttactgcagacttgggcctgctgactgtgaagctaaattcttcctgtttcctttcccccatgttattgccatgattcagtagcagtcatgagaagtgctctcttcctccttgagtctacayggtccccaccctgaggggaatccaggcttcctgggagtgaacagcagtaggcagaggggcaggtgcagagaaggtggtggagtagggctagtgtgaaagaagtcttacctcagtccaggggcctttccaaggaaacgtgggaggagacaggtaggtgacaggtaaaggtggctggggacaggggaatgagagcagggtgcaggacacacatgtgatacgaaggccctgtaatacctgtatccttgttcccttcccctgaacacccagcctgcttccccatggctcctcacatgggcagccacatgcttgggctcgacttcagaagcatcagccagaccagaatacctacacatgaggagctgccttttctaccagtgacaggcccagtgggatgcaggaagcagcctgccctcgctgtggtcagttagggggtacattatctgtagaaaatttaagagcaatgataacactcacagtcattctgcttttgaatgtcaccatgcactggcaattttaaccaatggcagtggtaaaattccctccctccccacttggtatgccaccacttccttctcagggcagaagcactacttcaagcctgctggggtacagtcccggggagaaatacactcaccacagccgcctctgctaactccatcccacccacctctctgagggcccatagcagcagccaaccaggaagaaatgggtgtgtgtacaaacctaggggacaccagcaacaacagctttgaggcttccagcattttctagaactgctttcagctctagttaactgcacagactttctcctcctgggttatgattcaggtggctcttccccagtggtagaattgcattcactgtggaaggaacttttgtggacaccttgccctgaggccttctggggactcagtcccctttgttgcatccttgccgtgaagttttctagcctgtcctgagtcttctcacaatggtcaccttgtccctgattgttagaaaattctcccgtattctcgattgaaatttctttctccttggtcctgactctaaccctctgggatcacagggagtgcatctaaccagacttccacaatgaattcttccgcaagttagaaggcaactctcttagtgcccccaaggctcctcctttccaggctaagaagttgcagcagagcccctgccccgccatgctggcccctgaatatgctccagaggccagcgtgttggtttgcactgtttccctgctcacttataccaccctccaaagtggtaggactattcccatttatggatggggaaactgaggtctctcagccagtggagcctacagactggctgcagagtctgttctttcgcctctgcgggggcctcaccgtttcattagacctggggcctcaaagctgcagcagcagtgataagaggtcataggaggggcgtgactgtcttgcagaaatctccttccgagtgtggatgtgcgggggcagcctagagatcgtcccctgcagccgagtggggcacgtsttccggaagaagcacccctacgttttccctgatggaaatgccaacacgtatataaagtaagtgcccaggggctcagcgcgggtgggcagcagcacaggcagccaaggctgggcggctgctggtaagggttgcagccgtccctggtgctctgttaggctgcctgtgtgatttgaactggccggggctgcacctcgtactacccagactctgcttggatagggaaggcaggcctgtcacatccagtgttagggcctgaggcttccctaatgcttctgaggcttcggaaggccccacatgaggcctcgtgggcttcaagtcacccatcaatgccctcctgcagggcatgggctccagatatttggggttttgtgagatgggggaagggcagccctttttactttggagttctagaagagccactgccccaccttcgggctgggtcactaggggagaggtctttgggcagatgcagggaatggggaggcccaagggatgcagcttaggtccctgctccagggcctggccagcagagtcaaagggtccaggctggggcagggcctgagaccctgggctcctgtctgctggtgtgctctcctcctgtctggggggtggttcttactgggactcagagacccaagggtgcccacttgcctgttccctgcttcctcccttcatccactcttttttcctccatttctcctctttcgatctttctcttctcctttcagaataattcgtgaatattcctctttccatcttttcctcttgattctctctctttcccccaccctctatctcttgtcatctgatagcttctcctccacttggtctcctcttcctttttttctgtcatttggtccattggggtagggggagctgtgtcatcacatcctgacacagccaccccaacacagctgtcctgaggagacatgggtttgagcaatgggaaaattggccacaccttttacaaaaacgtgaagggcaagggtagggtgataagaaaatcagcaggccaggaagcagtggggagcaaaggcagggctgcctcagctctcaggttttaaaaagtaaaggtgagctggggatgtctggcacagggaagtggtggctctgcaggagccatgtggccgcctggaggggggccggcctggaaatgaggggcagagcctggggctccagacagtcattgtctttgagactgggccctggccagtgggcatcctgcatgacactggtaggtcattccgtttctagaagattgtggcacagatgtctgctaaacagcttccaatgtgctaatggctaggtcagtggaaggggccagggaggcactgttaactgcctccagtgccccaccaaccaggctgtgtgtgcataaactgtcattgcaggtcctagcttagaagggcttgccacgctcctctcttgaatgcttctgctctaaagcagagctagcatctgaaagagcacccccttttcagttaggccccaagttcccttacttggcctcagcagataccactgctgcccaggccaccagccacctgactcttttctgacatcttttctctcttttctggggctctttctggtacgcctgatggctgagggatccttagtgtctgtctctctgtctgtctccttttctgtgattcgtggggtcagagtcagggcagataacctgattttaaaaactagagtgctagcaaaaagtctggaaagagaagcctgattacttagttctttacacctgcagcaggctaactgcatggcctatgggaagacctgtgtgtgcccactttccccttggagagctgggacctgagtacttccactgtggtaaaggatagaacccaggagcaagagcccgaggacagccagaagctagatgcccatgcaggccctgcctttgcactcttggttactggcagtgaagggatgccagtagggttcctgagccttttctccctatttctttgatagccacagaagttcagtttctggcatgattttcctggtctgtatcttttgggggaaaggtttgttgttactaaaggtgagcatccctaatccaaaaatctaaaatccaaaatgctccaaaatctgaaactttctgagcacccacatgatgccacaggtggcaaattccacacctgacctcatgtgacgggttgcagtcaaaatgcaggtagacaacccacagtttattcagcatccccaagggaaaaatatcattaccttcaggctatgtgtgtaaggtgtatgtgaaacatgaatgaatttcatgtttagattagatgtgagtcccatccccaagatatctcattatgtatatgcaaatattccaaatttaaaaaaccccaaatccaaaacacttctgattccaagcatttcttgtaaaggatactcaacctgtactaaaatcttgtgtcttggggtaaagacccctttggagattgggtggggcttggctgggctcagtgccctgggaacaggaatgatagtcggttgaccatggtggcccccacctaggtggtgttgccaactcagcccacacatgtgtattttaactggcactcacagggcctctcagacagccccttactgacaccccttgtcactccttgttttcccaggaacaccaagcggacagctgaagtgtggatggatgaatacaagcaatactattacgctgcccggccattcgccctggagaggcccttcggraagtaagtgtcccttcagrttgaggagggcagagactgcaaaagagcccagctcctaggaccgatgcaaatgggtgccgataggccagtcagcttagctaccctcagctcccgcagggcccaaggctgtggcttctttcctattcctcagagctcctgcccagctctggatgtgcagggctttaggcagctcttgtggaatgactgcctggcaacctggactgccagctctaggggagctgagctgtgccttgtgcagtggaccaatatttcctgctttttgcagacaggaaggaggcaggactagacagccttagtccttctaggtgggacttcttccctccaagttctaggtcatccaagcctaagctctctccttccttggaggaacagcatgtgtatagatgtgtcctctacagcagtgctcaagtttcatgggaggagaggacagagaaaggaatgtttattaaaagctagataccaggcttggcgtggtggctcacacctgtaatcccagcactttgggaggccgaggtgggtgaatcacaaggtcaggagtctgagacccgcctggccaatatggtgaaaccccaactctactaaaaatacaaaaattagctgggcrtggtggcgggcacctgtagtcccagctattcgggaggctgaggcaggagaatcgcttgaacctgggaggcggaggttgcagtgagccgagatcacgccactgcactccagcctgggtgacagagcgagaccccatctcaaaaaaattagttaattaattaaaaataaataaataaataaaagctagataccattacataaggcatctcattaatcctcccaactctgaggaatgggcgtaatgactcctggtttacagatgaggagactgaggcttctacaggttaagcttcttgccctagatgacaccatggcagaggggggatggtggctcaaaccacacctgtctgatttcaaaacttggaatgaccttgtattccccaacccagggctgattagagaaaaatagcaacttcactaatgctatcatttatgtttctttgggggcaaccaatggctttttgtcatactaacatcacccactcatcatacgaaggctgttgagcagatgggttttttgcagcctaaattcataggttgatcccatcactgagtgggaggattaaatcagaacccaccaaaatgatttgcatctctgaaaccataaatccatgctgcccctcaggttctctcactccaaacctccaaggcattcattttcagtcctcatcagaacttccaatctgttggccatatcaaccacatccccctcactgccttccctctctagcttggattctactcttttaaaaactgagctcaaaaggtcttgtcctcagaccttctgtgctgttctccatctagcaacaccatccccacagttcatccaggttcaaccttggatgaatctgactttgcaccctgtcctcctgtgcacacaggctgctgaacagaactgggaatgccagctggtgctactaataatacaccgtggtcgtcagtctcagcaaggcctgcagtctgcccactggccctgctgcctctcctagctagcgttctccctcgatcttcattaaacctccactcttcccagcccctagtccacccccctctttcgctggcagcagatgacaccttctgttttacagatgaaatagatgacatcaacttcccaaaacaaaccaacccattaacttcactgcttctgcagcatccttctctgtctcttgtctcaaaggacaggctgtgcttcctgctgtggtctccatccctccacctgtactctggatgaaccattcatcgctgcattcattcataaatcaacatttatcgagttcccactgcctggattcatctcctcttgcctcctggcgcagggcctctcagacattaatgtgcacgcagatttcctggggatcttgttaaaatgaaaattctgactctggaggtctgtatttctaataagctgcaggtgatgcaatgctgcctgcttgagtgccacaatttgaggagcaaggttctaccaaggagattcccaaactagtctgcatatcagagttccctggggagtttcaaactgactgcagtctgtgcccctcctctagagagttggtttacttgctctggggtgtggcctgggctgtagaatttttctaaagaccccacaccaggtgattctaacatggggacaagtttgggaaccacactccttagggggctttgccctccgggtgcctccattctctccctgatccccggtctctcctctgctgcattattcccatcatcatttaaacttattcagtgtcttacatcttaagaaaaaaaaataggaaggggaggaaagaaaacaaactacaaaaaccctccttcagtccaacattgctcataatccatgctctgtcttttccattcctccagtgcccagcttcatgaagcagtggtctgctttcctctctccactcccctcctttctcctggcccccaagccctgagactgctcccacctggctccctcgtgacttccttgcaccctggactgtcctctttcgctgccccatcagcatgagtcttctcccacccccggcccctctggtgtcccccagtccctaggcttccagaactctgcaggcatggcgtttcttctgctgctaggcactgcttgcttggtcccatttgcaggctgtttcctcttcctactccttgcatgatggtcttgccggagggtccgttaaaaagcctcttcttactacatattctctctggcattaagcactatatctatgctgctgatatttgcatctctatttctaagctaaacctatcctttgagttccaatcccttctatccaattatcaactagacacctccaccaggatgtctccctggtacctccaactcaacaaatcctaaactgaactcatgacgttcgctcctaaacttactcctcatctgatatttcccatccccgtgaagagttttcgttgcacctgttgcccaagtcagaaatctaggtgtcaaccttgaatccctctccttctctttcccatccttgaatccctccccttctctttcccatccaaatgatcaccaagtcttggtaacactgcaccatcatgcactgagcacacaggcccttgctaaacacccaatattcagcattttagaaacctgacatccttcccatcctgatggagcttagagtctggtgatgagctgtggttggtgctctgtaagaagaagttatagtgcaatcttgaggtggggagtggaaggaagtgagttggacaggaagcaaggccagctctatgtgtttgcccaggaagaaaaagacatggatgaacttaggtgggtgccgagaggtgtggaggcactcagcctgttgttcttcattcccacccccacttccctgtttgaaagcatgatcagcacctgagtttccacagctgcctcctcactaccctccctggccccagctttgcccatcagacccatttgtggaccagcactgaaatgctctcaaagtacaaaccacctcttgccctgcttagaacccatcagtttcatcccagtgccctttaaacaagtccaaactccttggcagtgcctcacgggaccctttatggtctgtctttgctttcaactcacccatttctgctcttccaaatcaccacccatacattcacatacacatctattttaagatcctgcagcactcttcctgcccgcagagcttctttcatgtcttcacatgtcctcatcttgctctccccactgcctctagcaggggcccctacctctggtttgtctagataatgtccccttttccttccagataccagcatcaccattactaccttgaccaccatggacccgacaagcaagggtccccctctgagttgttcccataggtccctcctgctcatcctatgtcacctgggctgtgatggcttatttcattatctttgcctattgttcaaaagctttccatagtatcccacattgggtacaatgcctgacacatagtaggtgctcaatgaatatctaatgaacaaatacatgaccaggccccagaaacagccaaataaaaggattttttgagactggggcagcggggagtggtgtttcggctgcagaatccaaagagaaattgtgaataagcaggcccagagccscagcggtaaattattaacaacacactgaatgttcttgcagctttgttttgaatgaaaagtaaaaacacccccaaattccatcttcaagtaaaagcaccagtcctcgctgtcattaccgcaccattgtgagatattgctaagtgtttccatagctctgtctgcagttatagaaatctgttcttgcttaatttccccagcaccttccagagagatgtgagcacagagcatgggcatgggtcgcgctttgtgttctcagtctggactggcgttgctggcgcctgcctctgacagctgtgttttgtctttgtgtctgtccacaaccccgttgcccccagtgttgagagcagattggacctgaggaagaatctgcgctgccagagcttcaagtggtacctggagaatatctaccctgaactcaggtatccgtcctacctgttggagctttggctggctgaaagcagaggccctcagctggcttggtctggagaagagacagacaatgaccaactggatgagggcttttatgtatatcagaggtgtaagaagaccagttggctccrttcacccctaaaacccggagggaccttatactgaatcaatagcatgaaggattacagttagccagtagcagtatttctcacctgcttgggtttgagccctgacttacagactcactgacaccagcttcactgcaggtactcatctccctctgtagctcctgggtctttccttgccacctcattcttagtggcaccctgcccttccccgagcagtgcagatattttctaacagcccagccctgccattctcagaacactgcccaccctctccagctggtagtcttgctaatccaatgagcagtggactctcctctctccctgtgactctcctccagcatccccaaggagtyctccatccagaagggcaatatccgacagagayagaagtgcctggaatctcaaaggcagaacaaccaagaaaccccaaacctaaagttgagcccctgtgccaaggtcaaaggcgaagatgcaaagtcccaggtaaagtaactggctgggcatacaggaccatgtgtcacagtagagggaggcagccagatgactctgcctccatcacctgctcttacatgacatcagatgcccatttattcccagagatcggtagtggagcatgagaggtgtgatccccccactctgccactgtgcttacactgcttgctttccaagtgcatagagttcctctgaaagacagtttaataggcagcatcctgcctataggaaattgcccattaagttagcaggagcttaatgagtttgttgtasttggtgtcctacctgctggcagcaaccgtgggcagggtcaggcaaggccaatggcacagctagctcgcagatgtgaaatgcaaagagggagaagactgccgctgggtgacactgccttctgggacaggacggaatgcctgctctgtgagtctcccagctgatttagctctgactggcaggtagtcacatcagatttggtaaaaccctctctgtctgccaccctgtctctgggcagcatccttcttcatccccagcttcacctctgcatctcctgcctctcctaagtctgcaggaccccttgtggtcccttctctgaaaggtttcctgtgctttacttgattgatcaacaaagtatctccccctccctgccatgttttttgggacagtcttctcccatctgaggctagaactgttgttttaaaggtcactgacaaattcatagcctgtctcatagcacttggcctgctgactgcgttaaagtacggtggctcacgcctgtaatcccagcactttggaaggtcaaggtgggtggatcacctaaggtccggagttcaagaccagcctggcaaacatggtgaaaccctgtctctactaaaaatacaaaaaattagccgggcagggtggcatgcgcctgtaatcccagctactcagggggctgaggcaggagaatcgcttgaaccctggaggcggaggttgcagtgagccgagatcacaccattgcactccagcccaggcaacaatagtgaaactccatttcaaaaaaaaaaaaaaaaaaaaaaaggcacgtttgtctatggcttccttgctaactcctcacccccactctcatacccttctggcgggtattcatcaaggttcccagctcactgttcttttctctacaaacgatttcttggagattttttcatgcttccagctttgacagtttcctgtttattgattcacaaattccttatcttcatctatccatgaattcatttrttcattcaacagatacttctttattaactatgaagatgcagagatgaaagactaggttgcaggcctgaagggcccctcaaagggcctaatgtaaaaataagctagaaagtagtatgatgtaatctctgtcctggatggagttttgtccaggataccatagaagttgcaagagatggcatccaagttaggtgtgaggctcagggaagatttccaaccggacttggaaatgagttgtattctcagagatgagtagaaataggccaagttgggaagggaagaaagggtggcccaggaaagacctggagctgagcaagggtgctagtgaggatgctgcctttgcaggacagtgggagagtagggttggagagtgggatgtgaggggaaggagcagcagacggtgaggctggacagaaagcaggagctgaatcctggtctctcttcctgtgctgaagaggttatgttttgttctgggaaacaggatgctatgagatctcaggagagggttgggaattgcagatttgcaggtgctgaagaggttgctttttgtcctggggaacaggatgctatgagatctcaggagagggttgggaattgcagatctgcaggtgtagatctcctacctggactttctcaacactggctgattgagtgagtccatgcccacaatgaactcacttgtgactcaagacaacagatagccatgagcatctatcaggcaccctggctgcctgcttgtcccactagctctctccatgtgacccccttctcccatgaccctcagttccagcctggtccagcttctgtggctcttctttctcctgcacccctcattgtctcatatctcagaagggttgctcttagatcccatgttcacttcttcatgctagatcagcattccttaatctcagcactcttgacatttgagctggacgtttctttgttgtaggggctcccctgtgtattgtgggaagtctagcagcatccctagcctctgcccactcttgccagcagcacctccccaccacacaactcaacacaagtcacggccatcaaaagtgtctcacacatgaccaaatgccccctgagggacaaacctatgccagttgggagccactgggttagattacagcaaaagcctccacttgcttctcctgccctggctgcagccctgcccctaccctgacattgaatgtggtcattaacccattgttcccagtctcagcacagacatcgatggctcctattgtctatcacaaaagccagactcttggccttggtacttgaggcatctcaacccagctccagcttgcggtggcttttccaggaatcatatctctactccagtagggcaggggagggagctgcttgaatcagacaggaaaagggaaaggaaattgaggtgttgattttgcttaaggcgtgactgcctggatgagaatgacataatttgctcaagtggcattttgcaaaatgttgtgagtaggggacacacatccctgtcttctgaatctgtgtgtgggcagtgctggtgggcagcagccagagtgttgtcttccccctttccctggggcaggagtgtgcttggtctgtttccagcagaacaggggacttttctggtacctgacacctttggctgcataaagaagtgggagaagaggagccaggtctctgtgggcctccgagaggggccctgcaatgctctggccctgaggagagttgtcaggcctttatttgaccagaaggtaatagtgcccatcccagctgaccttcctgtcatgtgaaaaaggggagggacagcagtcatctgggggcaactcacactcatcctgggcatggcctgtgggtgagtaaagcatcttctctggaagatggtactgagatgcccctcctctctgccttggagagaacaactgggttggtgtcaccacagtgtgaatgtggggtgctgggagaatactcctagacaggatgacgctcagtccacttcacagactgtaccacggcccagggaccattcctgctgggatgcaaggtggcctgatgctgggtgagacagagcccctgccctccagggcctacggcacgacttggatacatttccaagtaatctggaggtgttaaacccacatgggactgaaagaaatccacatgaccatgccagctaagataatctccctgagtatgtgtgcctatgtgtgtgtgtgtgtgtgtgtgtgtgtgtgtgtagcatacactctcataggactgacttatatggcctttctcttcttttcagtgtccgctcctccttcccatgtaaatgtcctgttttcccacttcccaaccccttctgctaacactgggctttgtcacattctctcctcttatggctgctttgcccccatcacctcttcctacctctgtcctcctacttgtcctgcctcttggcctgtccagagggagtcacatctgcccctcaaacccctaaacatggtttgttcagtcttctctgctcccacttcttttgcctctgagaggccatatcagggaagtgacataaaagcctgttaagtagatgttgctattatcccatcgtacagatacaggccgaggccaaaacaatgaaaccaagtcttggagaggttacccaaagtcatatcctaccaataacggtgaagatggatttggagaatctggccgcatatcatagctctgctcttgctgatgctggagagtcagggctggctctgagctcttttagacaagtgtaatcaggtgagaagacacctgcccctgaaattcctcttctaggttgtaaacattaaaaccataaatcagctccaccttgacaggggagagtggcaagagattcttcttcttggccagtttcaaaggacaatctttatgaaaagatgaacgaaggttgtacccccatgtcaaggtctcgggtggaggaccatgccagagagtagtcccctcccttatgttatgggcattgggacaagagcatgaatggaggctcctactcccaattccacaccagaatgtgggacacataccatgctggcttcctgtcttgcctgtccccatttcttcacaccctggctgcatatccaagctgggtcactcccaactaaatggtcccccttgggcctagggctgtgtactagggatatagtctaccctcagaggacacgctcaaaggcgaagaagcaaagccgcaggtaaagtaactggctggggatacaggaccatgtatgaacccagggatgagatctacataggtttttaaataaggcttggtccttttgccctggagactctagggtcctcaactgtggagtaaaagcaccagagaatgggagccaagggctgagttcagctttagctgcccacagtctctgcaggcaggtgagccccaggctctggggcgtcctcgttgttgaaaggagactgttttgtcctctggttctgacactggctcccgatgctgctccacccccagtcctatccattcctcacctgccttcccttcctctcttggctgacttgtcaaccttgggagcaaaatatttaatctgagtgtgtattgaagatgtcagaaaactgatgccttaggtgaaatgcgagagaaatacatcatccgtttgtaaacatgtgaagcccgagaaggttaacaagtttcctcttaactttattggactctagaaaaatatttgtgaaaggtagaaagaatacaggtgcaccaatctagtttccatcccaatttaaagaaaggggaaaaacataagatatatttttagctcgtccttttacctgtctcccagtgtgtgggctactggctgtggagcatgcaaggtgggtaccctgggtgggcaggtgaagataaagtctccccctaatctggactggcactggtgcctcgaggtgtgtgagcctgagtctgccggtgggacaggctgcctgcacaccaccctccctgcccgatgccaccctccctgcctgatgccaccttccccgcctgatgccaccttccctgcccgatgccaccctcccagcccacacaccaccctccctgcccaatgccaccctccctgcccgatgccaccctccctgcctgatgccaccctccctgcctgatacccccctccctgcccgatgccaccctccctgcccgatgccatcctccctgcctgatgccaccctccctgcccgatgccatcctccctgcccaatgccaccctccctgcccgatgccacccttccttcctgtgctttgtcaacacagtcttgggaatggctccatccctgcctccagtatagctcctgggcaggattccaaaggaaggtctgtaaggtcctctctcttcttgttggctccccctggtcaccatcgtgaacacagcagacagcaattgagcatttgctaatggaaagcaccactctgggataggtattaacccatttgttccttgcagtgaccctcttagagactgatgtcatcctcattttacatgcaagggaactgtggtacagagttgagtaactcgctcaaattcacaggttaataggcagctctgtggggattctagccctggtatcaccccaggatccaacaacatgacccagcgaagatgtactgagtgtgggctttaatcacacatataagtgtaatcttgccacatgggaggaaaggacagaatgggctggaaataaagaaaagaccccaaaagtgggttcatcaaagtttccaatggaaggaggtgtgtctaggagcccaccaggtcatcctgctgcctctggagaaaaagcctccaccagggagggactgaggcagaccccagcacagccatcagctcacttgtgctgttgtcacagttggtacaatcactgcagctgatgcttcagagagccagaggcatcacgagggcagttcatttgaattcaggctcatccattctagatgccttgtttgaagggagagcttcaaggctatgtctcagggaccgtggaggtacccagtatggactaagatgttcaaggccctggatacttggctcaggtctcacctcaccaaggagaggccaagttcagaatcaaccctggggtctgcttctggcattgccagagtaaccattggcccctttgatcctcagtttcctcttctacaaaacgggaaccgtagtggttatgagaattaaatagacaatgaatgtgaagcaactagcaccaggcctggcccttgaaagagtctcttacaagcagttgtcactttggctgtctaactacaacaaaaccagcagtgctgtcctgcccatgcctggtggtgtcacccctcctggagagagtattgacagatggggtaagggaggcttggagagactgcccaggtggtatgtgagtaatgccagggcatggttcagatacaggcctgccacctgcagagcccaagcccttcaggtgagactagggcttctaaccctcagcactactggtaatagggccagatccttctttgttgaggggttgtcctgtgcagcatgggatgtttagcagcatccatgaccccacccactggtggctagaaacactccttcacccagccatagaaccaaaaatgtctgcagacactgccagaggtccgctgagtggggagagtcgagagccgctgctccaggctgattgtttcttgcctaccagaggcaggggccctgggccattccaagagcagctcctctgcctgggcccaggctcgtcctcactcctgcctctttttttttttttttttttttttttttttgagacggagtcttactcttttgcccaggctggagtgcaatggcatgatctcagctcactgcaacctctgtctcccaggctccagcaattctccttcttcagcctcctgagtagctgggattacaggcatgtgccaccacacctggctaatttttgtatatttggtagagatggggtttcaccatattggccaggctggtctcaaactcctgacctcgtgatccacccatctcagcctcccaaagtgctgggattacaggcaagagccaccgcgcctgaccctcttttagttacctcttaagacaatctttcatccctgcttcgccatcctgtgcaagaccacaagccccaggctgggtgctgtggcccgtctgcatcccagcttccacagctatggccagactggcatctgctagagaaggttactgacccctgcctgtcccctccctgctcccaccagcagtggccatctccagacgtgtcctccaagcacagaaggttttaaggctgtctgacccagtcgatcccctcctcattcattggtgactcccctcctcctcagcccccagctggcctatcccagtggagggggcagggtcacccacaccaactaaggacagtctctgggttgcccttccatggctacagctttgggataggagggacggttcccggaccaaaccgagggttgagctgcttattctcatggcccaataatgagatgcagatgaactgggaaagaagagagtttatttctgtaaccgggcacagagagaaaacctggaaattatcaccagaccaactcaaaattacaaagtttttcagagcttatataccttctaagctgtttgtctacgtgtgagtgtgcattcatctaaagacataagtgattaacttcttctaatctataactaaggtctgagtcctgaagaccttctcctggagcctcagtaaatttacttaatctagatgggtccaggtgctggggtgattactcttatcttgtctcctgctaaatcatggaggtttggggagttccttcagaccccaataaaacttgtttgtggaggtctggggagtttcttcagacccctgataaaacttgtttaatcctaaacaggtcctgttaagaattccttcattatcttgtcatgcttcaaggcccaggaaaagcctagacaaactcttggtgggcttttgttacatataagcttttgtaaaagggcactggccctttcagcctttaacatttaacttacccactcagtcagggctgaaagttgtcttagaggcctgcctgttcagctgttagggagacctggcctgccacaggacctccatcatgggctaggcttttgccaggcccccaaacgaagccaccagcagagggcccagcactcagcgaatccaggccagacctgctgagcaacctctgctgccttcctggagtctgtttctgactgcaggattcttttaataaactcattcatcatggcccttctgggaagtctgacaggctgcagaatggaaatccgaaaatgctctccttgcttcccacctgtatgctcctgtttcctgcttctcctccctcctctcctctttcagatgtggccagacatcagccttcctctgggacatgacgaggctaagttattgaaatgccaggaaataccagctaatggaaagtccacttagcatgagggcttcattagctgtgcctgttcacacattctccttgggggtctttgagatgttttcatcaagtcccggcctggggacacaccagatgcccaaatgcatttcttcctgaaaggcatctgtggacaacaagggtagaggatgtcaaaataactgcccacccacccacccatccagcacttccagttttgggacccctaggatattaaaaaagaagaaatgccaaagtgggctctcaaaagaggcttttatatttaatcagttaatgcttttaacacaaaaaacacaatgtcattgtatgatggtgattgtaagataatggcaggattcatttttgaaatactaatttgtggttccctacagactctatagtcaggtaatgggtcagaaggaatgaacttagtctttcccttgtactgatctcagggcatatggcttcctggtagtccagctgttgcatttgaccttttggcccttctctctcctccccacaggccaaggaatattctaggcccaccttctagatcacattctggatatttaggacttcagaatcccccacccaaatggccccagcctaattcaaaaccctgcgtgggtctcatccctgggtttgtcctccgagggtggactgtgtctctagtacacatccccaggtccaagggagaccatttagaggggaatgactcagcttggatatgcagccaaggtaggggaagaaaaaggcggggcggctcaggctagaagccagcactgtgtgtatcctatggtttggtgtagaatcaggagtgtgggcctccattcatactcatggccgaattactctattagagagggcactattctctggcctgccccaccccagaccttggcaagggggtacaacctttgttcatcttttcataaaggttgtcattgggaactggccaagaagaagaatctcttgccactctcccctgtcaaggtggagctgatctttggttttaatgtctacaacctggaagaagaatctcaggggcaggtgtcttctccccggattaaggttatctaaaagagctcagagccggccctaactctccagcatcaacaagagcagagctgctggagaaagttggtgtgggggccacttgctggtgtatgactttggatagcctctccgagccttggtttcatcatctataaaatgaggataatagtaatacctacttaataggattcttatgaaaattaatcaatctgtgtaaagttgtcaggataatgctgggcacatcataagcgctcaataaatgtcagctcttattagcagcagcagcagcagcagcctggtcattgcaccacctctgtgcggacagacttgtttcccctttcagcttatcttggagaaaggcaaatgggatgtgtagaatgtgatggtcacaaggccagagaagaacttcttgatatgtcccaaggaatgtatctcatgactttttattatagaaaatttcaaatatctatagatacagaagtcgaatagtataaagaacgcccatgtacccattgccctgctgttaagaacaagactcaaggacagtcttgtttcatctatatttgcatctctccccagggagtactttctgatctaggtcttctcccaacaccaacagtttgaaaagggataaaagaatcctaatgcaggagccattctcccactaggccggtgagtcccagatcaagagagccaggcgtcattgtacagcaagtcaggttgactcaaggtggacgtattcaggacagcagaaggtcctgagcctgtgggagtggttcctccgaaccacccaggtcccagaaaacaattaaagctttcagcagcccatggaggtcaggagaggaccagggaccaggagggaagatggagaacgagagacagatgaccaccatgtctgcctgggggacaccttgtcctagagtaggaggctggcctgctaagtggactttttcattcttgggccaaggggaagtagccaatgagtaacctggtccagaggctcagggtcaacttgtttcagggatgtggtggaaacagatacagccctcaaaggatcctccgcagcttccccaggggacccaattcaggaatcatctttgcccccagacggaggcaaagrgtaaatattaccttattttacaacctgggggagaaaacgcttatgccagtactttctgccccactgacttaagaactgggaagtgcttgtggcttcataatccagttactctgtgatctctggtactttggaggaaaaatgttggaatcattcctcataatgaatgacacagcatgcccttcttcctgatgccaacagaactctgcttgtcaatccaatttctcagcttcgctccctgaaagagctcaggggccaaaagatctattatcctggcacatgcaccctcctgaaataatttgaatcctcataacattcttctttccctagacccttctttattcattcccttggaacacttgttccatttatccttccatctgcctcttgtcataactctcatgtgctctagtctcatgtgctctggacactgacttggactgcctttcaaagaacaggggagagtctaaagatatctggtatggaggggtggggagttgacctgctagatggctgcttgaaatgtcaagtgctgggaacagaccccctcgagatgttttctccaaacaaaaactgtggagcacacagctcagctggggttgttgttcagactcctgcccaaagcccagaattgttcaggactcccagaggcagcctgaatggcccaggcccaggccccttcatggggtggatggagatttccatggagatatgacctccgagtctctggcacttgagtagcattttccaaggtaaccttgatgatcattgcctactgggacccttggtgcttcttaccagcctgtgctaatcacacccgtaagtgtggttgtatcccaygagtggtggcttcctggatcctgaacaaaccttcctggtctctttctccccaggtatgggccttcacatacacccagmagatcctccaggaggagctgtgcctgtcagtcatcaccttgttccctggcgccccagtggttcttgtcctttgcaagaatggagatgacmgacaggtaagtgctcagcaggtccctgggatgtggccarctccgtaatgtgactgcctgttgagggcttagtctgatgagcaggaaaagagagaaattgttagaagaggaagagttgataagagaggtcaggagagggagggaaagtgctgcctgggatcccctctgtgatgctagcagcaatggcaacatccaccctcactggtcagcctgccccatgaaagcctattgatttccactgaccacaccatgcccagtcatcttctactttcctgtcattgctctgttccccacgtgggatcccaaacaaggatctcagggtcacaaggatgagcaagacttgacccttgccttcagggccctgggctctggcagtatgtcccccaaacttcctagcattctggatgcaccacatgcccagttcctctagcagcaaagtgatgtctccattcagtttcttgccaactgggtattggtgttagagagaacaagattcaaatgcctgttttatggtttacaggctgtgtgacccatggcaggttattggacctctctggatgtccatttcctcctctctgaaatggggttgagaatgtccactacacagggcagctgtgactgtctcttggcagtaacgtgctcagtgccctctccggggtgcttcccctgatgtgtccagtccctcctttgtcatgcgaggtcaagtgtgagaacctgctgcatgagacctgcctctctgctctggcccgtcgtgtgctgacacattttgaagaagcccccagcccctcctgccatcacactcgctgctcccagctcttccccacttctctgccatcgtgcagatgctgagtgtggatcgtttcttaggttgctcctgtgactaactcgcttcatgttttctgggctactgcttggaaagttattgcctcctaatgagttttcctagtaaacatattgattttgcttttaactttttttaatccaatttwaaaaaagaaaccaacaataatacctggtagagcaattagttgcagttttagtgcttatgaaaccatgaaatcaagtctctcagtgaccctagacatgaggcacctacctttctgataaagctggaactcccatgttactgatggcacctagttcattcactctcttstttgtcttaccagcaatggaccaaaactggttcccacatcgagcacatagcatcccacctctgcctcgatacagatatgttcggtgatggcaccgagaacggcaaggaaatcgtcgtcaacccatgtgagtcctcactcatgagccagcactgggacatggtgagctcttgaggacmcctgccagaagcagcaagggccatggggtggtgcttccctggaccagaacagactggaaactgggcagcaagcagcctgcaaccacctcagacatcctggactgggaggtggaggcagagccccccaggacaggagcaactgtctcagggaggacagaggaaaacatcacaagccaatggggctcaaagacaaatcccacatgttctcaaggccgttaagttccagtcctggccagtcattccctgattggtatctggagacagaaacctaatgggaagtgtttattgttccttttcctacaaaggaagcagtctctggaggccagaaagaaaagccttctttttcactaggccaggactacattgagagatgaagaatggaggttgtttccaaaagaaataaagagaaacttagaagttgtctctggacatctcttgctcttttcttcttttgttggctcagggctaagctgagctcttcacggaataggggcatggggtggggggcacctgtggcagagtggacaaagaagacagggagatgggagacctgtgcccttatcctgggctgccaccaactagctgtgggatcttaaaatgacatgtaacttctttgacccaccatttcctgttatgtcaaattaggagagtgggaccagatcaggggtttctttttttttttattattatactttaagttttagggtacatgtgcacattgtgcaggttagttacatatgtatacatgtgccatgctggtgcactgcacccactaactcgtcatctagcattaggtatatctcccactgctatccctcccccctccccccacccctcaacagtccccagagtgtgatattccccttcctgtgtccatgtgatctcattgtttaattcccacctgtgagtgagaatatgtggtgtttggttttttgttcttgcgatagtttactgagaatgatgttttccaatttcatccatgtccctacaaaggacatgcactcatcattttttatggctgcatagtattccatggtgtatatgtgccacattttcttaatccagtctatcattgttggacatttgggttggttgcaagtctttgctattgtgaatcatgctgcaataaacatacatgtgcatgtgtctttatagcagcatgatttatagtcctttgggtatatacccagtaatgggatggctgggtcaaatggtatttccagttctagatccctgaggaatcgccacactgacttccacaatagttgaactagtttacagtcccaccaacagtgtaaaagtgttcctatttctccacatcctctccagcacctgttgtttcctgactttttaatgattgccattctaactggtgtgagatggtatctcattgtggttttgatttgcatttctctgatggccagtgatgatgagcattttttcatgtgtctgttggctgcataaatgtcttcttttgagaagtgtctgttcatgtccttcgcccactttttgatggggttgtttgtttttttcttgtaaatttgtctgagttcattgtagattctggatattagccctttgtcagatgagtaggttgcgaaaattttctcccattttgtaggttgcctgttcactctgatggtagtttcttttgctgtgcagaagctctttagtttaattagatcccatttgtcaattttggcttttgttgccattgcttttggtgttttagacatgaagtccttgcccgtgcctatgtcctgaatggtaatgcctaggttttcttctagggtttttatggttttaggtctaacatttaagtctttaatccatcttgaattgaattttgtataaggtgtaaggaagggatccagtttcagctttctacatatggctagccagttttcccagcaccatttattaaatagcaaatcctttccccattgcttgtttttctcaggtttgtcaaagatcagatagttgtagatatgcggcgttatttctgagggctctgttctgttccattgatctatatctctgttttggtaccagtaccgtgctgttttggttactgtagccttgtagtatagtttgaagtcaggtagcgtgatgcctccagctttgttcttttggcttaggattgacttggcgatgcgggctcttttctggttccatatgaactttaaagtagttttttccaattctgtgaagaaagtcattggtagcttgatggggatggcattgaatctgtaaattaccttgggcagtatggccattttcatgatattgattcttcctacccatgagcatggaatgttcttccatttgtttatatcctcttttatttccttgagcagtggtttgtagttctccttgaagaggtccttcacatcccttgtaagttggattcctaggtattttattctctttgaagcaattgtgaatgggagttcactcatgatttggctctctgtttgtctgttattggtgtataagaatgcttgtgatttttgtacattgattttgtatcctgagactttgctgaagttgcttatcagcttaagattttgggctgagacaatggggttttctagatatacaatcatgtcatctgcaaacagggacaatttgactttctcctttcctaattgaataccctttatttccttctcctgcctgattgccctggccagaacttccaacactatgttgaataggagtggtgagagagggcatccctgtcttgtgccagttttcaaagggaatgcttccagtttttgcccattcagtatgatattggctgtgggtttgtcatagatagctcttattattttgaaatacatcccatcaatacctaatttattgagagtttttagcatgaagggttgttgaattttgtcaaaggctttttctgcatctattgagataatcatgtggtttttgtctttggctctgtttatatgctggattacatttattgatttgcgtatattgaaccagccttgcatcccagggatgaagcccacttgatcatggtggataagctttttgatgtgctgctggattcgttttgtcagtattttattgaggatttttgcatcaatgttcatcaaggatattggtctaaaattctctttttttgttgtgtctctgcctggctttggtatcagaatgatgctggcctcataaaatgagttagggaggattccctctttttctattgattggaatagtttcagaaggaatggtaccagttcctccttgtacctctggtagaattcaggtgtgaatccatctggtcctggactctttttggttggtaagctattgattattgccacagtttcagatcctgttattggtctattccgagattcaacttcttcctggtttagtcttgggagagtgtatgtgtcgaggaatttatccatttcttctagattttctagtttattggcgtagagttctttgtagtattctctgatggtagtttgtatttctgtgggatcggtggtgatatcccctttatcattttttattgcgtctattagattcttctctctttttttctttattagtcttgctagcggtctatcaattttgttgatcctttcaaaaaaccagctcctggaatcattacttttttgaagggttttttgtgtctctatttccttcagttctgctccgatcttagttatttcttgccttctgctagcttttgaatgtgtttgttcttgcttttctagttcttttaattgtgatgttagggtgtcaattttggatctttcctgctttctcttgtgggcatttagtgctataaatttccctctacacactgctttgaatgtgtcccagagattctggtgtgttgtgtctttgttctcattggtttcaaagaacatctttatttcggccttcatttcattatgtacccagtagtcattcaggagcaggttgttcagtttccatgtagttgcgtggttttgagtgagattcttaatcctgagttctagtttgattgcactgtggtctgagagatagtttgttataatttctgttcttttacatctgctgaggagagctttgcttccaagtatgtggtcaattttggactaggtgtggtgtggtgctgaaaaaaatgtatattctgttgatttggggtggagagttctgtagatgtttattaggtccgcttggtgcagagctgagtttaattcctgggtatccttgttgactttctgtctcgttgatctgtctaatgttgacagtggggtgttaaagtctcccattattaatgtgtgggagtctaagtctctttgtaggtcactcaggacttgctttatgaatcttggtgctcctgtattgggtgcatatatatttaggatagttagctcttcttgttgaattgatccctttaccattatgtaatggccttctttgtctcttttgatctttgttggtttaaagtctgttttatcagagactaggattgcaacccctgccttttttttgttttccatttgcttggtagatcttcctccatccttttattttgagcttatgtgtgtctctgcacgtgagatgggtttcctgaatacagcacactgatgggtcttgactctccaatttgccagtctgtgtcttttaattggagcatttagtccatttacatttaaagttaatattgttatgtgtgaatttgatcctgtcattatgatgttagctggttattttgctcgttagttgatgcagtttcttcctagtctcgatggtctttacattttggcatgattttgcagcggctggtactggttgttcctttccatgtttagtgcttccttcaggagctcttttagggcaggcctggtggtgacaaaatctctcagcatttgcttgtctgtaaagtattttatttctccttcgcttatgaagcttagtttggctggatatgaaattctgggttgaaaattcttttctttaagaatgttgaatattggccctgactctcttctggcttgtagggtttctgccgagagatccgctgttagtctgatgggcttccctttgagggtaacccgacctttctctctggctgcccttaacattttttccttcatttcaactttggtgaatctgacaattatgtgtcttggagttgctcttctcgaggagtatctttgtggcgttctctgtatttcctgaatctgaacgttggcctgccttgctagattggggaagttctcctggataatatcctgcagagtgttttccaacttggttccattctccctgtcactttcaggtacaccaatcagacatagatttggtcttttcacatagtcccatatttcttggaggctttgctcatttctttttattcttttttctctaaacttgccgtctcgcttcatttcattcatttcattttccatcgctgataccctttcttccagttgatcgcatcggctcctgaggcttctgcattcttcacgtagttctcgagccttggttttcagctccatcagctcctttaagcacttctctgtattggttattctagttatacattcttctaaatttttttcaaagttttccacttctttgcctttggtttgaatgtcctcccgtagctcagagtaatttgatcgtctgaaggcttcttctctcagctcgtcaaagtcattctccatccagctttgttctgttgctggtgaggaactgcgttcctttggaggaggagaggcgctctgctttttagagtttccagtttttctgttctgttttttccccatctttgtggttttatttacttttggtctttgatgatgatgttgtacagatgggtttttggtgtggatgtcctttctgtttgttagttttccttctaacagacaggaccctcagctgcaggtctgttggaataccctgccgtgtgaggtgtcagtgtgcccctgctggggggtgcctcccagttaggctgctcaggggtcaggggtcagggacccacttgaggaggcagtctgcccgttctcagatctccagctgcgtgctgggagaaccactgctctcttcaaagctgtcagacagggacatttaagtctgcagaggttactgctgtctttttgtttgtctgtgccctgctcccagaggtggagcctacagaggcagacaggcctccttgagctgtggtgggctccgcccagttcgagcttcctggctgctttgtttacctaatcaagcctgggcaatggcgggcgcccctcccccagcctcgctgctgccttgcagtttgatctcagactgctgtgctagcagtcagcgagactccgtgggcataggaccctccaagccaggtgtgggatataatctcgtggtgtgccattttttaagcccgtcggaaaagcgcagtattcgggtgggagtgaccty

SEQ ID NO: 93922 - DNA, 31191 bp, Homo sapiens
  misc_feature (1)...(31191): n = A,T,C or G
aggggcccagatttctgtgcagctagttgcaagtaaaggaaagtgtttccttaggggcagttttgttctgaagtgaccttccaaatctgatgtataaagtgaggcctacagagtattgtgaggcttggagtttttaactgttttattaaggaagacttttttttttttttttgagacggagtttcactcttgttgctcaggctggagtgcaatggcacgaggctcattgcaacctccgcctcccagtttcaagtgattctcctgcctcaggctcccgagtagctgggattataggcatgtgccaccatgcctggctaatttttgtatttttagtagagatggggtttcttcatgttggtcaggctgctctcgaactcccgacctcaggcgatcctcccgcctctgcctcccaaagtgttgggattacaggcgtgagccaccacacccggccctaaggaagacatttagtaaacaatatatgctaatgtagaaagctctgaaaatatggaaaagtctaggtaacactaaagtctcctatagacctttttaaaggactcgaaccagtaggtgtcttgttagactcagctacctagaacagagtttaatgaagatgaagagatttggcttttcctggatatgtaaattatgtatatatctaaatttcagtgagaaaagtctccaaattcatcaaaatcaacctcttcaaactttctcatcacactcactatatggagagcctggaacataaaacggctgaatgagcaaggacagttggggtcatccatcagttctgagctaggccagttctgacctcagccagcccttaagggaagggaggtcctactaagctatttggggggtgggtggtattgggagttagccatgacccacagacctctggttccttccttcagtgcagctgaaagactcagctaaaccacctaaaaaggaacgcaaagtgtgcacatctctgatacctcaggatgccttccaccccacctttccccaaatgcttgtccacattatagggagcagcaccctccggtacccaaaaggcccagctggcatggggatcacatgggatgcagaggcactagagaggcagagccgactctccattcggtggtagcaaatttcacctgtggggaagcccaaccatcccagttcccaccaagggcccaagcccgtgtctggaagctgccccctacacccaaacccgctggccagagcggtggacccgcacccacctgaagcacacatgcccagtagtagcccaagtagagggcaacggcaagagccaagagcagagagaaggtgtctgcccaggtgccattctgggggctcaggaaggagctcagcatcttgtgttgggggcttccgaccctcaggctcctggctggccccagttggccggctgtaactcgcggtcccacccgccgcccgccataggcggcctgtgcaggtccggtccccgctgcaggcagtttgcgctgctggccccgcccaccgccggtgccccgggatgggcggcgagaggcggcgctagttggtcgcggggctgggtggctggtcgcctagtgcctcgcgcggatctaacccgagtgacctgcgaatggcctcccgccctcccctgccttcttcccctccgcggttcttggctgtgcagcccgagacaagcggcctcccccagctgccatcttggtgcggggcatctccagctcccttaaactcttccccggcgacgccccgagtccagcagcctggccagagtcccttaggcgctcgcagtcagtcacgcacaggacacagctactcctgcagtgacattctgctctgtcacacactacagccattcacagtgaccctcaccagtcactgtccgactgtgacaccccacactgtcacaaagctttcagctgctcagtggtggcattgcaacacatgcaccttcctgcagtgtcactctgcattgtctcatacagtccctgccacacagtcctcgtacagtagataatttgctcaccacccgccctgtaccaggcacttgatacagaccccccatgttactgtccgtgtcttcattgaaatataggaggtcgtctactaagagtagtggctttcaaccttgactgcagatcggaatcatctaggatttttaaaactaccagtgcccaggccctacccccgatacagttagtctggagaggagcctaggtatcaatacaccgtaaagcttctaggaggtccacaagtcatcagggcttaacatggtccacacaagagaagtaccagctgccatgggagcactgcggaggtgcccggacttcacgcgagggtgttctagcagagggggcagcaaaggcaaaagcctggaggtgaaggatgtcttaagggaacaaagaaagttggtgtggctggagcatgtgggtggtcaaggaccacataattgctgcagtttatcctagggtcagaggaaagccatccaggggttttaagaagggaagggtgacatgagttatgttttaggagaatcattcagttgcttggagaatagattggaggaggaggaaagtagaagcagagaggccactgggaggctgctaacagaacgccaggctcaaaagatgcccggactggaggatacccaggagaggagtgaagatcttcaagatcagtggcagaattgataggacctggtagtagattggaggcaggggaagaaggaggaacatggatgacctccaggtttctgactgcacagatataaagtgtccatccctgggacagggaaacagaggagaggaaggtttgaagaggaagatgatgcatttagacacagacatgtagaagttggggtgctggtaggtgttttaactgtgtttccttaggttctgtatttgtctatttggcatccataaatcacagggccaacctaatggccaaggttgtttacatctcccctacaatccagagctcacactctgagcacttcctttctctaactttcacattccaagccagtatctcccctgccctaaatcaacccaggaccaggtaaccaggacctgtccctgtgccccagagcactctggaattattcaaactagccagtcccaaactgcttctcctgccttactgggagaagtaaaccccaataaaggcctgtaccttcccttcgcttctttctgcctcctgagtgacactggcacttccccctgtgaccgtgccttttgtttctaggggaactgcaaataacattaagcttttctttcaatagcagtgacctcttcatgtcctcactcagccacctttataaattaaaactcaggcacaaattagtaggatattcaatgcctgaagtggcctggggcttagagattggaggtggagaattggcaatcatcagcatttaggtggtgtattagttggcagtttgctgtaagaaagcactacaaactgggtgtcttaaaccaggggtccccaaccccctgggctgcaaattggtactggtccatgacctggtaggaaccaggtggcatagcagaaggtgagcaggatgagcaagcattactgcctgagatcagcagtggaattagattctcataggagcgcaaaccctatgtgaactgcacacaagaaggatctaggttgcgtgctccttattagaatctaatgcctgttgatctgaggtggaagtttcatcccaaaaccatcaccctcacccccaacccttctgatctgtggaaagattgtcttctctgaggctgggcacgtggctcacgcctgtaacgcccaatgctttgagagttcaaggcaggcggatcacctgaggtcaggagttcgagaccaggctggccaacatggtgaaacctcgtccctactaaaaaaatacaaaaaaagaaaaaaaaaagaaaaaaaaaaaagattgtcttctctgaaactggtccctggtgccaaaaaggttggggactgtcttaaacaacagagatttattgtctcacacttctggagactagaagtcaagactgaaatatcagtagggtgggttcattctgggaaccgtgaggaataatctattccatgcctctcccctggcttctggcattttgctggaaatctttggcactccctgactggtagaagcatcaccctgatctctgtcttcatcttcacaaacatcttagtgagtttgtgctgctataacaaaatcccacagactgagtaatttacaaacaacagaaatttattcctcacagttctggagactgggaagtccaagatccaggcactggcaggttcggtgtctgtgaaggtccattcctcagagatggtgcgtctgggtttcctcatgtgatggaagggacagaaaggcaagagagcaagaggggtgaactctctcagaaacctctttcataaggtcattaatcccttcatgaggggagagccctcatggtttcatcatgtcccaaaaggccctactcctttttggtttttttcagaggcaggatgtcgctctgtcaccaaggttggagtgcagtggcaggatcacagctcactgtaacctcaaattcctggactcaagggatctgcctgcctcagcctcccaaatagctgggactacaggcgtgcaccaccatgcctaatttttatttatttatttattgtagagacacggtctcactatgttgcccagactggtcgaaaactcctggcctcaagagatcctcacacttcggcctcccaaagtgctgggattacaggtgtgagccactgtgcctggcttcctcctcttaatatcaccacaatggggactaagtttcagcacatgaatttggtgggatattcaggccatagcaatgttcttcctatgtgtgtgtctgtgtccacatttcctcttttgatatgaacaccagtcatattgattaggggcccaccctactccagtatgacctcatcttaatggattacatctgcaatgaccctatttccaaataaggtcacagtctgaggtattggaggttaagacttcaacatataactttgtgaaggacacgagtcaatgcataacagtgatgggagctaggtgagcagatgagcacatgagcagatggaaagtgaggagagggccctgaggaactctgacggtgaagaaaatggagacctttttgaaatgaccagaggtaggagaggtattgccgaaaccagcagaatccgtgatctaaaaaggcagtgacaagcagtgttcatcactgggaggaggacaggatgagagtgggcttgtcgctgtgatgacagtgtcgctgtgatggagtgtcacaaacaactcaggaagagttcaccctgacaccccaatacatatgcctctaacactctgcaccgccacacccctgggcagtcagtcacacattggccataccctgaagcccacactatcatttattttttatttatttatttatttattgagacggagtctcagtcttgctttgtcacccaggctggagtgcagtggcgtgatctcggctcactgcaagctccaccacccaggttcatgccatcctcctgcctcagcctcccgagtagctgacactacaggcgcccgtcaccatgcccggctaatgtttttgtattttcagtagagacggggtttcactgtgttaaccaggatggtctccatctcctgacctcgtgatccacccgccttggcctcccaaagtggtgggattacaggtgtgagccaccacgcccggcccctgaagcccacactatcacacggatgcacagtcacacaaaataccccctaccgtgtcacaaattcctcatacacagagccacacatgccagtcacaaccgcacatgctaacagtaagttaggttccattttgtcacatacatctgggtccctcaggcagagaaagtggcaaccaaagcatgagcacagttaaacatacttctgatgcacactggcctcactgtctcttggtctctctgtactcacatgtgtgcatacaggcacacgcacacatccgcgcacacatgcacgctcacacacgtgcatccttacacatgctcacactcacgctcacaatgtcacacgcatgtgcacacccgcacaagcacacgagcgcactcacgagcacacgcggactcgcacacgcgcacatgcgcactcacgcacgcacacacgcgcacactcacacgggcgcgcgcagcccctccggccgcgggcgcagcgggggcgctggtggagctgcgaagggccaggtccggcgggcggggcggcggctggcactggctccggactctgcccggccagggcggcggctccagccgggagggcgacgtggagcggccacgtggagcggcccgggggaggctggcggcgggaggcgaggcgcgggcggcgcagcagccaggagcgcccacggagctggacccccagagccgcgcggcgccgcagcaggtgggtgacaccccgccccggccggccggagacccgagcccatcgccgtcagccagccagggccgcgcggggtaggtggcctccagcctctggtccagatcccgagagcgcagtccctctgcatcccctgcggctcagacgcggcgggagcagtggcccttgcccctgtgtaccctgagggcaggtggaggaagggactggagagcgagcctgaggctccttggtgtgaatttggggcttcgcagttccccaggcgcttcccccagccccgcattccgtgttccagcagtcctgggggaggggcagctggcgggagctttccccctcatccgacggggaagaaatggagcgctggggagggcccgaggctgtcgtccgcttgcaggtggccgagggaccagctcccgggtgtgggctcctctagccctgtagccgctgtctcctttcttgggggatgggtgctgggaggcacaagggcaccagagggataaattaagaattaagggagaggattctactcaaaattttagcttcccaacagttcgactctacaggagatggaactgccggcctgtgaggtgctaggttcctgtcctggaatgattcaagcagaggccatttgacagggttgctgaggaagaaatttttgctttggatgggaagttacccaggataaccctgcaaggcccctgccacagcccagaggctctgaaatacccaagcagcacctgcttggtgccaggcacctaccctaagttttctcattgcagcctccccaaacctttaggagacagataccgttatcctcatttttaaaatgcagatcccgaccaggagcagtggctcacgcctgtaatcccagcactttgggaggccgagacgggcggaacacgaagtcaggaaatcgataccatcctggttaacacggtgaaaccccgtctctgctaaaaatacaaaaaaaatttagccaggcgtggtggcaggcgcctgtagtcccagatactcgggaggctgaggcaggagaatggagaatggcgtgaacccgggaggcggagcttgctgtgagccgagatcgtgccattgcactccagcctgggcgacagagcgagactccgcctcaaaaaaaaaaaaaaaaaaaaattcagatcccagggctcagagaggttaagacacctgcctaggtcccacagtgagtagtatcagaggcaggatttgatcagaagtctaacctgtagagcgtgctctcctcccatgcactggtgcaaaggcttgaagaacactggggccggagggtcattgtgaatgtgtgagtgcacgtgtgtgacataactttattaaattacatggcaactgttaacagttatggtggctttcatgtgtttattarggtaattatgttcatgcacattatagttatagaaaatggttagggacatttttattggacaggcagtggttcaataactattttatttctctcacaaaagcttttgttaatgtttagaaatgtctaagtgtcaacacatcgcactaacctcattacacattacatgaggtgtcttagcctttccttaaaccactgaggtgggttacttgcactaaaatgtcacagttggaagcattacttagaatattggccaggtgcagtggctcatgcctgtaatcccagcactttgggaggccaaggtgggtagatcacttgatcaggggttcgagaacagcctgtccaacgtggtgaaaccccgtctctactaaaaatacaaaaattagccaggtgtagtggtgcacacctgtaatcccagctacttgggaggctgaggcaggagaatcgcttgagcctgggaagtggagactatggtgagtagattttgcgccactgcactccagcctgggtgacagagcgagactctgtctcaaaaaaagagagagagagagagagagagagagagagagagagagagagagagagagagaataggcctggcctggtggctcatccctgtaatcccagcactttgggaggccaaggtgggcagatcacctgaggtcaggagttcaagaccagcctggccaagatgccgaaaccccatctctactaaaaatacaaaattagcaggtcatggtggcacatgcctgtaatcccagctactcgggaggctgaggcaggagaatcgcttgaactcgggaggtggaggttgtggtgagctgagatcgcgccattgcactccagcctgggcagcagagtgagactctatctcaaaaaaaaaaaaattatactgaaagtccacatcatttacttttttttttctctctctttttttgagacagtcttgctctgtgaccccagctggagtgcaatggcacaatcttggctcattgcaacctctgcctcctgggttcaagcaattctcgtgtctcagcctccgaagtagctgggattacaggcacgtgccactgtgcctggctaatttttatatttttagtagagatggggtttcaccatgttggccaggctggtctcaaactcctgacctcaggtgatccttccaccttggcctcctaaagtgctgggattacaggtgtaagccaccatgcccggcctttgtttttttttttttttttggtggcatcttgctgtcatccaggctggagtgcagtggtgtaattatagctcactgcagccttcaactcctgggctgaagtgatcctcctgcatcagcctctcaagtagctgggaccatagatttgagccaccatgctgtctaattaaaaacaatttttgtttgttttttttagagatggggggggtctcattttgctgcccaggctggtctcgaactcctggcttcaagcaatccttttgccttggcctgcgaagtactgggattacaggcgtgagccattgtactcagcccaatcacttgcatttttgaggtgggctataaccgaatgctaaggttgtcaggagggcccaggacattccagattgaggatggaacaggttgggcaaaagcactgaaaagtgaaagtggaaagtattttaggagactccaataactccttggtttgaagcagtgtgctatcataatacagcactggaagatgagtcaacagtaacttgatatctgattgtagaaggccttgaatgcccaggtgaagattctggactgtaatcgaaatagggagccactgaaggttctagagcagtggaattctagcaaaggatgatttatctgatgtgggtgtggagggttctttaagtggagaaaataccagagacagggataacactaaaaggcttgtatattagtttgtgccagaagtaattcattattcatttaatgttcactgtaaccctgtgaggtaaatattatctccagtatgtggataaggtaactgaagtttagtgagaaaaattaatttacccaaggtcacagggacactcagtggtggagcttgggtttaaaagtaggtctggctgtttccaaagctctgttttctgtccattaaacatactgaagagttaaatatatgaggggtacataggaccaagaagaggagagtgatagtcattcacggggtaggactcaggaccaggtgcataatttgcagggctcggtgcaaaaatgattgagagtttcaagatagtgacaacagagcattagcctaagcacagggcccctctgagagcggggaacttgtgacttcacaggacgcacacccatgaagccagcccttacatggttggttttccaattactatggcagtgtaacaaaccacctcaaaatgtaatggcttaaaaggataatgggcccagcatggtagctcatgcctataatcccagcactttggaaagccgaggcaggaggattgcttgagcctgggggtttccaatcagcctgggcaacatgtgagaccctgtcacacacacacacacacaaaaagataacgttgatgttgactttgcacatgagtgcaggctgtggagacaagcacatttctactgcattcagtgttggctggggcagctcagaggctgggggttagaattatccggagcttggctctctcccctgtctggttgttgggctgggaagatttgagctggaggcttctcaggcatctgtttctaggtgggttctccacactctctcttccgtagggtggtttcggggagaccaggctccttccatggtggctcaaggttccagaggtgcacatctgtgtgtcaagtgaaggggagaaccagaaccaggcataagctaggtcacttttattacttggacttggaagtcatgtaagcaccatttcagcaactcattagaagccagtcactaagtccagatcatatacaaggggaggcgagttagactccaagttttgtgggaaggaatgtcaaagaatgtgtagacaggtttttaaagctaccacagtggcctaatgagtgagaggatgagtggatctgaggggtgcttcccctttatgcctgaacggctccccccagagtcatcctttggagttcacagacatcctcctttaaaaggcatctgagggccgggtgtggtggctcacacctataatcccagcactttgggaggctgaggcaggcggatcacgaggtcaagagatcgagaccatcctggccaacatggtgaaaccccgtctctactaaaaatacaaaaattagctgggtgtggtggcgtgcacctgtagtcccagctacttgggaggctgaggcaggagaattggttgaacctgggagacggaggttgcagtgagccgagatcacgccactgcactccagcctggtgacagagcgagactctgtctcaaaaaaaaaaaaaaaaaaaaaaaggcacctgctagtatgtaagaacacgtgaagkctggatgatgagttttgacagctctgagggatttaaatgactccagtgcctcctgtcggcctgggtcctagcagtaaacagatagggtggagaaagcaatttgagaggagccaggtgggaagggggtgtgtgaagccactgtggggccgtgcagatgaactcttggaaggaaaaaggccttattgtagatcaggcactgcactttacacatcttgtctcattaattaaaccctcaccacagccctgccagaggtgctctcgtcagccccgcattacagatggagaacctgaagcacagaaaagccgcacagctagtgggctgcrgagcccagatttgaacacaggcagcctgaggtcagggcccataccccccaactttgggccgtaccacctaktccatagcaattctgtgtttttcttgcgttaacatttgtatcttttcctacttacrtatttgcaagctttagggggaaaaagaaaaagtaattcgaccttaagagatcagcttagtgataagagagtgcctcacatatggcaggtgttcaataaatattaaagaaatgaatatttatccttattgtacaaacttatatctaacttgccttccctacggatgcttgccctctggtctttgtcatgtggcagctgttggtgctttccatggtattctctgtggcacccaggccagggagccagaacttctggcattctcctggtcaactggctctctcagccattaggcacccctccttccaccttagagactggaaccctcagctgacctcagcccccttcttcaaaccagcagcactctagatacaaagaactgggagaggcagccctctctctgcccattcacccagaccctccttcagctgctgcttcctgacctcccaggcaccctgtaggcagggccttctctctaaccttcctggaaacaaggcactcatctctgcggctcctggaccccattcagtacccatagggtttctagggagatttctgtcttctacttcctgctgaggcccaggtggtggaaccccacccttctggggacccgggaagcctccacacactagcggcaattccttcagttctctgtcacttgtctcctcgaacgtgatttgtggtatatttcatgacacagaagtttaaacttttgatatactcaaatctgctcattttttccttttaaactttctgagttgatgtattatatttaatggttctatcacataatrtggtttgttcagccattgcctaaatgttagacattcaggttgcttacatttgtttgactaatattaatagcacagctatacatatctttgtaatttcttttccatttatattcttttatgtaatccccaagacgatattgttgggtcagagttttaggaaattaatacacatttccagactgctctctaaaaacatttcaggtttatagttccagaagcagtaaaggttaatactcactgattcagtttccttagtgattgtaagactatcaaagcttatttctttttgcatcagttttgctattaagtttttctaggaaattggccatatcctctaagttttcaaatctctgctgtttctttagttatgtccctattttccttcttaatattgtttgtgccttttctatttgttcttttagtctttggtttatttttttctgaaatggggtctcactctgtcacccaggctggagtacagcagcacaatcacagctcactgcagtctcaacctcctgggctcaagtcatccttcacctcagcttcccaagtagctaggactacaggcgtgcaccaccacacccagctaattttttaaaattaattttttgtagagatgggggtctcactatgttgcccaagctggcctccaacttctgggctcaagcaatccttctgcctcagcmtcccaaagtgctggtgagaggtgacagtgtgtgccctcgctcgttctcggcgcctcctcggccttggcgcccactctggccgcgcttgaggagcccttcagcccaccgttgcactgtgggagcccctttctgtactggccaaggccggagccggctccttcagcttgcagggaggtgtgtagggagaggcgcgagcgcgaaccggggctgcgcgcggcgcttgccggccagcgcgagttccgggtgggcgtgggctcgggggcccagcactcggarctgccggccggccccgccggccccgggcagtgaggggcttagcacctgggccagcagctgctgtgctctacttctcgccgggcctcagctgcctccccgcggggcagggctcgagacctgcagcccgccatgcctgagcctccccactgccgtgggctcctgcacggcccaagcctcccaacgagcgccaccccctgctccacggcgccctgtcccatcgaccacccaagggctgaggagtgcgggcgcagggtgtgggactgacaggcagctccacctgcggctccggtgcaggatccactgggtgaagccagctgagctcttgagtctggtggggacttggagaacctttatgtctagctaagggattgtaaatacgccagttggcactctgtatctagctcaaggtttgtaaacacaccaatcagcaccctgtgtctagctctgggtttgggaatgcaccaattgacactctgtatctagctaacctagtggggacgtggagaacctttgtgtctagctcagggattgtaaacgcaccaatcagcaccctgtcaaaacagaccactccgctctctgtaaaatggaccaatcagcaggatgtgggtgggggccggataagagaataaaagcaggctgccagagccagtagtggcaacctgttcaggtcgttttccatagtgtggaagctttgttctttcgctctttgcaataaatcttgctgctgctcactctttgggttcacactgcctttatgagctgtaacactcaccacgaaggtctacagctttactcctgaagccagcgagatcacgaacccactgggagaaacgaacaactccagacgcactgccttaagagctgtaacactcactgcgaaggtccgcagctgcattcctgagccagcgagaccacaaacccaccagaaggaagaaacttcgaacgcatccgaacatcagaaggaacaaactccagacacgccgcctttaggaactgtaacactcaaccgcgagggtccgcggcttcattcttgaagtcagtgagaccaagaacccaccaattccggacacactgggattacaggtgtgaaccacaacacctggctctctttgttcctaattgaaattgccaaaggtttgtctgttttactaggcttttgtttctttgwatatatatattttttattttactagtctttttaaagaaaccacccttgtttggctctgttgcttctctttattgtgtttttaatttctgctattatttcatttattttaatttctttaagtgtagtctcttttattagtgctgtttttgttatttttgggtttgtgtgtgtgtgtgtgtatttttttggagatagtctgactgtcaccgaggctggagtgtagtggtataattgcagcttactactgcctcaatgtcccacgttcaaatgttcttcccacctcagcctccctagtagctggatctacagatgtatgtcaccacacccagctaatttttttaaaaattattttctgtagagacagggtgttgcccaggctggtctcaaactcctgggctcaaacagagactatgttgcccaggctggtctcaaactcctgggctcaagtgatcctcccacctcggcctcccaaagtgctggaattacaggcattagccacacacccagcctttactttttatttcttctttttcatcttttcctgcttttatttcttctttttctgcctttcttttagttcagtttttaaaattccattaatttttttctactggtttgaggctatacattccagttctaattttttaatggttatccttaaaattttaacatgcttttttttttyttttttttttttttgagacggagtcttcctcttgttgcccaggctggagtgcaatggtgtgatctcggctcaccacaacctccgcctcccaggttcaagcgattatcctgcctcagccacccaagtagctgggattacaggcatgcaccaccttgcccagctaattttgtatttttagtagagacagggtttctccatgttggtcaggcagatcttgaactcccaacctcaggtgatccgcccacctcggcctcccagagtgctgggattacaggcgtgagccaccgcgcccagccttaacatgcatatttaacaaagttcatcaatatgtctactctcttcccaaacagccatctttgctttacatgtcattgtccaatattgtagttcagaccagcttttttgcctcatatattaacataattagcattgtttaacagtctatgtctgtttagatttagccacatactttgtgatttctttgctccacatgttttcttgcatttcaaaccctttttttttttttttaagacagggtcttgctctgttgcccaggctagattacagtggtgtgatcagagctcactgcctccttcacctcctgggctcaagcgatcctaccacctcagcttcctgagtagctgggactacaggcacaccccaccatgcccggctaattttttcctattttttgtagaaatggagtctcactatattgcccaggctggtcttgaactcctgggctcaggagatccttccacctcagcttcccaaagtgctgggattacaggcacgaactcatatccagctgaatttcctttaatgaaggaatgttagtggcaaattctctaagttatttgcctaaaattgtttttacaaggtaggaggattgcttgcacccaagaccagcctgggcaacaaagttgagaccctgtctctaccaaaaaaaaaaagctgggcatggtggcacattcatgtcgtcccagctacttgtgaggcaggagtgggagaattgctatgatcatgccaggagttccagcctgggcaacagagtgagaccctgtctctaaataaataaataaataaatttgcttcacctcattctgcaagataattktgctgagaatagaattctagaatatcaattttctcccctctctgaacacattaaaatactatattactgtatttgggcatcattgttgatgtcaagaaatcagctatcagtctaattacttttcctatgagatgatttgtcttttctttctgactgcttttacaattttttttttcttgagtgttctattttagaaaaataggtctaggtgagaatttctgtttatttaatctgcattgaattgttgggcttcctggattggcatattccagtgttttgcaacctactggaaaaatgtcagctattatttcttcaaatactgcttttttccagttgtatctcttatcttctccatccaccttgccacttaacctctgttttatattttctatgtctttgactcaatgaactgcactctggataatttattcagatctattttccagttcattaactctcatatcagttgtgtctaatcaatttaactcacccgttgcatttttatttttattttttattttatttatttttttaagacagtctcactctgtcgctcaggctggagcgcagtggggtgatcttggctcactgcaacctccgcctcctgggttcaagcgattctcctgcctcagcctcccgagtagctgggattacaggcgtgtgccaccaagcccagctaacttgtgtatttttagtagagacggggtttcaccatgttggccaggctggtcacccattgcatttttaaaatcaatcttttatttctaaaagttatgtttgtttcctcttcaaatctacttggtcatttttatgctcttatttctttctttctttctttttttttttttttttgagacagagtctcgctctgtggcccaggctggagtgcagtggcatgatctcagctcactgcaacctctgcctcccaggttcaagtgattcttctgcctcagcctcccgagtagctgggattacaggtgcccaccaccacgcctggctaattttttgtatttttagtagagacggggtttcaccatgttggccaggatggtctcaatcacctgacctcgtgatccaccagcctcagcctcctaaagtgcggggactacaggcatgagccaccacacccggcctcttttttttttttttaaaacatactgttgctggccggaaaactcttatttcttcctcatagtttcaagcttccctttaatttcttaaaacatgtgaactggccgggtgcggtgactcatgcctgtaatcccagcactttgggaggccaaggtgggcagatcatgaggtcaggagtttgagaccagcctgatcaacatggtgaaaccccatctctactaaaaatacaaaaattagcagggcgtggtggcacatgcctgtaatcccagctacttaggagggtgaggcaggggaattgctggaactcgggaggcagagattgcagtgagctgagattgcaccacggcactccagcctgggcaacagagcgagaccctctctcaaacaaaacaaaacaaaacaaaaaaaatgtgaactgtatctgctgtatattctgtgtgtaacaattccaacacagcttttccaagtctacttttccctgctattgttttgctggctcttactcagtgtcttatttctttgtatgtttataacgttttggctatgagttcrtattcctggaaactttacctatggaaattctttgaggcctggattagagttgctccagagatgtgtgttttcctctgccagtcatctgggggtgccatcaaccaggttgcacttcaaaatacattacctactttagatgttctgaccatacaggtagcattaataattcaggcttcaaacccacattagagggcaggcgcagtggttcatgcctgtaatcccagcagtttgggaggctgaggcgggaggatcacctgagatcaggagttcgagaccagcttggccaacacagcgaaactctgtctctagtaaaaatacaaaaaattagctgggcatggtggcacatgcctgtagtcccagatactcaggaggctgaggcaggagaatcgcttgagcccgggaggtggaggttgcagtgagctgatatcatgccacagcaactccagcctgggcgacagagtgagagagactccatcccagaaaaaacaaaaacaaaaaacccacattagatcaggcttgttatagagtctcagggagagttttttttctcccttctacacagcaccaaaatcaagaaaggcaaaattctttgctgcccttcttcatgacaaatttactttttgttcatgttcagagtgtagctgtttggaatcccagctttacgtagggaatctcctgttagtctcttcatatcaggtgggcccaggtatcatctctggtctcctttacagcacaagcacactgacaggcagctcaagttcacctgggtttggtttggcagatactcctaaggcaaaagctaatgtcaagctcactttcccccagattactgttttcactgcacatttgtactgttgaggatttcttgccaacccagtgcttttgaaaagatactttctatttttatccagctttgtggttactttcattgggacatttactattacactcccagaagtggaagtctgaatgtttttctagtccatcctttttctgggctgtgaccctttgacggtttcatgttgatacagagatctcagttccaatggcctaccttgaacgggcccaggaccttgtcttctcttccaggtgcaacgactaaaaccctaggatttatgttgccagctgatgttggtgaatacctttagggcagctgtggcttcagcatctatttttggctactggggcttatagacaccaacaaattatgtatactcactttatctgttgggccagttgtatgcatagaaaaatgaagacgggccaagtgcagtgcctcacgcctgtaatcccagcactttgggaggcccaggcgggcagatcacctgaggtcaggtgttcaagaccagcctgaccaacatggtgaaaccccgtctctactaaaaatacaaaaattagccaggtgtggcggcagttgcctgtmatcccagctactcgggaggctgaggcaggagaatcacttgaaccagggaggtggaggttgcagtgagctgagatcatgccactgcactccagcttgggtgacagagcaggactccttctcaaaaaaaaagaaaagaaaaaaaagaaaaatgacaggttctgtgactctaggtagcttcatcttcttgtggacttccatgtttagctagttttcccttaaggtagctttaaaaggcagaattttgtttatcttcccattagccaggtgcttacctgctctacccctcatctcttaggaaatggaagtccatcctggcagtggttctgaaccttattagggtcatgggttgcttggagaatctgctgaaagctatgaaccttcctctaggaaaacccagtgtcagccagatggggatgttcctgatctctgctagaccatcaagcatctgacgatttttctttctagagatgggcttggggtctcatgccttggctttggtgggcttctgcttcctcaggaactcacactacctgtacataccctgggactcaccagaaagctttaggctctgtttgattggtccattctatccttgactgttttcatatactcaagtggttgattttgccaatgggcctaagccatgtcagtcttaggggaagtttttgttttttcctttatagtgggtctaattttcctaactgcatttagcaaatagcaattcctggggccactgttggtctgaccctgatttattgtgtttgcagtttgtacttgagtttagacctatttcaagaagtctgcgcctcttttgatttgttcttcagtgggtttttaataaacacaaacmgtccatttctctttttgcctgtgtttaagtcttggtctttttgtgactccctgcgtttcttacytggcctttttcttaaactttctgcgctcctttccatctgtaagatgaatgggctgaaggaggtcagatatgcttgcgctgtacttctctgggcaccttggcacctagtggggagcaagggaatggggcgtggggtggggatgcgcccccagctctgcttccgccacagcaggcctgcctttatgtgctttatatayaagagctggagtgacatttattttgagcatagttccatgggatccctgctgtctgtctgtgagtcctccctgagcaggrgtcctgtctttggggctgcaggtagaagcaggcagaaaatgcgcttgtgtctaacccagcccatctgtgacacggtggcagacgcctctttcccccracccctgattctcttccttgttccagttccaggaaggatgttacctttgacgatgacagtgttaatcctgctgctgctccccacgggtcaggctgccccaaaggatggagtcacaaggtaacagggttatgagggcagggccaagggctgggaggagggaaagtctctagagaatccaagggtgtggtgggccctctgggaggcaggagactggggtgtaggttccccgatctctgtatctccctgccatcagcctcccatcttgtgcctgtcagagtgccacaaagtgggcattcagtacatgcttgctggacccatttggaatcagagaactcagctccagtgcatcatgaagaacagggaagaagctgtggcgccagagaagtgggggctgcaattgtttgtttgtttgtttgttcttgagacagagtcttactctgtcgcccaggctggagtgcagtggcatgatctcagctcactgcgagctccgcctcccgggttcaagcaattcttctgcctcagcctcccgagtagctgggactacaggcgcccgccaccatgctgggctaatttttgtatttttagtagaggtggggtttcaccatgttggccaggctggtctcgaactcttgaccttgtgatccgcccacatcggcctctcaaagtgctgggattacaggcatgagccaccgtgcctggcctgcagttttgttatcaagaccttgaggtgggctgggtgtggtggctcacacctgtaatcccagcactttgggaggccgaggcggacagatcacctgaggtcaggagttcgagaccagcctggccaacatggtgaaaccccatctctacagaaataaaaaacaattagccgggcatggtggtgcatgcctgtaatcccagctactcaggaggctgaggcaagagaatcgcttgaacccgggaggtggaagttgcagtgagccgagatcaagccactgcactcagcctgggtgacagagcgagactctatctcagaaaaaaaaaaagaccttatggtggcaacaccaaagaagtagagatcattagcatgtcatttctatgttatctgaatacctttctgaaggttttatttataaatactgtgcaatgggtatgctgggtagaaggggaaacagccacaggaacagccacaggggctggtagctgtgacaaaagtcgctgcaactcctgccagctctctggcatcacaggtctggattgacttgggcaaacagttaacccagtccagaagtgggagcacatttggagcttgaaagactgacaacgagatcctgagcagcttgaaaccccagaaccaacagatacaccctgtcctggaaaaagtataggtcaattttatgtcatggagcaaactgggtctatataaaactgggcagtgccaccaggctcagccagagwcctgtcccttggctcccagcatggaaggagaggggtctgtgacccatgttgtcctgccactcactgggctgttttcttggatctctaacttgtgtctactaggtgtggcctcatctggcctctacctaaccagttgttttatttgggttttcatttaaagtctaaggtagccagctgcaaaaacagagtctgagggagttaaggatttggttccaaggagaccagaagagcctccccactacagggtttttggaattttgggggcaactccctttgggtctggggagaaaactgccaggagattggaggcagaaggttggcaggctgggccctgagggaggctctctgcaaggctggtcctccccttcctcctccaggccagactctgaagtgcagcatcagctcctgcccaaccccttccagccaggccaggagcagctcgggtgagtagggtgggccgggggtgctttcagggagaagaccaggcccagggctgcagactcacctctcccgggctgattctccacttttctgacagacttctgcagagctacctaaagggactaggaaggacagaagtgcaactggagcatctgagccgggagcagggtgaggggctgggctgatggggccagggacgggaggctctgggcagccagatctgggactgacctcggstgccccattgactcctgycttctccacctcccccggcacctcttctaatccagcttctcttctctttagttctcctctacctctttgccctccatgactatgaccagagtggacagctggatggcctggagctgctgtccatgttgacagctgctctggcccctggagctgccaactctcctaccaccaacccggtaagctctgctggatggagatccccgcataaaggagacccagcactttggggctttggtctttctcatcataactcttttggtgagtcctctgtaaaaggagggctcagagcttgcacggcagggatgcaagggtgtgttagggagggtcagaactcctgggaacatctctgtccctggagaccccacagtgactctgcttccacaggtgatnttgatagtrgacaaagtgctygagacscaggacctgaatggggatgggctcatgacccctgctgagctcatcaacttcccgrgagtagccctcaggcacgtggagcccggagagccccttgctccatctcctcaggagccacaagctgttggaaggcagtccctattagctaaaagcccattaagacaagaaacacaggaagcccctggtcccagagaagaagcaaagggccaggtagaggccagaagggagtctttggatcctgtccaggagcctgggggccaggcagaggctgatggagatgttccagggcccagaggggaagctgagggccaggcagaggctraaggagatgcccctgggcccagaggggaagctgrgggccaggcagaggctraaggagatgccccygggcccagaggggaagctgggggccaggcagaggccagggagaatggagaggaggccaaggaacttccaggggaaacactggagtctaagaacacccaaaatgactttgaggtgcacattgttcaagtggagaatgatgagatctagatcttgaagatacaggtaccccacgaagtctcagtgccagaacataagccctgaagtgggcaggggaaatgtacgctgggacaaggaccatctctgtgccccctgyctggtcccagtaggtatcaggtctttctrtgcagctcagggagaccctaagttaaggggcagattaccaataaagaactgaatgaattcatccccccggccacctctctacccgtccagcctgcccagaccctctcagaggaacggggttggggaccgaaaggacagggatgccgcctgcccagtgtttctgggcctcacggtgctccggcagcagagcgcatggtgctagccatggccggctgcagaggacccagtgaggaaagctcagtctatccctgggccccaaaccctcaccggttccccctcacctggtgttcagacaccccatgctctcctgcagctcagggcaggtgaccccatccccagtaatattaatcatcactagaactttttgagagccttgtacacatcaggcatcatgctgggcattttatatatgattttatcctcacaataattctgtagccaagcagaattggttccatttgacagatgaagaaattgaggcagattgcgttaagtgctgtaccctaaggtgatatgcagctaattaaatggcagatttkaatccaggtctgtctcactctaaagccctttacattatatgctctttacattataaggccttacccaccctatattggagttrgccccaattccaatatgtgttccagatcggacctccctgaggacagcaacactctgtatcctgggtcacatttgtggctgaggcacgcccttaattccaaggtgggctccaagggtgagactttcaggctctggggcagtcagcgggaggaggtatttctggacaatgaagaccccatcaaatcacaggctggtgggcagggcagaggaggcgcacccctgccccccactggcctgtcagttcagctcagcggtgtggactcccagcttctgagctgtgggaatagagtctgcacaacgcagggccccgaagagctctcacggtttctttggcaggttcactgggtgtggggcaccgagtgtcctccccagccagggcagagctggtggcaagcccagggcacttctcgctgctctagcccaggcagcccctcctctgggcctgggcggagaggttaatttggggaatggacacaaagagggaggatcgaagagtcagagcctcaggaatgcccagccagagcagttcagacattgagaggagaagctggctctgaggaagatttatttgctctgaggctctgcatcccccagccatccccccagagcctctccctgtggggaacacaggacacaggcagagtcctccccacagcttgcatctgtcccctgaacagggcaacctggacgccaggctggatggaggggagaaggcgatgcagccgcaatggtagtctccatggtgtgtgaggagccggcacctgctctcacacgatgccatcaaagccctgcaggccacacttcttgccggccacctggcacccgaatctcagtgcttcctgcacgcycctccctggaggaggggcaagtagctaggtcagccaggtgtttggggcagggacaggtcccagtccttttcccctcctgctgccatactcaccctgggagaggctgaagatgacggaggcattgaaggtgtctccagctcccagtgtatccaccacgcggggtggcgggaaagcatccgagtggagcaatttgccatcagggcccagggcgtcggcgccctcctcagcccaggcacagacaagcacagccctgcaagacggctccactcagctgggtgttagcccaccccgtccccccagccatcctcccagctccagggcggactcctggagtccaggctcatcctgtaccttctaaagccccttcctggcttccccggctcaccctttcctcacaygaccatacaagcccctcaaggcttcctctgctgactggaaccccaagtgcttggccacatctttgctgacaaacacctgtgggcagtggaagagaagctggtggtcacttctaactcgtcattcaccaacagcagcctagcgttgcccccattacaacacgactcccccaacatgtccacatagatccccaacgtagcatctcactgtcccacgggaacgtggttttcttttttctttattttttgtgaagacggtctccctgaggctggtcttgaactcctggccccatatgatcttcctgcctcagcctcccaaaatttctgggattacaggtgtgagtcactgcacctggccagaagcatatttttatcgatgcttatatataatagaatacagccttgtaaattgtaaaacaaaaggcctggtccgtttgttctctgatcaatggattgaaaacccacagaaagccttgagcgccaccttggggtggaatctaccaccgccatgctggctccctggagcagttttgctggtttttcccacaactatgtcctctaggtatggtttcttcatctggaaaacaaagaggctccctcaacactacctacactttagaatctccagagaaagttttggtaaaaacaaaaaacaaaacaccgaagccttggctctacccctgccaatcaaaaacaagatggtggggctcaggcactgcaatcctcctgcctcagcctcctgagtagctgggactatgggtgcacaccaccatgccaggaattttttttttttttttttgtatagagacagggtcttgcaatcttgaatgactggctgaagtgatcctcctgcattggcctcccaaggtgctgggattacaggtatgagtcactgctcttggcctaatttattttcatagagacaggggtcttgctatgttgtccaggctggtcttggactcctggcatcaagcaatcctcctacctcagcttcccaaagctctgggattacaagtgtgagccactacacttggcctgcattcatcttttttaatatgcagccaaggttgaggacaagtcacaaggttgaggaccttggctggatggtctccaaccaacttctgctatgatgctgggattacttcccaaattccatttacatccagccttttcaaaaagagactcatgcaagtctccttcccacccttccctcaccctagcagcccccacaacctgccagacacccctgagttggaagaaacctcagagaacagttgtgtgccctcattctgcagaggaaaagactggggagccccagagaggagatgcttccacacaggcttgccctgtggctgtttaagccctacccaagccctctgggcattcttacacctatgcacccacctggggtggagacattctactccttgctcactgctgaggcctgcactggagcccaaggctaggggtctacttctttgctttaacccccatcccccatcttcaaacaccaccaaaccaggaaccactattccaattgtggtaggcaggataaaaggattctggctccctttaagaaccaaattagctggaagtggcaaagagaggctgaatggggcacccaccacgtctccgtagccaaacagctggaagagctcctctcgtggcttctccacctccacggacacccggatcttctgctctggaggctgcctggtgttgtgtgcgtctatccgctgcagcatcttcacctgctccgatgcgttccggccctggtacaggacagggcagctcaggaccgctgggcactgcctggccaatctgcctcattcttcctgccccgctgaaactctgggtgaggaggkagagggcctcggggaggctgggctagaaccccatcctaaattacaacattcagagctgtcgtggactttgaagaccttatcaaccagctactccattccacagatgagaagactaaagaataaaagatactgtgaaagacctaccataggttaaatgatggagctagaactcaggacttctcaggatttccttccacccagactccaaaacctctcttggagtaaaggctctagttccctttatttgggagctgagtcaggccctgtccttcctgcttccccagaggtaatgggtcaggccctaagcagtcagacatccgccagaggcagagttggaggcaatggggcagcccgtagcacagaaagcacaggactttgcctggagccagctgtgcttacgttctgctgtgtgaccttgagtaagtcatctaatctttctgggccttagtttcctcacctgaagacataaggaaagatggagagagaatgagggggttgggttcatttatctctaaggtacttcatgattcaaagaaaccaaggaggcagaacatgtggaggaggctggcaggttgagccccttgaaacacaggtaaggcagggcttacctcaatgtggatccacttgaactgggtcagatcaaccttctcaaagtctgtagcagacacatctggcaggctcctaggtcacaggatggaaaagacagagaagaaggagcatgatggggtcaggcagagccaggatctctaactggcagctgtggaccctgtgcctgcactgctggcagcatgacaggaagctggatccacagcacaggattctcaggctcagctccagggttgtccctgttacagtctgctggggtgccctttcctgagtttgaggttgtgattaaattatctcggtaaactgaactgcaacacatgtcaactggcaaggtctgtgtgccttggagactgcatctcccagaatgcactgagagcgccaagcctacacttcccagaatcccttgcagcagcacacggctcccacaggcagagccctgggaaagtataaagcccgcgaccccctgcctgggctgtctggtccccctcacttctggcgccccagcgttggggtttacctatggcacccctgtcctgcgtttaatagctccccgttgcaaccctgaggtcaaggtagcacttgaggaagagtttgtgtttggccggtttaggaaaggggactcccgatagaggtctgccttgaccctcctgagccagagacctcaactcagccaaagtccccgctccacgttctgtagccgagtccttccacttaactatagctgtgtgatctgcccgggcctttgggaggcaacttccacattgataaatggggctgaaacccccagcccccttgcagcctgctgcagttgcaggtaatgtgtgtgaatgtgcctggactgaggccagtgggcaagaaacatttctcctcagagctcctctcctgtaaatagctatgttgtgtccttgatcagggttactacggattgttgcttaacaagcatttgactaggattgcccaatgcgaaggtcacctgtagcacatatgcctgcctactcacactcactgcacatatgaagcccagggatggctgcccctcctccaggtccggcagtcaggctgggccgtaggaacagcctgaacctgagggctgctgggcttgggccctctcagccataacagtacctggcacgtactaggttcttagtacactaaacctctaaaatcctgcaggagggagtctgcaagggataagaagtgtctaggcccatggggcctctcttgagtggcctgggaccctgaagggagggatagccccttcccccaggtcagcaccatgttagatgaccctgatctgctgaccccatgtttcctttcccctccttcagcaatggctgtgaatggtgtgtggcctggcttcatcatgctggaaactttggggggctgatctcttttacacacccaaaccccagctccttggtgccatgctgcaggctggcaactctggggctgactttggaaatcccagtgggcacccccccacagcccttcttaagaagggttgaatcccatctcccacccttctgtcctgagaacagtttccccgcacccacagccaagctgctgattaacgatttaataattatggaggaatcacttaataaattacagtttatataggcctgcctgcccttctttggtgttgaccaaggccaagtcaccaggcacagcaaagcccatcccttcccacctcacttttcccctaattgaaagcaattaggaaatcactggacattttggcaggggagcaacttctggtacacagaagccacagaggggggcagttgggatgcccatggtggcgagtgagggaactgattgagccaactgattggtgggttgtagcagggcgaggcccgggggccttacgtgtcatggagcacaatggtacggttgccattggagttgttgatgatgcascaggagmtgggggtgtcccccttgstctgccaggccacctgagacacgtccacgccccgccgcctgaagtcggccaccaggaagcttagggtggaggccgggccaggaaaagggcaaggagacacagattagagcctggaagtggtctggacctccaaaaggagtggggagagggtgctggagcacacgagcctctaagagaagaagagtcctgttctgggagttttggtggcggcggcagcagctggcaaggcacagacagttgtacaaacctgtcatagtataggatggtgcggctaccactggcctcgttgatgatgaccgtggcgatggggacggagcctgtggtctgaaagactgtgtagcgtaggtccacagaatagcggcggaggtcatccaggacaaaactgcyagggcggagtaacccgaagggggtgcagttcgacaagggttttggggactggagggtagctggcagggccactagggaccctgaaaggcaggggtgcaagcaaagggggctgggagagaactgggaatcacagtcttgccacaggcagtgcaacagggcaggagatgcaggagtgcagagcctggagctcagagagagaaacactaagggccatccttttaggtcttggctgaagcatgctccgatcctgactctgtttttcagtccaactcatgctggaaaggatttgctcctgttcataaagctagacaggaccctagaacctgtacactgtttgaaccaagcatgtgggggcaccgtggcttgtttcctgcaatgcccaaacaggattaa

SEQ ID NO: 93923 - DNA, 18328 bp, Homo sapiens
ggaattcaagaccggcctggccaacatggcaaaaccctgtctcttctaaaatacaaaaattagctgggtgtggtggcatgcacctgtaatcccagctactcaggagactgaaacaggagaaccacttgaatctggaaggtggaggttgcagtgagccaaatcgcaccatttgcactccaccctgggcaacagagagagattctgtctcaaaaaacaaaaacaaacaaacaaaaaaagaaaaaaaaaaagaaaaaatagaggaaaaaatttttacctaaagtatgatttccattatgtttaaaaacaaacagacattcttggggttggtgattgttttctgtcatttccaaaaaacgatataactattatttttaatgaactatataggaatatatgtatatatatagtttatatatacatatatagtttatacatatatagtttatatatacgtatatatagtttatatatacgtatatatagtttatatatgtatatatagtttatatatacgtatatataaatatatagtttatatatatgtatatataaactttatctcatttatatgataaagatgaaagatgaggccgggcaacgttataagaattaaaagagataaattcctggccaggcatggtggctcacacctgtaatcccagcactttgggaggcagaggcgggcggatcacctgaggttgggagttcgagaccagtctgaccaacatggagaaaccccgtctgtactaaaaatacaaaattagccgggcgtggtggtggatgcctgtaatcccactactcgggaggctgaggcaggagaatcgcttgaacccgggaggcagagactgcagtgagccgagattgcaccactgcactccagcttgggcaacgagagcgaaactctgtctcaaaaagaaaacaaacaaacatgaaagatgagttggttgtgtcacatgaagagggtagtatagagccccaggtaatggggcacaggagtgggattccagataccaggcccacatttctggggtgagattgccaatcatggtctttcttccatccttcacagaggtgtaggtttgtcctgaagacaaacctgatcctggagacttcatgtaatctcgaagagatgtgcaaactgatgaaaaacagtgattttttttttttgagacagtcttgctctgtcacccaggctggagtgtggtggcgcaatcttggctcattgcaacctccacctcctgagttcaagcaattctcctgcctcaaccttccgagtacctgggattacaggcgcccaccaccatgcctggctaattttttgtatttttagtagagaaagggtttcaccacgttggccaggctggtgtcaaactcccgacctcaggtgatccactggccttggccttccaaagtgctggggttacagctgtgggtcaccatgcctggccaaaatagtgaatctttgaggtaaaataaagatgtcgcccaggctggagtgccatgatcatgccagtgcaccctctgcctcccagattcaagtgattctcctgctttcctgcctcagcctcccctgtagctgggaccacaggtgtgcgccaccatgcccagctaatttttgtatttttgatagagatggggtttcaccgtgttggcctggcttgtctcaaactactgatctcaagtgatccgcccacctcagcctcccagagtgctgggataataggcatgagccactgctcccagccttaatttttcaaaatcagaagccggctccacctcagttcagatccagtgaatctgggtgagagggcagagtccacaagtatctgcatttcaaatagatgttcccattgatttttatgcataccacagtttctgatcacctgatctgaagtacagcaatgtacttgtattttagtcttcctctataaaggtagaaaaacttctgtatcttggctacacaaaagagtttaataaccttggatcagcggattcaaaactagttcttagctagtttaaaagtccttccgtggtcctcctcagttttctccattttcttcaactctgttaatatctttacctatcttgatgcaaattattatcattattattttgagacataatctttctccatcgcctatgttggagtgcagtggcgggatctcagctcactgcaacctccgcctcccgaattcaagcaattctcctgcctgagtagctgggattacaggtgtgcgccaacacaaccggctaatttttgtattttatccccaccgagacggagtcttgctctgtcgcccgggctagagtgcagtggcgtgatcttggctcactgcaacctccgcctcccaggttcaagcaattctcctgcctcagcctcctgagtagctgggattacaggagcacactaccacatcagactgatttttgtatttttagtagaaagggagtttcaccaggttggccagactggtcacgaactcctgacctcaagtgacccgcccgcctcggcctcccaaagtgttgggattaggcatgagccaccatgcctagcctaatttttttatttttagtagagactggatttctccgtgttcgccaggctggtctggaactcctaatctcaattgttcggcttgcctcagcctcccaaagtgctgggatcacaggcgtgagccaccatgcccaaccacaaatgttttttaagttatagtgtaagaacatggcagtaagttcaaccctccaaattgcgtcaggggtcacaggcaagcagaacctagcctctaatttcctcagaaactgtgtaataaaaagaggttacagagattatcctgggtttgccaaaaaagaaaaaaaggaaaagaaaaagaaaaagaggtgagtagcaccaccatctctatccagctctgggcagtgttttttttttgtttttttgtttttttttaaggtggagtcttactctgtcatccaggctggaatgcagtggcgcgatctctgttcactgcaatctccacctcccgggttcaagtgattctcatgcctcagcctcctgagtagctgggactacaggtacatgccaccacacccagctaattttttatatttttagtagagatgggctttcaccatgttagcaaggatggtctcaatctgctgacctcgtgatccacctggcttagcttcccaaagtgctgggattacaggcgtgagccgccgggcctggcccagttatttttaaacactgaaattacagatgtaaggacagcatgtactatatactttgtgctttatactttattattactaaataacaacattaatacgtaataattagatccaaaacacataccttaacaaatgtctatatatcaatagattatctagacaccgctttaaatgtgcagctatcacttaaaatcaactgatgggttcaaaataatgtaagaatctcaagatggcatacaaatgcgccctgaatgatgagagtacatggtactttttataggaagatgtcactatcaacacaaagcatattttttattatttatttatttttagacagagtctcgctctgtcacccaggctggagtgcaatctccgcctcccgtgttcaagcgattctcctgcctcagcctccggagtagctgggactacaggcgcacaccaccacacccagctaatttttgtacttttagtagagacagggtttcgtcatgttggccaggatggtcttgatctcctgacctcgtgatctgcccatcttggcatcccaaagtgctgcgattacaggcatgagccaccgcgcccgtctgaaagcatattcttttaaggttttgttattgtttttccatgtagcactgacagatttgtactaattctttgcttctctggttgctagatagctttagaattgtcagctgaggctcttgaagagcaaaactaaactaccttagttggcttagatagggaaataatctgacttttaggattatttgcagtataaatgatttcaaacactaaaggttgacaaagaagcatttatagttcactgagaaggctatcttatttcagattccaggtaagcagaatcacttaaatttaaaagagcacgctctgtgttgatatgcaaaactttgttaaagtatacgttttgatctttaattcatttattagttacaaatgttatttactatttagtaagcacacgcaaatgtggtaatcactgcatttattaggaatacactgtaaggttacaggcagtgtgggtgtggattttgactgtatttgaagttttcttaccttgaaacttacttagcacttgtaaacctataccatagagtttagcctttatttcctcttaagagacttgaaaatcctacaccatctagtgtagtgctaatcctaaagaaaacaaccaacgattaagtgttaattgttgattggtatcaccctatgatcaattgttttcaccctaaggctcaagtgaaaccaaacggttggtcactttttcgatttagtattttttcaatttcttagatctcaggatatttttagtagattttggatgagacaacaaggatgtctgacgaccatcattctcagaaaatatctggcatcacctcaaatctggatttcgaacattacagagggatgaatgaggagcagtaccactggactgagggcctggcccactttgccatcttggtattcttaatctttgtcctagttcctggcacgataagaattttcaaataaataaataatttttgtattaaaaaagtagtatttagaaccgaatatcttctataatatagaaaattgagtcagctttcccagtaatgattctttaagttggccttctgaaatatgagaaaatgttaccctgatagtctcgatgatattttgcaccatgggtagggttgtattttaaagttaaatgactacatatattgttttttgtttttgtcgagagacctgagatggggctaattgaaaacgtctggagcttaaagacccgtgcagtttacgcagcaaggatattattgctctgaatttcaataaatcaacatttcactatatatcggcaaagtctacagcctttaaaaaatgaccaatatagacggaatcaaaaccgatgtagtcccaaagcggcacagagctgtatctgccaaagcgtccatttaaattcgtgcgttccaaggaaaattactgcttagtttctatccatttgcaaaagtttatgattttttcaggcattcctcacacctgttaggttaaaatcagtaacactcttaaaaagaaagcgagagaccggaaatgatatgagaatagaattggccactccagagacatctgcaaatgacactccatttttccttctcgcgctgcaaaatgtaccggtaaaccggacttcccgggactcgctgggtggccgacattttccctagcaggaattttacgtttccaagatctgaatggatgttaacggtcgggctaaatgccaggcaggtcttcattgtggaattaaacagcggtgggagcaagcggaataaccgagttcccctcccgcayctgagtgccggcagcgagccgcgagccgggacctgtcacccgcgggaagccccggccgcccgacgaacagcatctccggtttccgcctccggctccggcgcggctcccccggcccgcctctgcgtcagggacgcggaaaccccgtaggagcagggcgggcggggaaagcgaggtttaactaactccgcagctatattcttccgccgcgaggtaaagagtcccaacccaaccccgggccctaggatttccagcgaccctgtaatatcgagaaattaccacatttgggtttttctaccaacttgcttaggattttatccgaggtaacgaccccaggatcacaattttgtagctgaccgaagcacggcgagaaaattcctccgcaagaaacgggttccggccacgagcctataaaaaacgggtggttgggcgccgctgtcttttcagtcgggcgctgagtggtttttcggatcatgtctggtggctccgcggattataacaggtatgcagtctgttggcggtcgcggtctgtagtgaaggtcatagggcgccaggggagatgatagtggatggcamggaggcaaaaactctaaattaatggacgttttcttagggtacagcactcctgtgcccttccagaagcttccatgatgggtagggcccggattgtggggagataggacggtggtgcgaaagcagtggctaaagggcgtttttcctcyctaagacattacgaaacttcggctgctttccttcccagtgtagagcacgggaaacatggagtaaaaagccgtggcgcagtccgagttcggtacactgtaaccaggacccgaagctttattttcggtcatccacacgagttgggggagggtcctaggctttacttggggaagggttggaggcagcggtctccactcggccacggcgcggaggcgacgggacaggaccggtgccggtgaaccgttggcatcgcyctcgccaggccgctccgcccgcgtcaatcacccggcttgcgcattgttgggggcggagttcggcgctccgagctctcgcgagacgctccgcagttgaaacgggatcgccatgcgctcgggcctggggggctgcctttccgggcatccgcaggccccaacctttagggaaggcgcacagtgtggatattcgccctgaggctgctgctttagcttgtgcaggggaggctaacgtgctgagacgggttgcaaagggctatgcgcttaaggtgcagttgaggtggcctggaaggggtgtctgactgcagtattcttgtcagcagagaacatggcggcccagagggaatggaccccgatggtgtcatcgaggtaagaaacggttgtggatcttgaagctttggaaaggtgagtgtgttcatctcatttatgcgtgcattattttttctaacttacagagcaactggaatgagattgttgataactttgatgatatgaatttaaaggagtctctccttcgtggcatctatgcttacggttttgagaagccttccgctattcagcagagagctattattccctgtattaaaggtaaaagaaactggcatttttaggaaattgttctacatagacatgaaccataaaagggaaagtaacctctgggggactagcacctgtttgtattccttaaagtgaaatgatggcaatcatctttcgggactgacctgaaatgaagagaatactcattgctgatcacttgattatttgggyataatgttccaaatggaatacatggtgtgaagtagaagtgacaatttgatgtgggatcggtaaatgtgtatcctactttttttagggtatgatgtgattgctcaagctcagtcaggtactggcaagacagccacatttgctatttccatcctgcaacagttggagattgagttcaaggagacccaagcactagtattggcccccaccagagaactggctcaacaggtattgatagtgtagttcaaaaaaactgcttgcgtgttgcataggtttcaggtttcacaactgtgaagaatttaaaacttagtataaattggtcctaccagatccctccttttaattgtccatgcatgcagggagtttttgttgaaagttttaaaagaactgggtatgcaggtatggtttgtagggttgtatactaatagattgagaatccgaagcgctctcttggatgtactagatctgtccccattttttaagtttgaatgcagttgtgcaacatgaaaactgcagtgacatgttaccatttgactgtctccgtagttcgtgatgcatctgttgcatgctatgttttcaaagctcactgctatattggctttgaagtaaaccttcctaataaagctgtaggctttattgaggtcaggattatataaggcacaataycctctgggggaaaaaaatcatttgccctagctgtaattacagaacataaatttcactacgtactccctacctacagtgaagaataatgtaggaaacgttattcttgrattgtctagctgatgcgtggagcagcagcatcccaagtttgacaaggcataagaaagacattaagggaattttaccttgcagcagttaggtcgtctgcattttaagcttggaagtagttttgtgctgtgcatgcataaaagctgttggcagaccagattatatttgcctttatgctttaaaaattagtcattgatcctggagttctgcggaataataattaaggcttgggttttagatccaaaaggtaattctggcacttggagactatatgggagccacttgtcatgcctgcattggtggaacaaatgttcgaaatgaaatgcaaaaactgcaggctgaagcaccacatattgttgttggtacacccgggagagtgtttgatatgttaaacagaagatacctttgtaagtattgtctttaagagagtattttttttaaaactgttaacatagttgaaaagtcaaattgtatcactgagtagatctagaaatgacagtatgactttgtttctaacagctccaaaatggatcaaaatgtttgttttggatgaagcagatgaaatgttgagccgtggttttaaggatcaaatctatgagattttccaaaaactaaacacaagtattcaggtaagcattacttcacccccctcttaaaggtagagatggggtttatttaatgcaggtactgttacaatacaactgatgtgttttgytgtcgttccccctgcttaaagcacttgatgcataactctgtctaccttcattccgtagtaagacagagacgcttggcttcagacattttcctttgggtattaatgtgtaagttgtgctacaacataattttctctttttaaggttgtgttgctttctgccacaatgccaactgatgtgttggaagtgaccaaaaaattcatgagagatccaattcgaattctggtgaaaaaggaagaattgacccttgaaggaatcaaacagttttatattaatgttgagagagaggtaactgtctgattgttagacattattttaccttcttgtataagcactgtgctaaaattgcagacactaggaccatgtcttggtttttgcaataatgctagcagagtacacacaagaagaaaagtaacagcactagattgtaaagactggggtggacctctttcttaatgtccaatgtcctttgtcttaagatttggtgcaatatctcattagacctaacagaatgaagttaatttttataatttctacgttttgagactgggttatgagactggctaagactggccaattttggtattttgggtagagacagtttcactttcttgaaaccctggtctggttggaactctgggctctaagtgctaggatcccaaagggctgggattacaggcattagcactgtggctggcccagaatgaatttttaactgaagagttggaaaaactaaatgactgttaactttaacttctaaacattacaggaatggaagttggatacactttgtgacttgtacgagacactgaccattacacaggctgttatttttctcaawacgaggcgcaaggtggactggctgactgagaagatgcatgccagagacttcacagtttctgctctggtaagaggtgttctaaaatgtctggatttccactaaagcaggattcagactacaatatagctgctaagtgctgtgttgtcgttccccctgcttaaaataaagttgtttcttaactatacctgtctgctattctcctgtagcagccagggacgcttggtctcatacatgttgattaaaattaaataccgacctgactggtgattcttgaattaaggtttattaatttgcagcatggtgacatggaccagaaggagagagatgttatcatgagggaattccggtcagggtcaagtcgtgttctgatcactactgacttgttggtaagtctcttaatgctttttaaaaatctaccaaaagttagctttttggggggcaggtttttaagtaacctttgccaacttgggctatttggaagagtaaaagaccacactccacagtgggctataccacttagtatagttcgctactattttgtggcctacatgacaggtgtcaagtttttttgaatcaatttttaaaacatgccattgtgtttcaggctcgcgggattgatgtgcaacaagtgtctttggttataaattatgatctacctaccaatcgtgaaaactatattcacaggtgagaagccagcatcttggctgtattgaaaaaamttcatacgtttttctactgtgatttgtatgaaaggtaacatcaaatcaaggaatagattcagtaaagtcagtagtgttcagtaagatgatgtaattaaatttgtactagggaaggttgatgagaacaaagtgggaaaacttgtaaacattgcccagattgtggacatagggtttttttccacaattgttggtcktaccttatgcttgagcttttagtgatgttcttgtgtccatgtgtttttcttggtgattttttctatagttgggattttcttggtgtcgcctggtagcaatttgagtgaaccctggtttagttatagtggctttatccctaaataaattgaattgtactttgttatatgatgtaaaaaaagactttttaaaaaatacaggagtcgatagcagcagttggtgacgagatggcactcagaaacggcgttgacgtaatttaggacgtggaatcataagcgaaacagcacactgtttgaataaagagcgagtcggtatttatatttgtttttcttttgtcatgattatttgatttttaagttgctccagctaaggcatttttttgtattagtatttctattagggaacctttcttattaggtggtttgtattgtctggtttctaacatgcaggtagctgtttggcagttaaacacgtttagagtaatttgagttacaacgtgtgaaactgagcaaaaaagcagtgataagtttgggttaccataccaaatatttgttttcccactggaaaaaagtaagttttagaaaatagttaacctttgcagcatttgtttacagtttacagttccagaagtgcgtcgaaatggattacataactgctcttttattcctggtgttcacatctgtcccaggctgacacctgctcttggctggcccactttggtatgggctttaatttcactaccccaaacacgatactgtcatctgctttataataatgctcaagatgcctgataaaaatctcattttgcagccagacaagccttgaatccttttggcactaactgcaaaggaagatttttttctctagatatgcattagcagctagtgctccagttagaagcacgaactataaccttgataagtaaacagcagctggtggttaacaagtggatcgtcatgttcagtagtttatacattatgtgagaagtaacgttctgattctttttcttacacagaattggcagagggggtcgatttgggaggaaaggtgtggctataaactttgttactgaagaagacaagaggattcttcgtgacattgagactttctacaatactacagtggaggagatgcccatgaatgtggctgaccttatttaattcctgggatgagagttttggatgcagtgctcgctgttgctgaataggcgatcacaacgtgcattgtgcttctttctttgggaatatttgaatcttgtctcaatgctcataacggatcagaaatacagattttgatagcaaagcgacgttagtcgtgagctcttgtgaggaaagtcattggctttatcctctttagagttagactgttggggtgggtataaaagatggggtctgtaaaatctttctttcttagaaatttatttcctagttctgtagaaatggttgtattagatgttctctatcatttaataatatacttgtggactaaaagatataagtgctgtataaaatcagccaattatgttaaactagcatatctgcctttattgtgtttgtcattagcctgagtagaaaggcctttaaaatttttttagaaagcatttgaatgcattttgtttggtattgtatttattcaataaagtatttaattagtgctaagtgtgaacwggaccctgttgytaagccccagcaagcaatcctaggtagggtttaatccccagtaaaattgccatattgcacatgtcttaatgaagtttgaatgttaaataaattgtatattcactttaaaggtgcttttggtcattttatttttattacaacttcattatttacaaaaccccccatccagatatattcacgttaacaattctgagataactgctgcatcacagttgcacaaaggctgatgagttgcaaatgttcatcagcaccatctgctaggcatttgtcaacttcctacgagaaaaatttaagaaattagcatccttcaggtagttaaatgttccattgacatgtgcaaagtacctacttacggcaagtttttctgtgataatagacttctgtttatcagataagttattttctacaaccacatcatggagttgattgacgagctgagttgctgcatgaccctcatctattaaatcctataataaaaaaaacttttggtatgatgacttaatattcctttccccaaagttagtaagctgactttaccttgaccrcagcttctagtttgtcaaaagagccactctgacaggcagcaaatactccatcaattttctcagctggtattacctaggtaattgaatgttcggtattaaagatgtttctaggtgagactagacatacactctgccaactggcccccgtgcccccagtcatttctgttccacacctaagttccatactttyctgggaaggctttgggagaacggaaagggccagagtaactccagccaccactaagcaaccaaggtgctaacaactgtgcttttaaagccctttaatggctttgtgaacttccaagtttgggcacacatggattatagcttgttctggtcagtggatgaagattaagttttcccctagcggctataacgattcctcagaacagtggccaagatcaaccaaaaagactgatttctttaaaggggaagtgccctttctctcaatctctccatgtaaagatgccactaatgagattggtttaaaaagcccacaatatccagaaaattaaagaggattagtggtaccagtcttgtcatatggaaggcctaccgtgaaggtgaaaaacgtcatagaaacaaagaggattagtggtaccagtcttgtcatatggaaggcctaccgtgcaggtgaaaaatgtcacagaaacaaaagttgttaagtagtagtgattctgaagtgagtttttacatgggagtatccaaagacaagtggggtactccattctctttaataaatgattactgtaagttggatatgccttttgtttatatacaactggcaaaatagttttcatgtataagaacatctgctaaaattgatttaactgccaaaggcatttcttataaaatctaaaaactgaaggctgggtgcggtggctcccacctataatcccagcactttggaaggctaagcggggggcggatcacctggggtcaggagttccataccaacctggtcaaccaacatcgtgaaaccccgtctctactaaaaatatacaaattagctgggcatggtggcaggtgcctgtaatcccagctaattgggagggtgaggcgggaggtggaggttgcagtgagtcggtattgcgtcactgcactccagcctgggcgacacagcaagactctgtctcaaaaaaaaaaaaacaaaaaaactaacaactgaaagtgtccttttctttcctgaaatgtctgttacatgcctgacaaactgaaaagtcagtgctatctcctcacctcaaacactctgatactcccaggttattcccttatacttcctagtgcagtacttggcacttgctaaacacccagtatttgttggatgaaaatttcctaaaagccacaaaaaagccaactaaaaagaaattcagaatatccagtactcttaccccrgcaatgtctgtaatcactttctctgtgatctcctttccacctgttaatcgagtagcgctttgaagaaatgtaatggcttttcttaagtctccttctgacactttaacaagataagctattccctgaagagaaaagagttgtttttaacctatgatggccaattaaggatttataactttaattttaaaatgtttaataaaagtgaaaaaccctgttttagtctagagttaatgagaaaaaacatttctgttttgggagaaaatatgatcagtctaggggccgggtacaatggaaggatagagatctcttgcttctgaaataaatttgcagagatgaaaaaatgttccatatttatcccattttcttgctcacgtaaagcaaattcaaattatggttaaattctgttataatgaataagggccttatgtttctatcaattttagggaagtactgaagtattagctagaagactaaaatcttgtcatcatgcagagatttatgttgcagaatttgcattatatgtatgaaatccacctcagtttcgggtctctgatatattaaaagataattaactcaaaaagtaatagaaaagctaaaccttgtaattcctacacatttcaattgttgcccctttagcttaagtttgtctgaagaactggcatcaggattgaggcaacacacatttaaatctttcagggcctctttatatgcattcatcaaaggaattagtaactctaataattgtaataattagtaattacctcatcactaattttgacattttccttcttggcaatgtctagtaatcgctgctgttgaattttatctgacagaggcttgaagcggaattttgaacatctagaggtcaggggttcaattattctgtggaagatgagaaaaaccaagttggtgtctaaagaaagaatttccccaaaagaactcatttttatcaagaacaaatcaagatttgatggaggaaaaattaatgtagccttgaaaatcctaaatttcctttccctaattgggttatgaaaataaggctgcctagcatctgtcttcagggcaatatacataccgactgacatagttacagataagacagaatcgggtggttttcgactccttctccatggtacgtcttaaagctgcctgagcagctgaggtcatagaatctgcttcatccagaatcacaatcttaaaaggcggacacggcttcccactgattcagagaaacacataagagttgaacattaatatgtatattggttttaacagctttgttgaaagatacacgtaccatacaattcacccatttaaaatgtacaattcagtgtttttctgtatgttcacaaagttgtgcaaccattaccacaatctaattttagaacatttttatcactcctaaaagaaactttgtacctattaggagtcactcttcttcccccagtcattcccagctctaggcaatcattagtctactttcatctctatagatttgcctattctggacatgatatgaatggaacatataatatgcagtcttttgtggctgacttcttccacttaacatattttaaaggttcatccatattgtagcatgtgtttgcgtcattcctttgtattgtcaaatactatggcaaatagatacaccacatttattcatccattaatcggttggacatttgggctgtttccatgttttggctattaagaataatgctgctgtgaacatttgtgtacatgtttttgagcagacatgtcttccaagaggctgtaccattttacattccaaccagcaatgtatgcggtttaccatttctccacatccttgtcaatgctagttattttctgtattttttatcatagccatcctagtgggagttacgtggtatttcaatgtggctttgattttcatttcccaaatggataatgatgttgatgagcatcttttaatgtgcttattacacatgcacgaaatgtctatgcagatcctttgccttttttttttttttgagatagagtcttgctctgtcgcccaggctggagtgcagtggtgcgatcttggctcactgcaagctctgcctcctgggttcacgccatactcctgcctcagcctcccgagtagctgggactacaggcgcccgccaccacacccagctaattttttgtatttttagtagagatggggtttcaccatgttcgccaggatggtctcgatctcctgaccttgtgatccacctgcctcggcctcccaaagtgctgggattacaggtgtgaaccactgcgcccggcctttgcccattttttaattgggttatttgtttttattactgagtttttaaagttcttcatatgttctagatataagtacctttttaggtatatgatttgtaaatattttctcccacgttgcgggttattaccttctgtacattgatttttggtaatctgccattaaagtttttctcccaccaaaagtggcattaacataattgtatgaaaattataccaagaaaacagatttcaagtattaatggtagaagggatctcagagtcttttagtccacctcccagtcttcatttcacataaaaatacattaggtgctatagcggttgtgactgactgcaccatcaatttaaggtgcatatcaaaaattagtcattcactttcacaaattttgaaatgtgctcatgtaaaatttacacatatgtctaggtaccaccaatgtaatcctggacctttgccacctaaggagcataagtagttgattaaatccctgtttacctcaggcaggatagtcttctaacatgaaaagttgacaatttggcagaaatacacttgatcttagccaaaaggctgaggagcgatggcagaaatacatatttaaaataatacatgctatggaggagggagggcaaatttacttactctgagcgacttcctgacacagttaattgagcaaaatttttcactttctctcgaactacttgtattccacgttcatcagatgcatttaactcaagaactcttaatcggaaaagttcaggcctatctcaaaatgaaacaaatatgaaacatagagcacaagtaggcttaaatcacattttaacatttgcacactttgcagacgtttaaaatccacctagtaaacaacatggatagaaggcacacaatcacttttgcattctcgcttcagcagagtgctgcagttaacattttggcttttttccatgcatttaaaaaaatgtagacattacataacatatacaatttcttttctttttatttttttggagacaaggtcttgctctgtcacccaggctggagaacagtggcatgatgatggctcactgcagccttgaactcctgggctcaaatgatcctcccaccttagcttcccaactagctgggactataggcacatgccatcacacctggctaattttgtttactttttgtagaggcagggactcattatgtggccaggctggtctcaggtgatccttccaccttggcctcccaaaatgttgggattacaggtgtgaggcaccacacctggccccacatataaaattttaaatcgattttccactttgcatttataataagtatcttggcatattatcaaaaccactgtaaataacattttaatagtcatatgatattccatcctatgactgtaccatcatttacttcacattcttctattgttagacatctagatagttttaaatactgtaattttaaataatgttataatatagcacattttaaattatttccggccggatgtggtggctcatgcctgtaatcccagcactttgggaggccgaggcgggtggatcacgaggtcaggagttcgagaccagcctgaccaacgtggtgaaaccctgtctctactaaaaatacaaaaattagctgggcgtggttacaggcacctgtagtgccagctactcaggaggctgaggcaggaggattgcttgaacccgggatgtggaggttgcagtgagccgagatcgcaccactgcactccagcctgggcaatagagcgagacactgtctcaaaaataaataaataaacaaataaataaataaattccacagggtagtttgctataaggaaacctactggattaaggaaaattaatggattaaaacatgagcaggt

SEQ ID NO: 93924 - DNA, 22772 bp, Homo sapiens
cagttgaggacgtgatgttttctcacagcagctgcctgggtgaagcatctgctggacaagtcggaccactggccaggggacctttgattgtctttccagagatgctgctctctgcagggcaccaccttcaaggcacagcccttgttgggagggagaaccctctccagaaaccctgccaccatggtgtcttgccgtacttcccacagccgcctttttgcggcctggccggccaggcttcccgtgcgttatacacagagtttgggcacacactgccctccctccgagatgccagaagtttttccacagccttggagaggggctttgactgagggctgggggccctgggctccgtttccttcacattccagctggcccggatccctctgtggcacagggccctgcccgtcacatgccctctgggtgacawcggagcagacctccatgtggccaggggttgggagaactttacaaacattaggacctaacactgtctcatcgctgaaataagaggccatagcaccgaaaagcagcgtgggcgccggctgaggcttctcccagcccgtgggtggcagcgtgctagcacactgccaccatctcaaagccatccccctagccatcgtgagcatcccagcggcaccgccattgtctcaaccagccggctcctcgtctgtacacctggggatttcttttgatttcaagaacagccttaatcattccagtttgatttacgtgtatacctcataaacatttttcttttgtttctctctccccctttctctcttctcttggctcactcccttgcctctccccctccaccaccaccttgtgactgatggtttggtttcctctctgctctgcccctgctcagcacagggagaatgttgacttagaagcaatagsgggcagcaggccaccaagagcacaaccccagggcgaggtctggggaggcctcccagcccgcctctgtttactgtgcaattccagtcgttcttaagccatcaccagtgggtgtactcagagcagaggggccaggacttctgccagccaagggaaaggcccagagccctgtgcgggggaatgtggcactgtctatccatccggtggactgggcagcattcctccccagggctcttcccttgggggcctcctttcatctggggcacagccacaagtctcatctctaacgttctatgcaatgaaatataaaccctcaatgacaactgttaatatttaataaattccatgttatgtataaggagttaattgcaaacatgcaattgagaaactggatagatacactcataaaacccccacccctccccaccccacccctgctcccattgtgtgtgtgaaattctcagtctgtggcatgtttgacctgtggcaggactcgctgctgccaggtgagtcaccgcctgtcctgcagtggagcatgcacagctcgcagcctctttgcacgatttcatccattttaaatgcttgaccctcttgcttggagttctttttgcctcagaacctctccttcaggagcacttctagctgacttctgcacaagctagtgaggacctgccagaattgttgcctgagcgtgccaggctgcagggcaggcagtaaaaggcccccacataccctgcagttttctctgtccaggayagcaggtaaaaaggaatccccagagcagacgcaatggtaggagcctgcacaggatgtgtgtgtatggacattctgaaggtttgctgtaggatatctgtctgtctgtcattttcccttcctaccccaaccctgagccagaggcatctgacagccctttcccagagggcaccacgcaagggcagagctgggcggcatccacagccagagaggcagaggcaagagcagagccaggctgtgcccgagggaccccagctcttgactgcacctgtttcatgcctctcctctgtggctaggaggctcaaaggactgtgagccaggagatctgggctggagctagggggtcaatggatgctcaggaagagctgggcctttggcacttgtggtgagaacagttgacagtggtcatctggaactgttcatataaacagtggcttcaagctaagtttcttgtgaagtttctcaatagcaaatcttacagaaggtcctgtgtgaccctctctgcatctgtccccaggacctatgctccctgctcacccccttctccaaagcccaagcgtcccgctgctcatcagcttttttaccattgagccaggagtgcggcaggcagtacctgcctgacccttcaaggcctgaccttcgtccagagtgctctggtttgcaccatgcatttctcaggggtccgcatttctcatgcttttctataagatctacacaccccttcagagagggctcctcgctcacctctggtagctatggatgggacaggaagctgccaacctttgtgttggacttaacacccttgcctttctgggacttggcctcaccccacccatggaatacctgcctcatcccaaagatcaggtatgggctgaatgcagccatctgagcaagggctgagggaagccatcatctaacacctctggccacccaggaccaggtctgtgtggggatgtgccttggagaccaaggcaatagtcctttccactacaggccaggggatgggacaagaagtagggaacaggcagggaaatgttaggaggtcagcctccagcaggcctagtctcaggctctaaagtactgacttttcagcaaatttcctttctggccaagccctctgagtttgaaattctgacatctgccactcctcatcccccactgtacccacaggatacatcatcgcccctctgtgaaggtggctggagcaggcctctggtccatggactgtccttcctggcccttgcatggatgcagttgtgactctggggacaatgcagccagaagctgagggaccagcacttggtgccttggaaagtagagagcaacagacacatctccaaatgggcaaggagtctctagcatgcagcccaggccttctccatacccctctccccagcatcatgagcaagggcattgcctcctctctctgctcacttcagggcccagtgcactcacttcacagtgacagccctcccctacaatccttgggcagagcatgtggtctgagggcccacagtgaaagaacagcagtggtggcaactatgccttgccttctggagcctgtagggagttttccaggcaggtcctttgccaggacagcatggtcctgccctgttgtcccgtctgctctcctcttacccacccccatgctgtaaatacttgtcatcatggactccaacagggttagagggacaggcctaatcaactgaaactcctcggagatgccatctctgtctccctgggtgccagcagccctgctgccatgtkcactggggtggcactggagagccatggcagtcgtgagatattgtatgtgtatgcacatgatcatgtgtgtatgtgcgtgcgtgcgtgtgtgtgtgtgtgtgtgtgtttctgcctcattcagtttctggggtcaaatcagctccttctctccaagtgcactaccctggagagtggtggccactcaataccttttcctctagctttcatgtcttgtttttgctttccccttcctcctccctctctccctttctttccttctctcctyctttatttgaggggggaagagtgctgtacaaagtcaaacaaacaagtttacagttgtaagtgcaatgacccgagtcctccacatgaccttgtgaattgtgtgctgtccttctgtgctctgtgagaactcgtggtacttcagtgtccctccccctgtattgtgacaaggtaattctgtggtatcagaataaaaggacttgatataaacaacctacagactgtttctgggatggtttctcaagtgggaaggcttagctgaaggagcaaatccccaaatttgcgacaatcctgtccatggttaaagggaaaaggatggacaaagttgcagaagtgctggcacagcacggggctgagtccacaccaagccatccaaagacaatgggccctccacaaaggtgcccaaggggaggtcccaagcttggacctggagcaggcagtcagtgcgcaggctgttgagggacagcacctccatggccttcaggtgtgttggctgcatacacagctttctgggacctggttccagggaggcagtgaacaagtgctgccccctggtgctgccaacaagccctacacctctctgccttgctccgaattttccaacccccaaactctcaccggctgccagaccttaggccttcctcagatggtcaggagtacctccttaccgaagtcacccagagttgctagaccttttttttttttttttttttttttaacacagataaacaggaatcccagcttcacctctggccctctccccagaattaacattttgatgcgtgtccttctttcctgtttgttgttccagtcttcattttaaacagaagccagaaggtgcaatatatcctgttttctagctttctgtttatttccacgtttatttcaggtacttaaatgttcgtcttccagtgctcaacctccagagagatacaccattagttcatagccagtctaccacacacaatctaaggaacaggcactatgttcccagtgttcctattataaacaatgcttgatgaacatcctattttccaatctttccacccaaattggtggctggggccactcattctactcctgtttctggccttgatacagtcctgtacatactgacaaatgcagtggcgtcagaaagttgggactctttttttttttttttcttgagacggagtttcactcttgttgcccaggctggagtgcagtggcatgatctcggctcactgcaacctccacttcccaggttcaagcgattctcctgcctcagcctcccgagtagctgggattacaggcgcgtgccacccagcccggctaatttttgtatttttagtagagacagggtttctccatgttggccaagctgatcccgaactcctggcctcaggtgatccacccgcctcagcctcccaaagtgctaggattataggcgtgagccaccgcgcctggcacttttttttttttttttttaagatggactctggctgtcgcccaggatggagtgcagtggcgcgatctcggctcactgcaagctccgcctcccgggttcacaccattctcctgcctcagcctcccgagtaactgggactacaggcgcctgccaccatgcccagctaattttttgtatttttagtagagacagggtttcaccgtgttagccaggatggtctcgatctcctgagctcgtgatccgcccgcctcggccttccaaagtgctgggattacaggcgtgagccaccgcgcccggccggcactttttttttttttttttttttttttttacttaactagttatcttgagtaagtaatgatgcggctgatgggaaaggggaagctacaggccagacaagtggactctcaatcacaagcacgccatggagcagggagccagggccctgaatgtggaagaccagccagactcaggtatatggagggaacatccttactgtccagcctctcctgatctctgttggcaccttagcccagccaatcctgtaccacgtgcacagggaacctgcctgcctaggttttttccacaggaagctccctggtcctgggtggagtctgagcccaccaggcctttcacacccaagagctcagggtgaggcctggggaggaaggcagggacccaccagctcacggtccccaacaaggtgccactgagaaggctgggtaaaggctgcggggatagatagctcttgcggcaggcctggcgactgataagtccgggcagcaccctaagagttggcacccgcccctctgccccgcaccccagggctttgcttcgcgccctccgcccggaccctggcccttctcttcttcgtctgcgtggaactccctccagggcagggcctggcactgtgtagtgaatgtcggcctcgtggtggacccgaaggaaccctacagtcagccccagagccgcgggagatccacgctgcggccggctccgccccgcccaaccctcaccctcacgctcacgctcacgctcacgctcacgctcacgctcacaggctcccggctccacattcctcgcagggctccaatccggacccgcccgccttgcccttcatcctcaaagactcattggtcccattcccctcgggccccgcccttcgcgtgcttgggccatgcccgtccgaccgcgctgcttccgccttgcagcaccccctcaaccccttctctcgtaggcccttctaccctccccgaagccgggctcccgggttccgcttccacagggccgccccctctcctccgagatccaacgcctcgcccctcggtaagaggcccaggactcagcccacggccccgccccccacttggctagtccgcccctggcgagacccctgctctcacccacccaggacttctcgctcccaggccgggtcctctcaccgtcaaggcccgccccctgccaacggtcctcacccattagccgaaggccccgcccctcacagattgccgcagggcaggggcggagacagcccgggccgtcccaggctccgcccccggaagcctcacttccgggcgcgagcacgccccgcctcgccccggcggcagagaggagactatggaacgtcaggtgagggctcggcccgcggtccccgtggtccctgcagcccgggccgggcctgaccctggtgtgtcccctgcgcaggtgctgctgagcgagcccgaggaggcggcggctctgtatcggggccttagccgccagcccgcgctgagcgccgcctgcctgggcccggaggtcaccacgcagtacggcggccaataccggayggtgcacactggtgtgtgtgcgaaggggaactggctggcgacggggtcgcgcactggggtgggaaggaagggggtgtggagggctcsctgcttgacagtgcgtaagggtatatagggagccggcctggacttggaggttacactcccacaggtccctgcacacaggtgtgtggagggggggagggggcgtgcggggcgttatcgaatggcggccatgagtgcacgagatgacggcgtaggggtagaagtcaaacctgggctcagggcgtggaccttgtagggctctccaccaacacgccatcccatacacatgccaggctgccctcaagattccagggtggatgctggggttactagggggttctctcaaagaggctgtcagctcaggctctggaggcctggactagggttgtggccaagtgttgtccagcctgcagccagggtgtcagtgtctggagacagattgagagattggggaagatagatctaggccttcctgggtcaggtggggctgggggcagtagccaggagtagccaagacaaggtgagcagtctcatgcctcccctcacagagtggacccagagggacctggaacgcatggagaacattcgattctgccgccaatacctggtgttccatgacggggactcagtggtgtttgcaggacctgcaggcaacagtgtggagacccggggggagtaagtttgagggaggaagcttgtgggcaaggccacagccgtccgcaatgcaagccttttatgaatgctcaccatgtgcctagaagggaggccagcagccaggttcttgcccccttgggagctcattcagtttctggtgacatggcctgataagcactggaagcttgctccaaactcagcctggactagagcccatggtggcctggggagttgcagagagtagagtctctgcctcagggaggaaaggcaaggtggggctagaggtgctccagaagctggtgtggggccagagcctcaagaatctctcctaagaggtgtgcccagtagggagcaggaaggggttattgcaagataatcctgacctgtgctaccccatgtccacagactgctgagcagagagtctccttcaggcaccatgaaagctgtgctgcgcaaggctggaggcacgggccctggggaagagaagcagttcctggaggtgagtctgcatgggaccaggtagtgggtgacaagagagaggctctgccccacagataaggctctgttagcgggcaaacagcctaatgcccagatgtcctcaggtctgggagaagaaccggaagctcaagagcttcaacctgtcagcgctggagaaacatgggcctgtttatgaggatggtgaggcatctggctggtgagcaggcagggtggacaggaggggtagccgtagccctgggccccccctgattggccctccctgcacccagactgctttggctgcctgtcctggtcgcactcggagacacacttgttgtatgtggcagagaagaagcgccccaaggccgagtccttctttcagaccaaagccttggacgtcagtgccagcgatgatgagatagccaggctgaagaagccagaccaagccatcaaggtgctcgtggtcaatccacgaaggcccggcagggcagccctggggctcagtgtgctcccttcccatactgtgcctgtcagacctggggaggcactagcttytaggaagcagagcaggtcctatagacaggctgggyattgagtatcttgtgttctcagggggatcagtttgtgttttatgaagactggggagaaaacatggtttccaaaagcatccctgtgctctgcgtgctggatgtcgagagtggcaacatctctgtgcttgagggggtccctgagaatgtgtcccctggacaggtcagcagcaacagcctgtgtyccccctggagtctgggacccttcttgagctaccaccccttgctcactcctgccctttgatcctgtttacaggcattttgggcccctggagatgctggtgtggtgtttgtgggctggtggcatgagcccttccggttgggcatccgcttttgcaccaatcgcaggtgagggagtggggcaaggcaaggggccttgcagcccagctggccttgagactgagtgtctgtctcgtggttccaggtcagccctgtattaygtggacctcatcggggggaagtgtggtaagtggctgatgcccacctgtgctttgctgacacatgttggccctgccagcctgcgtgatgctcatgtttccatctggcccagagctcctctcggatgactccctggctgtctcttctccccggctgagcccagaccaatgtcgcattgtctacctgcagtacccatctctgatcccccatcaccaatgcagccagctgtgcctggtgagctggaggtggcagggatgggagggtggtcagcaagaagatgggatggtggatgagagctgaagggccagtatcatctccccataggccctcagtaggtgcccttctgtcctcaatgcagcagcggtgtgagttctgcctgtcctctcaaggagggcctagaggttgagagtgctgccatggagagctttgcactgttggggcattccaccttgagagaatgctcgtctgcaagaatgctcctccccttggctctcaactgcatgtagccaggctctgcaaggggctgggatatagtggggagttacacaatcccagaccctccccaggaagagctctgggcccctggtaaaagtcagagggacatgcctatctgaggccccttgggcatctggtccaggtcaccaraaaagagatacatcaggcttattccagttcccccatctcctggggctacctgaggcaaaaggggataggcacagggcactgtgccctaagggaactgcctgtcccctactggacctgaccattgtgttctcttgcagtatgactggtataccaaggttacctcagtggtggtagatgttgtgcctcggcagctgggaggtaaggcatacctggctgggtgggtgcagtggggcctgtagctctgctttcctgccgtctgttgcatccctgccccgttcttctttcctaggttccttctgagggccctacctccctgctgggccagccttatgcccagcatcctcagggagcggggctgtcaccatagggagcggggctgtcaccgtagggaacagttcaatagcaaggagtggtaggaccaagctgagatcagagtggcccaagttgatgatgtattatttcctgtgctgcaggtcataattagakttttcttatttttccaatggctggttcaaaccaaaaccatgactccttcaagtgggtctcaggaagtgcactaggttggaatgtcacactcragaggctctggacccgagggcatgatattatcccatccaccatcctaaccccagcaacctttgtccagtctaagccctgaagtcagctgggtcttcaggagggtggctcttggctgagaggctcccgtctcgagtgttgatagctctgcttggatcctcctggaccatctcaaggatgagtctcttgttttctcaggccacccggtcagttccaggagttcagtggacaagggatagcctctttgtcttctctttgggttgcagggatgcagtggtgggaacctagtatgaatcccagctctgccctaaattagctgtgtcctcagacagggtcctggcctccctgagctcccatttcttcatggaggggtgattgtgtctgcctgcctcataggatcatagtgagtgttaagtgagtgatgatattaaagggtaggatttactgagccccctgtgccaagcgctgtgctaagcaccacagtggagataagacggacagatgatatcttggttaaagcacctggtacctacctgggttcaactggaattactcaggagagcaagtgcttttcctctgagcacccatggtttctctctggagctcttgagctctgcctctctgggtcctctctgggtcccaagaggcctctgcccctcagccacctactcaggcagctcctcatcgcgtagcgtgcccccatgtgtgctacaagctgcaggggcctgactggtgcctgagtagggccctgggtgaattccccagtaccctagccttccttgtagactaccctccctacctccactcctggatgcagcctcagccctcctatctttacagagaacttctctgggatctactgcagccttctgcctttgggatgctggtcagctgacagccagagagtggtctttgactcggctcagcgcagccggcaggtgagggacgctgattgtgttgaggggcagcccctgtggtcaacccccaggagccctgggggttgcatgtgcatgcccctgggtggaatgcccagccacaaagtctcatcagccccttaaaaccctgcctgcccatcctggactcatttctcctggaggggactggctgccctggtgcaccacagcagaactcaggccttttcgtctgaggcagagatgcaacccctcccaggcatttctagctgggggtcaaggggactgccactcgggtgggtccctgaacactctgtaatggcagctgatggggacaggactgaggccttcccccagggatggagtaaagccactcacagtgtgccaggctccttttgggtgtgatatttggtccttgtgccaactcaaaggggctcaaagccattccttaccttgcccagggtcacccagcaagttgtgatggtgctgggatttgaacccaggccctcacactactccctactgcactgagtaaccatcaccatagctgtccacagccttggtctggccagggctctccaagagggtagagaggaggtaggggagggayccataggtagagggagtactcttggatgtggtcgcacctgtggccttgcctctgcttcaggacctgtttgctgtggacacccaagtgggcactgtgacctccctcacagctggtgagcaaggctttggggatgggggtaagggcagggctggtgagcaagccaaccaggcagcgggggactggagctccaacatgtggggcagtgatggcattctcagccactcagcaccactgactgttccacagcctttactaacaggtcccsaaggcccctgtctgtgcagacccttacccaaccaacagactagcttccctgctctactgccctttagcactcaactctgttccatgtgtcctggcccagcctcagcacggcccccacctctgctcctaaaacccacaaaactctctcttatcaagatctgccagactcatccttctcgctctgcaaaccttgggtgcctgtctcaggcagaggcagctctgccacctgagggcccaggaaaagcccagtgttgactcccccgtcttccccatacttaggcctggtgattctgcctttgaaatgtgttttgagtcctccacctgacctgactgtatccgctcctccacaaagctaccaaagtatcattccaaagctacatctcattgtacaactgcttggacaccactgccccaaatcagcacgctccccgacccccaacttcccggtcccagctgccaccctgcacacagcagccatcgagggacaggcagatgtgcctgcatggtctgatgtgtcttaaggtttggcagttcccagcccagccagtgtctgtcagatgaacaacagactgagagcaggaggctcacccggggccatgtgcagttgggtgtttgtgaaaggcacttctcggggagaaaagggcacctttccatagagtctccagcctgggactctgttacagagaagcaggtaagaaaggtgatggctcctgctaagcacttaatggcatctgccttttccaggagggtcaggtgggagctggaagttgctcacaattgaccaggacctcatggtggcacagttttccacacccagcctacctccaaccctggtgagtgtcggtgggtcccaggctgtggaggcaggggttctgggcaggcagagctcaccaggtcagggaattggccccagagtctgacctggctggtcagcatacagacgggccaagacacaggcccagcttggcatggtccatgagggtttggcactcacagggacgaactactaggctagaatctgctccgtacaaaacaaggtgcctggggaagtgctctgtcttggtattacagagcaaaggagacagcagagcctagaagctgaggagggaggggtgtgcctgtgtgtgattgtatgagtatgaataccttggtatataccatcccacaacaggaagccatgctgtaccttctggaggtgggtagagggcccagcatagtgagagctgcctatttcccactgtgggcagaagggaagggcagggaggcagccaggccacctatgacacattctttccccttggcagaaagttgggttcctgccttctgcagggaaggagcagtcagtgttgtgggtgtccctggaggaggccgagcccattcccgacatccactggggcatccgggtgctacagccacccccagagcaagagaatgtgcagtatggtgagctgggccaggggcagagggatgccttctccaggttccccagcacaaagcctctgcggtgacctttgctacctcctctctcacattgtggggtttctggtgatgacctctaagaggttttctgttcctcttgtggatgggcatgggaagtagcatctagacatctgagcgcctgctctggatatcacctgggcttcaccaggccaaatcatctgtggttggaagacccaggtccaaagaaaataggcctcatacaagcctcagtgaccacacctcatcccgaatgctgttgctgcaggatggggttccctgacgagggcagaagaagtatgagccttctggggtccatgtgtcatggtgtggactaccttggccaggtctctgacccagaggtcagccccacacctgcagctagagatggggccttagttggggaagcccctaggctcaccctgctgactgctgccctctccctgcagctggccttgactttgaagcaatcctgctgcagcctggcagccctccagataagacccaagtgcccatggtggtcatgccccacggtaggcatctggcgttaagagcccttgccctcccagccctcttcctagctggccctttcaccctccgctccctgtctgcaggggggccccattcatcctttgtcactgcctggatgctgttcccagccatgctttgcaagatgggctttgcggtactactaggtgagtgagcagggacccacagttctgttaggactacagtggagtgacgggggtggacctggtttgtataagtaccatgggtgccactctagtctccaggactttctctagcctagacctagtaaccactaccaggaactgctggggcccagcctctggttctgtggcatagtgrtaacaaggactaactcgggacttccaaggaaagggcgctgtggtcactgggtggcagcctcaaatctctgagtcccttccccttgaccccttgacagtctgtggtatagctggccccagggcctacttcacagatgtgtgaaaagagcgtcgarggggctgggaatgttgcctgactacactgtctggtccctccctgccctcagtgaactatcgtggctccaygggctttggccaggacagcatcctctccctcccaggcaatgtgggccaccaggatgtgaaggatgtccaggtagcaggggctggggcttctggacaggctgaaacatgggctgccagggggatgcctccattcagctgagcgggyagctggctgcagcatgctttgtcccaccctgcagtttgcagtggaacaggtgctccaggaggaacactttgatgcaagccatgtggcccttatgggtggwtcccatggtggcttcatttcctgccacttgattggtcagtacccagagacctacagggcctgcgtggcccggaaccccgtgatcaacatcgcctccatgttgggctccactgacatccctgactggtaggcatacaccacaggtccctgcccttccctcctctacctcaaattctcatggagccccgtagccccagaattcctggggctgcaacagctcggtgtcttgcaggtgcgtggtggaggctggctttcctttcagcagtgactgcctgccagacctcagcgtgtgggctgagatgctggacaaatcgcccatcagatacatccctcaggtatgcagccccctscttgccctgtgtgctgcccatccatccagaatccagggcccagctcaacacagctccccactcttccccaaacacccaggtgaagacaccactgttactgatgttgggccaggaggaccggcgtgtgcccttcaagcagggcatggagtattaccgtgccctcaagacccggaatgtgcctgttcggtgagtgcagcatgaaggccctggcagctggtgggcaggtgagcacaggaggaccctccaaccttaaatgttgctgactaatccctacaggctcctgctctatcccaaaagcacccacgcattatcagaggtggaggtggagtcagacagyttcatgaatgctgtgctctggctacgcacacacttgggcagctgaagccctgccattctgcatgagctgatcagcctgtgccacacttcgctcttgaggagctcaacggtctggcagggcagcaggaggctttytgggctctggactccacggatgcrtgggcagaggaatgtgggctatgtagtcataataaattaggacacagagcctggttcctgctggtactttgtaccaaaccatccccaaccccacctcccactctggggtgcagagaccctaggttctgggtgtggcagccacaagggcttcatctgcctccagtgtgagaagggagggaacagtgagaggcttagcctctgcctgtcctggcaaccaggactctgtaccagcctagcttccctgctgcagccccttccattagcaactactctgtaccacccttcccaagagtatgtctggaggactagtgtgaggccctgtctttccacggcacccatgggcaaaagtagtcccagggacattgccttggttggggaagcccctaggctggacagatcacctagcccagggtgtgctgggctcaagccacccgagccctagcaaggagtcactgacacatttcctggaagcaaaggctaagaagcatctgtacaggcataaagaggaaacatggctttatgtctgacaagaagttttgtcctccccaaggcatatggcrtcaaggctgggcctaacccagtctcatgaccttgtgaatccagtccacaaacacagagacamgygtgaagacagctggccagcrggaccttgyrcatactcrgttggggattmtaattccttycaggacccagcagttgtgggtaaagcaggcaagtrggcccccgtagtcacyctggcaggtaggagaactgatgagggcccyrggccacagcmatgactagcctgcttcatgataaaatagttcatttctagccccccatacccttccagggctggcccagggccctgcyaccaacctcacaggsccccacaggggccaacagtccctcagtgcacatctcactctcmcgcacacgtcctcggtgcttgatgttacactcctggttggagatgacrttcagcaaggccacatttaggactgtgtcattacccgtacctgcagtgaggggaatggggagagggagagggtcctgcaggaagatccagggctgggcctcctggccaccagcagtcctgtgcactgtgctcttacctttggtctcaccccrgcctgcaatctcacacttggtccctggaggcaccacataycattcagggggcaggcagatcagggccacacgctggttcagggtcacagatctttarcaagaatgggggcactcagggtctgaggccacaaggcccagccccacctcacaycctcccaggktgtccacatacctctccagcttgagcaggacaagctgrgagcctgagggcccacacascatcttggctactgggacccgctgtaggcttggctctccatgctgtgggttctggaacagggtgcccaaccatacctcatagcccgtgagaggcatatggctgggagagaagctctgctaggtcatttgtgactctcagtccattgccccaaggctcacttgttagcttgcctggggaagggggaaggtgggatgagactgggtccccaaacacaagggaggctcaccaggaggagaagcactgccgggcagtcagtatccactgctccttyactagagaccccscgcagaaatgctggccctgcctagaggagtggggaattaggacaggtaacagactcctgggacagatgctagacctgccatcttctggctaggacctctgggggcagggatagattcccagcccccagtgggataaccacagaggacacaacctcagctcctctctgtgggagacaggcagttgtgcctcaccrattccscaagctgactgtccagggtgagttgcccggatggcccccarccamgcgcagcttggaacgccgctgatccagccgatccaccctcttgccacacttctcaaactgcacctggtctgtaggatggggtgggctggatgaaacccagactgtgtggatgtcgtgggctaaagggcctgacccataactggcccaactcstaacctggggggtccaggattgatggcggctggtcatcagctgaaagacaaagttcactgsggttaagggagccagcctttgggtgrgggctgaggyarggtcatgggggaagcgtcactagtgctcaccgcagcgtcgcagggcacagtagtmgaatggggtccttgggtccatcgtgtagcaccagggcccatrgctatcccyatctgggttcyggcagaagttctcctccagttgtgcatgyggttcggaggtaaacgtgaacctaggcggaagcgggagcaaaatcgtggcagggtagtctcaaccatttccaggctctggtcccagacaccaaagcatgccgccccagggttagggccctggcggggccrggagcaccagggaytcactgcrgcttgtgcggcgtctcagcggacsmgcgctggcactggacacccttgcgggtcttgctgaccgtgccgcggtactgctcccctgcgccgtggtagcagtctgtggcgggtgcgggcagccatcaggccgagacctcgccccggccctccggttccaggcttccagcccggctctgtagcccccaagcttgggcctcaccctggggccgcacgtcgtctgtacaacrccgkatctggtagcaaaagsccgcgcgcrtgccgggccgcagkgtgaagcaccagggcgcctctgagccgtcgrggttccrgcaraagttctcccgaaggtctctaagcaggcgctccactcagccctagcccgccagcctccagccttgagcccgtgactaccttcctcccgtctcacccgcagcagcacgtcccaacgcccgccccccccccccacctcacttgcacgcgtatttttctggcgtaaatcggtgctgatghgggatttgcgcgtcccaacgctggcaaggtacgcccgcagtggtggtattggctgtgccccggtagccctcacccttcccgcggaagcagctgacagttgtggcctcttggcggggctgtgcctcggacccttagatggaccgagataggtcsggccccgagcgagagctgagatccctctggggctgggaccaaacccgcctttcccaggtgtacggtactccacggggtatgctctcaggtcacgcccagcccctcttacctccccggccaagccacgcccctccccaaggttcccaggtaccctcccaggcctggtccccgccgcctaccgcagcgggggaggtcacagaaytctcgctcgatctgcggatccgtagtgtagcaycatggccgctsggagccgtcaggaytccggcaatagttgtcgtccagaccttggtcgaggaacctgggggcggtaatggggcgtgaacaagaccctgggactctggcttatctggccccgcccaattgccctacacggagccctgcccctggagtcctggaccttccctagcccggcccccaggacgccgataccgcctacgcgtacttgcccggctcgaaggggtgctggtgcgggtgctgaagatcccagcgctggcactcgcgccctgactccgtgcggtctaccgcgccgcggtattcctcgccattgcaccagacacacgcggctggagacaaagagccagtgggttcgtggatggacgtgggcttgyccctccactctcccagcttgacccggcgccgcttaccctcccggcaggatttgatgcygcagctctggaagcgcacagcagggtctgttgtgtagcaccaaggacctccggggtcgccatcagggttayggcagaagttctcttccaggccattccggagagtgggcgtgtacctgagggcccagagcatcactatagtgtgtgctgggggaaggccccaggccgggacggagggaaggtgtttgtcycactkgtgatcrttygggaacttgtggctccaagcctggcagggcaggccacccacggtcgtggccatggtgccccggtacccaaccccattgttcatgatgcaggtccgtaygtagtctgggagcaagagacagaagatcaacttgggctgaggtcccctgtctcccaccctgcccctctccacccccacttgcctttctyctggaagaggtcayagcgcccagaacgccrcagcctygtgtggggygagtgttgagtccatggcagcagttggcaaccatggctgctcacgttgtagtggaasgccctggagagaagaaggcacagggtaacgccacagcccaggcttccctgcccccagtcttatctakgcccagtggccactcaccrgcagtccattaagggcccacagcgaccagcacactcttcagcatctgccacatcctcctgccaaggccygggcaccaccgcatgtagcaggtgctgtagctctgtgccccggagcacttggaagtcattcaatggcgagcgctgccctgcagagtaggcatgagtgggtgcaggtcaggtgggcatacatgtcagtaatgtgtattggcatgtccacactttgttcattcaggggatcaaagctacaagcttctgggatggaccctgtatgcactttcaagggccagtctagccccctgcacagatacttgtgaaaaaaatttcccctgggaagcaggcccagacttggtagttatcaccggtgcctctgtttagtggcccaggcaccgggctcagatctaacacatacgctctgtgagagcagtgggtgatgaagcttgccccacctcatctctcaaatgagaatgctaaggctcagagccatcacattacccagccaggggccctggctaggcattcagactccaaakctgggctctcacctgcacaaaggcatatgctaggttagaggggtagatcaggctcaggaggggtcactgcctgctgtgtgcgtgcatctgtgtggtcctgacactgcttcagtgctagagcagacgtgctaatagaggcctaagtgggcaatgtctatgtgttcctagggcttcccagctgtgctcaagagggcaaggtcactgccccatgcccactgagcctctggctccccgacttttttctcatcctagaataggagaatggggccaascccctcctgaaggcagatggggatcarggttgggggcacttaccagggacccctaagcattgagtcagaagcagcaggagtgrgagccaccccatccttctggctggaggctgcactgtgacccaccacagccccatccgggaagttgyraaacctgtccctacgggattgggtggctctggctccacacgtcagctcagggcctgctggaccctgacctgagacctggtgacaggagccatgaggggccaggcctcaggtcccataggtcagttgcaagggcctagtacagcttagtggacaggtgttaggaaggtttggtggggacacttgaggtgccctggggttggggtgaaacccctctgcagcctagtcagcccaagggcattgtgaaagtgagagctgccagaggtctgggctccagcccctgggtgacattaaacttttctgaatttcggtttttccctgtaaattggggaaaattacttgccccagcttcaacactgcctcccctccacccttttgctgctgccttatcaggccccagctgtaggcaggtcagcccacacccggcggcagagcccagagaggctcgctcatctcagccgccagaagtgtcatcccagggaaggtgagcgaggctgtccactaggactaaataggggtggaggtaacaggtagcagggactctggcaggaacggcctttcagacgttttaaggaccgtctgagcggggcctctaagtatgggtaggagacaggcggcctagggattccggttagcatgtcgcgttctgccgcagcagggctgggagcatccccagggcaggcggaggtcggaggtggtgaggcctttcggcgaagctgaggcctggaacaacccggtgggaagccatggagggggtcccctagcggaggctgggcgcgggccagtgcgcgtgcgcggctggaggctcagcgcgcaagcgtgcgcgtgatttggccctgaacggacrccgtagccragaggttgggcggatgttgtgarccgggtcgckgcggccgaggctcsgggtgagtgasgggcggcagggctctgagcctggcgggttccggctattcccttcgcggtccgggctagtccagtgcgagggcacctgcagcgcagggatctgggtgcgaaactccgagcggaagctggtctggcaggtcctgtggagcttggggccaggcgggggcgacttgggggagccatgcgccgccctcgccgtccttgggctcccagacggagtaggttcagttctgagtccggataccccggcggggttggacgggatagccgtgacagggagtccccgggcggggacaaggtccgcctctcacctgggtcctcagcaactgactcccggagcccactccgggtgtctggaaggtctgctcatcaaatgaatgactgagtttaatcagatcttcaactactctggtagtgaaggggcaccgatcatggacgcccaccgagggcccgaggtcgggaaaatcaccttcccgaggagcaggcgtggtgcagacccacaagggtttgtggcgggagtagagggtctgtttggggtgagataagagactgaactgcagagtagggagtgctggctaaggcagtgctgcagagcgaaactctagacctgcgctgtctaatagaactttatatgatggtgggaacgttctacctttgtgctgtccaacagagtaaccattagccacatgtggtcattgaactcttgaaatgtggctaaggcaactgagaaatcgaattgttaatttttaaaactttaaatttaagtaacctcatgtggatgacggctgctgtgttggacagcaccgctacacatcagtgaggccagca

SEQ ID NO: 93925 - DNA, 20550 bp, Homo sapiens
  misc_feature (1)...(20550): n = A,T,C or G
atcctcccacctcaacctcctgaatagctgggactagtggtgcacaccaccacacctggctagaggttttttttggtgtttgtttgtagggacaggttcccactatattgcacagagtggtcttggactcctgggttcaagtcaccttcctgcctcatcctcccatggtgctgggattacaggtgtgagccagcacgcccagctcacatgactttcaaacaatacatccttaatcaataggtcaaagaagaaatcaaaagggaaattaataacactttgagatgaataaaaatgaaaatacaccaaaatttgtgggatgctgtaaaagatgaactgagagggaaatttataactgtaaagacctgtattttaagaaaagatctggctgggtgcagtggctcatgcctgtaatcctagcactttgggaggccaaggtgagaggatcacttgtgcccaggagtttgagactagcctgggcaacatggtgaaccccccatctctaccaaaataaatatacaaaaattatcccggtgtggtggtgcaggcctatagtcccagctacttgggaggctgaggtgggaggatcacttgagcccgggacacagaatttgcagtgagcagtgatcatgccactgcactccagcctgggctacaaagtgaggccctgtctcaaaaagcaaacaacaaaaagatctaaaatcagtaatctcactgtatacctgaaagaactagaagaagaacaaactagtctaggcaaggtggttcacacctataatgccaacactttaggaggccgaggcaggcggattacttgagtccaggagttggagactagcctggccaacatggtgaaaccccaactctactaaaaatactaaaattagctgggcatggtggcacgggcctgtagtcccagctactcaagaggctggggtgggagggttgcttgagcccaggaggttgaggctgcagtaagctgtgatcgtgccactgcactccagcctgagtgacagagcgagaccctgtctcaaaaaaaagaattataagagggtatgatgaacaattctatgccaacaaattatataacatagttgaaatggataaattcctagagacacaaaaactaaacaaactgtctcaaagaagaaatagaataccttactataactagtaagggtattgaatcagtcatacaaaatctcagccgggcacagtggctcacacctgtaatcccagcattttgggaggccgaggcaggcagatcactggaggtcaggagttcgagaccagcctagccaacatggtaaaacccccgtctctactaaaaatacaaaaatattaaccaggcttggtggcacatgcccataatcccagctacttgggaggctgaggcaggagaaccacttgaaccagggaggtggaagtttcagtgagccgagattgcgccactatactccagcctgggcaacagaccgagactctgtctcaaaacaaaaaaaaagaaaaaaaaaatctcggctgagcatggtggctcacgcctgtaatcccagcactttggaaggccaagatgggaggatcacttgctttcaagaatttgaggccgcctggacaacatggtaagaccccacctctataaaatttttaaaaattagctgggcgtggtggtgcacgcctgtggtctcagctacttgggaggctgaagtaggagaattccttgagcccaggaagctgcagtgagccacgtttgtaccattgcactccagcttgggagatagagtgagaccctgtctcaaaaaaaaaaaaaaaaaaaaaaagaaaaatttatttggcttacagatgtctgggctgtacaagaagtgtggcagcagcatctgcttccagtgaaggcattaggctccttctactcagcagaagacaacatgcagctggcatgtgcagagaccacatggtaagagaagaagccaatgggggaatgcaatggggggacggggagacacacacttttttttttttttttgagatggagtctcgctctgtcacccaggctggagtgcagtggcgcgatctcggctcactgcaagctctgcctcccgggttcacgccattctcctgcctcagccgcccgagtagctgggactacaggtgcccaccaccacgccccgctgattttttgtatttttagtagagatggggtttcaccatgttagccaggatggtctcgatctcctgacctcgtgatctgcctgccttggcttcccaaagtgctgggattacaggcatgagccaccatgcctgtccctttttttttttttttttttgagacaggggctgtcacccaggctggagtgcactggcgtggtcatggctcattgcacctttcacctcaggctcaagagaccctcctacctcagcctcctcagtagctgggactaaggaagtacaccaccatgcccagctaattattttttttaagatgcaatctcactctgttgcccaggctgcactgcagtggtacaatctcagctcactgcaacctccgcctcctgggttcaagcgattctcttgcttcagcctcctgagtagctgggattacagatgcctgccaccaggcccggctaatttttgtatttttagtagatacagggtttcgccatgttggccaggctggtctcgaactcctaacctaaggtgatccgcccatctcggcctcccaaagtgctgggattacaggcatgagccaccgtgcctggcccatgcccagctaagttaaaaaaatttttggctgggcaaggtgattcatacctgtaattccaacaatttgggaagctaaggcaggcagatcccatttgagctcaggaattggagaccatcttggacaatatggcgaaatcctgtctctacaaaatatacaaaaattagctgggtgtggtggcgctgtgcctgtagtcccagctactccagaggctgaggtgggaggatggcttgagcccgggaggcagaggttgcagtgagccaaaatggtgacattgcactccagcctgggcaacagagccagaccctgtctcaaaaaaaaaaaaaaaaagctctaaaaatagatagtggtgatagttagttacacaacattgtgaatgtacttaaatgtcactgaattatacacttaaatgtttaaatggtaaattctatcttatgtatattttaccacaatttaaaaattttatctatttctattttaatgagagttttaaaaagcaggaatggatattgaatttccttaaatactctttggagtctattaaagatagcattttacttcaaaatccagccctggtttctgtacctagtacttctgtcacaccagtaaatgttattgaatgaaaacaaacaaaagaccataaagacatacctcttcacgttcactaggattggtgtcatttttttaaaaaaaggaaagaaaaataaccagtattggcaacagtgtggatatatagaaatttttgtatattgctggtaggaatataaaatagggaaaacggtttggtggttcctcaaaaagttcaacataaacccaggcgcggtggctcatgcctgtaatcctagcactttgggaggctgaggtgggagaactgtttgatcccaggagtttgagaccagcctaggcaatatggtgagacctcatctctacaaaaaattagctaggcatggtggcgcatgcctgtagtcccagctacctgggaggctaagacagaaagatcacttgagcctggaagggagtttgaggctgcagtgagcccagattgcgccactgcactccagcctgggtgacagagtgatatcctgtctcaaaataaataaataaataataaacaaacacagaattaccatatgacccagcaactctactcctgtgtatatgcccaaaaaagctgaaagcccaggcgctgtggcttacacctgtaatcccagcactttaggaggccgaggcacttgaccccaggattttgagaccagcctgggcaacatagtacttgttcaagaatcaggctgggcatggtggctcacacctgtaatcccagcactttgggagggcaaggtgggaggatcacttgaggccaggcattcgagaccagcctgggcaagatagcaatacccacccccaatctctacaaaagcaagtaattaattaggaaattagccaaagccaggtgcggtggctcacgcctgtagtcccagcactttgggaggctgaggtgggcagattgcttgagtccagagattcgagaccagcctaggcaacatatcaaaaccccgtctctactaaaagtaaaaaaagaaaaattgcactttgggaggccaaggcggggggatcacctgatgtcaggagttcaagaccagcctggccaacatggtgaaaccccatctctacaaaaatacaaaagttagccgggcatgatggcagtgtctgtaatcccagctactcaggaggctgggtcggaagaatcatttgaatccaggaggcggaggttgcagtgaaccaagattgtgccattgcattccagcctgggtgacagagcaagcctccgtctcaaaaaaaaaaaaaaaaaagaaaaattagccagatgtggtggtgcatgcctgtggtcccagctactcaggaggctgtggtgggaggattgcttgagcccaagacactgaggctgcagtgagccatgatcacaccactgcactccagcctaggcaaccagagtgagaccctgtctcaaaaacaaacaaacaaacaaaaaccactttaacagggtatggtggtgcacacctctagtcccagctacttgggaggttgaggcagccggatcacttgaccccaggagatcgaggctgcagtccagcctgggcaaccgagtgagactgtctcaaaaagaaaaaaaaaaaaaaaaggacatagcagcactattcacaaatccaaaagttagaaataactcagatgtccatcaacagatgaatggataaacgaattgtggtatatacatataatggactattattcagccattaaaaggaatgaaatattgatacaggctataaactctatgaacattgaaaacattctaagtgaaaggaaatagacataagaggtcacattttgcaattctttttttttttttttttttttttgagactgagtctcactctgttgcccaggctggagcgcagtggctcgatctcagctcactgcaacctccatctcccgaattcaagcaattcttctgcctcagcctcccgagtagctgggattacatgtaggcatgcaccaccatgcctggctaatttttgtacttttagtagagatggggtttcaccatgttggtcaggctggtcttgaactccagacctcaggtggtccacccgccttggcctcccaaagtgctaggattacaggtgtgagccaccatgcccggccacatgtatggtaattattgaatgtgtttggtatgttcgttgtgggtgatgaaatattttggaactagatagacgtgatggttgaacaacactgtggatgcactaaatgccactgaattgtacactttaaaattgttaactttatgttacatgaatttcacctaaattaacaacaacaacaaaaaagaacttaagacagcacttggtttggctattacgtagtttcgtgacaaacagtggtccatctcccagagaactggccccaggttcctaagaaggcaaaaggagacacaggacctctctgcactattttttttgcaacttcttatgagtctataattatttcaaaataaaagtctaaaaggaaaataagaacatgtgtgaatgtggctgccccatgcctcccaccctcaggtctgacactcagagactgatcacctcttgagagtcctggaactcatcccaggttttagaccctgaatggcctgtctggggctggcgtctggaggcaggatcaggagccagctcagagcatagtttaactttcacttttcttttctccagaggagccaggaagagagctgtgaccagcagcgtcccttattcgcttggccttggttcctgtttgcactggctacagcagggcactggcccctactgtcacygccacctacacaaagaccctatctctgagcgctgcagcctactgttcagccccaggtttgaggatggatgccctggacgcttcgaagctactggatgaggagctgtattcaagacagctgtgaggcccgaggtggggggtggagagtgggatggtcttcagaccttgatctacaactgcttgccttctgcttcccatccacaggtatgtgctgggctcacctgccatgcagaggattcagggagccagggtcctggtgtcaggcctgcagggcctggggrccgaggtggccaagaacttggttctgatgggtgtgggcagcctcactctgcatgatccccaccccacctgctggtccgacctggctgcccaggtaagtgtcctggggctatgggctgccagaccaagtggggcacggcccaagaggagtgtctttgctcaggctgcactggctctctccctagtttctcctctcagagcaggacttggaaaggagcagagccgaggcctctcaagagctcttggctcagctcaacagagctgtccaggtcgtcgtgcacacgggtgacatcactgaggacctgytgttggacttccaggtcagctcaggcctgcagccctcaagagcaggaagggctgggcaatggttttggccctgctgatcactgtgtccacccaggtggtggtgctgactgctgcaaagctggaggagcagctgaaggtgggcaccttgtgtcataagcatggagtttgctttctggcggctgacacccggggcctcgtggggtgagtaagactgcctgcccagcctaccatattacagccagcaactggcctcatgctgtcctcagctccaggcttgctccagtgcccctccaaccagcctcaggtctatcccagcatgcctttctgattctggtccccagtcctgccctctggttcctccaacctagcctccagacctgctccagtaaccctctcaaattctagttcccaagcctctccttgcattcctttcccaattctggccctctggccctgccctagtatcccctatccttaagtacaatctgtaagccacctcagtgacccctaccaccccatctcaggcagttgttctgtgactttggtgaggacttcactgtgcaggaccccacagaggcagaacccctgacagctgccatccagcacatctcccaggtgggtgctgagctgtaggcattcacctgctgaccaaggagaggctgccagggcctgtggaaggcaggtccaggcaaccctgagccaagcctcctcctacccagggctcccctggcattctcactctgaggaaaggggccaatacccactacttccgtgatggagacttggtgactttctcgggaattgagggaatggttgagctcaacgactgtgatccccggtctatccacgtgcggggtaagccaatcccattccaattccaggtgcagggcccaagcctccactggaagtgagcacagcctggcccttgggatgggtttttctccctccaccttctacaaggtgcagcaaggtbtgggacacagatgcaagataggatggggtgtgggaactactcaggctcaaggatcattactgactagactggaactccctcagaggatgggtccctggagattggagacacaacaactttctctcggtacttgcgtggtggggctatcactgaagtcaagagacccaagactgtgagacatgtgagtgcaagtgcatctgaggtaggggagcttggtcgccttgaggggcccatagcattctggactagaccctgagccaggtgcccttgcagaagtccctggacacagccctgctccagccccatgtggtggcccagagctcccaggaagttcaccatgcccactgcctgcatcaggccttctgtgcactgcacaagttccagcacctccatggccggccascccagccctgggatcctgtgagtagtcctgttgctcccacccccagcctctgtcatttattggggtcccacctgccagaggcaacaatgaccattcacaaatccaagtctgatctcccaacactgcagcctttagagtagagactggttccatggaagtgccaggcacacatcctggggactcctgctacaccccgacccctcagatctgtgctggaagctgcactcagattagtgaagcctcctggactgctgtctggtactgggcatcctctggtggtgctgtgcaggctggcagcagggccaggccttcccacccaggcttctgcttcctcttctgtggaacagggtggatggagggtggctggaaggatttgagtcaggagtagagctcaggctggggctactatgcccacagagtcctaccaacaggttgatgcagagactgtggtgggcctggcccgggacctggaaccactgaagcggacagaggaagagccactggaagagccactggatgaggccctagtgcggacagtcgccctaagcagtgcaggtgtcttgagccctatggtggccatgctgggtgcagtagctgcccaggaagtgctgaaggtgggcagaggcataggtgtggggggtactgggaagatgtggagatcagtgtgtgtgtcagagggcacccagcgctagagagcagccctggagccttcaccaacctgggtgaagcctccagccaggatctgaggggggtcaggaggtggcaggagtgcccagcctgaagtgctgcccctaggcaatctccaggaagttcatgcctctggaccagtggctttactttgatgccctcgattgtcttccrgaagatggggagctccttcccagtcctgaggactgtgccctggtragagcctgggataggggtgcaagccttgtccaaaatcaggactaggggagaagcatgaggaatgccctccaggtcctgattcagaaaactcagtataagaaggagatgcaggccagtagccatcactgaccccgtctctgtcccctagagaggcagccgctatgatgggcaaattgcagtgtttggggctggttttcaggagaaactgagacgccagcactacctcctggtgagctgtggggtgagactgggggtgcctttgggagagccagcccagcccctctggctaaggctgttcctgccaacaggtgggcgctggtgccattggttgtgagctgctcaaagtctttgccctagtgggactgggggccgggaacagcgggggcttgactgttgttgacatggaccacatagagcgctccaatctcagccgtcagttcctcttcaggtcccaggacgttggtgtgagtgctgacccctctccacactcctgcatcccagaccgtcctcccatacagcttcccacccaacatcttcctgccttcttcccagagacccaaggcagaggtggctgcagcagctgcccggggcctgaacccagacttacaggtgatcccgctcacctacccactggatcccaccacagagcacatctatggggataactttttctcccrtgtggatggtgtggctgctgccctggacagtttccaggcccgtgagtgcttgacttcggaggtcagtcccttgcccacagctgtgccagtcccanttctgacccactgctcccntgccagggcgctatgtggctgctcgttgcacccactatctgaagccactgctggaggcaggcacatcgggcacctggggcagtgctacagtattcatgccacatgtgactgaggcctacagagcccctgcctcagctgcagcttctgaggatgccccctaccctgtctgtaccgtgcggtacttccctagcacagccgagcacaccctgcaggtaggaagcaccctggagactcccaccccacccagctcagccytcagctgcagacctgttctccacctgatacctcattcttcctccctcctccacagtgggcccggcatgagtttgaagaactcttccgactgtctgcagagaccatcaaccaccaccaacagtaaggccaccaacagaggcagatgggagtccagggctccaagcatgagtctgcaggactcagtctcacacttcctcctctctctgcagggcacacacttccctggcagacatggatgagccacagacactcaccttactgaagccagtgcttggggtcctgagagtgcgtccacagaactggcaagactgtgtggcgtgggctcttggccactggaaactctgctttcattatggcatcaaacagctgctgaggcacttcccacctaataaagtgtgtggctaggggttgggacgctgggggctcagggggaccagactgagcccagcagcttctacttacctacctaggtgcttgaggatggaactcccttctggtcaggtcccaaacagtgtccccagcccttggagtttgacaccaaccaagtgagtgggattctgtagggagctccaagatagagatgtggcccctcagagcagaggtaggcatttctgcattctgcagagatgcacagatgcccagagagagccatgcttgtgcatatatgggtgtctacatgtgaggcaaaggcaggcactcaaacagatccacaaatrgacagtgacccccaccccatgcacccatgcctctgttcctgctcttggtctggctgcaggacacacacctcctctacgtactggcagctgccaacctgtatgcccagatgcatgggctgcctggctcacaggactggactgcactcagggagctgctgaagctgctgccacagcctgacccccaacagatggcccccatctttgctagtaatctagagctggcttcggcttctgctgagtttggtgaggctcctggccctggcccctcatgctgtctttcaaaggcctgaacctgtcctgtcctcagcctgtgctgcagaaggaagatagggcctaggggatctacagccaatttgctacctctcaggcctcctaacctcactcctccatagtttcaggcttatcctctggtccctcagtaggtcttctccctgctgcctaccccacatcccagttcttgtggcagattcttggcaaaataaataagtaaataaataaagtccattggttcctggggagtgtctagctatggcctgcaggtgaggacagggtcacagaggtcatgagcacacatgggtgaagactggggcttctagaggggagattgtagnattaattaagggggcttcttgatttgatcagggaatagtaagtgacaggcttggcaaagaccaagaataggcacagggctccaagaagagtgcaggagacaggggctaaggactgcctcaacatcccctcccctgacaggccctgagcagcagaaggaactgaacaaagccctggaagtctggagtgtgggccctcccstgaagcctctgatgtttgagaaggtgggtgcccaagtggcagtgaggagtggggctggggagtttgtggagaaaggtcaggagctaataaggtagttttggagccccttggcctgaattccacagctgcagtgttaacactactttgacttgggccttacaggatgatgacagcaacttccrtgtggactttgtggtagcggcagctagcctgagatgtcagaactacgggattccaccggtcaaccgtgcccaggtaaccccaccccttgaggctkgggcctggaggtggagggcaaaccctggccctacgccttgggcccagaccaaatctcttgtycttggcagagcaagcgaattgtgggccagattatcccagccattgccaccactacagcagctgtggcaggcctgttgggcctggagctgtataaggtggtgagtgggccacggcctcgtagtgcctttcgccacagctacctacatctggctgaaaactacctcatccgctatatgccttttgccccagccatccagacggtgagcccatgataccccacccttagccctactaggcctgggtttcccctgcacctgcccatacaggccccaatctagctgccggctctcactgaaactcagactgtgcagaagtcctgaagactccctccagccctcttcctgctatgaagccaggctgggacctgtcagacacaggaagcagccgtcagccatccccacccccaatcctccaaagcccaggatctgggggagctgcagctttaactcattagtggagccagacatcccccacagtcccctccttccttggagtacccctgaggggtaggtagtggggaggggaccagggcatcagccccagaaagagtctagcttccccctgcatggtacgggggccctggcctacctcctacaagctgagttaaaaggtaataggcttgccactagaggtgtggggtctgcagccctgagtgtatttgtgtcacagttgtgagtgcaactggggtctgggcatccccggagtgtgggtatggaaggagcaagtttgcacatctgtgcatcagatgggagtgcagggctcccatcttcctgtgtcctcaatgtgggcatgcatggagatgcatgtgggcacacatgtgtgtgttcctgggcttgtgggcatttgtgttcctgtgactgcagcgctgtgaatgcctccagccttgtgcccaggctctgcagttggcatttccttggggcaaggatgagggtagaaggaatgccctcatgaggggagagggcagaggtcatgggccagcactgggtttctgctgagcagcctggggtccctctggaactagcacacagagcccctttgtgaggcaccctgcctctaaccagcatacaggctgcctttgtccacagagtgaagcaggtgaaggagaagcccccatctcacctctagcctagtctcagcttgaccccagtgtgttttctcaggggctgataagcaccccctgtcctggtctctagatacctgccagccatccttctgtccttagctctaggtcccagaaccccaagactcttggaaggaaggaagggacaggaggaggaagcctctatgcattgtatccctgctggggtctctgggacagtggggccctggtggtcactgtgccctttgcccctgtgtcccaatgagtagcccaaggcactggcagtacatacaagattgggggacaggatgtgccccccagctcccagccttgtctttgaggaacaagcagctttatcagaggctgcaggggccctgctctgggtttcctcaggaagcaccaccgccgcatcccccactctcacaactggcccatgtgatggatcgtctgtttccctgtgcgggccccatagccccatttcctgtgctggccccggcctggacggggagggggctgagactctgggcccagatcccacctcccccccaccccccaccccctggctcctgtttcctgctagtccagctcttcccctaggaaaggctgctggtaactgggatgggggttggggggaggtaagaagtctctgactcctcctctacctcatcccagttccatcacctgaagtggacctcttgggaccgtctgaaggtaccagctgggcagcctgagaggaccctggagtcgctgctggctcatcttcaggagcagcacgggttgagggtgaggatcctgctgcacggctcagccctgctctatgcggccggatggtcacctgaaaagcaggcccagcacctgcccctcaggtgagcccacttgggctttagacaggccccaccagtccctggaggctggggctagggaccacactgccttttgtcttcccagccccattctgggcccctcacaccttcccaagcattctttccccaaatggagccagcaaacaggctggaggtggggtgagggccgagagctgaggaggagtcttcagggagctgcctatttggccagccccatgggctccccacatgctgcacagcccccctttcacagcccactcccaagggacccatagcttcctgcctcctgcttgcctcatcagctgctcctaaaatagtttcagatgtttcctgtcttgagcagctcctgctcctggcttgggctcctgacggcctgccagcaccctctctagtccatgccaggctgccttctgcttgccatggctcacctctccaatctcccctaaacccacccctaccagggtgacagaactggttcagcagctgacaggccaggcacctgctcctgggcagcgggtgttggtgctagagctgagctgtgagggtgaygacgaggacactgccttcccacctytgcactatgagctgtgacaaggcagccaccctgtcacctagctcaatggagccccggatcccaagccctgcattgtaagcccacagtaggcactcaataaatgcttgttaaaggaaggcattgcagagaggacggacgatagaaaacagtgcactaatgcacacgggtgtgacatgggcatgacagggaccttcacacagagaaaaaaagctcttcagaagatttgtctccctgggcagtgcctcacagggctggggctgcctcttagtgcctcaggggtatggagccaggacagtctagaaaaaaggcttttattgtcccaggctggagggcagggtcagaggtagctgacatcattgcagatgatgggctggcggctacgacagctcatgagagctgcaaagcgtgagacatccgcaggcagttcaggttmtgggcgaggtgggcatgacagccgctttcctgccatagctgtccgccgagccctggccagccggcgccgaagctgctcagagaggccaagcaggaactgagggggccgagcacgggcacggtgcccacctccgtcacccccttcactccctgtctcaggcagctccatccagttgtgcaccaagtcagcaaagcaattgtcccctagtaccaggggctggcgactgcgacccctgttcagtagggctgctgtccagtcctctgcttccagtccctgccagtgctccaggcaggcgtctggggtggacttgggccgtggatggtggacaggtggtacactggctacaggggccctgctgggcayggggaggccactgactgagaggcactgcctacgaaggggctgtgctgagggtgctgggcgctgggatacaggcagttcttcctctcgccatgtgctgcctgacacctccgagaagccagagtcccagtccagggcatgctccctggggcctcccaaggctgcatccctgtcttctgtcaccactgcttcctcctcctcctcttcctcctcctccacacagcagactgagtcctcttccaaggcacccgaggccctaagctggtggctgggctgcacatctgggccagtttgggaggttggctgcaggggaccaggcattgagggtgagcctgtgtcccgaccacacaactgaggggaagagagggcagaagtcggagaggtatcacttgtcaccaggccagcccagagaacagagggtccaggaaggttagataggcctgctggcctgggcagcagggtgttagtgagcacagggcaggcataggggtgctggcactcgaagctggtgtggttctcatccaccgacctggtggcagtctggcaggctgcagcatgcagggccgggcaagtcggcacccgccaccagggcgggcgggcaggcaggcagggttgcgggcctgaacggggaagtaggtcctgcccaggactggaggggcatcccgtgcctattgggggattcagctcccaaagcccaaagcgtctttcacagaaagagcgcttgctaggtgaggggtagagaagggaggcataggccagcctgaagtagggggcgttcacagcagcgccagcacctcgttagtcccttgccgccccatgccccgcccccaaagaagtcccccttccactctctcctcccgcgccgttccagcagcacggccagctggatgctgttatctgatgctcagctcagttcccaaccgtccgaaacccgacgcgggccatctgagccatatgcgccacgccgcccccaccccgcctcggaccggcacgctggagccaccccgcacccgtctgttgttccggcnnnnnnnnnnnnnnnnnnnnccaccccgcacccgtctgttgttccggccgggcggcagcctggcatcccgcacggcgtcctcactaaccacacccgctcccgagcctcaccagttcccagcggagctggctaaggaagctgtcaagccgagcgctgtgcatgtccatgccagggcccccaccgaacctactagctcctcttggaaccccggcggagccgcgcggagagggctgggagggccggccagcggcgccctcagcctccgcctgcctgcgcgactcctcgctctccgtagctcccgccgccgccgccccgacatctggcagccgcgccccgccccggccccgcggccaaagggggcggggctaaagcccggcgtccctcccgactccgccgcggttctgggtgggaagggcggggtcataactggaagccggacggggccggtacggggaccccccgagcccccagactgttgagtggaccctgcgtttgctgcgtgacgcaggacaggtcgcctccgtgcgggggcctcatcctccccgtttgttcaatggtgaaatagcggtccctctcacggggcgccgtgctgcgtccgcacataggcagagcaccccggatggtcggacccagagaggttgtggaccctcggggcctgacccacgggacccattcgtgaggctggccttggcactccctgaacgggatggaagtggggttcagcccgtctgaggactcaagagagggcgggactttgtggcagcgcaccggcggggcctcagccgcgtcccaaccgagctagacgggactgccctctagtggggagtgcttggctagtcgcgagtccagcggcgacgcgcgaccgtcggcattccctttgccggtaccaggtgcagactgagggtcggtgctgaggctgctctatcaacacaggctaggctcaagggtagtgtagctgcagacagactggacataccagcaacaggaaaataccagggaatgagggccgtgggctagcttggggaaagtcagtctcacaggaggtgacatcaagatgcaatcaagaagaggggcattctggccgggcgcggtggctcacgcctgtaatcccagcagtttgggaggccgaggcgggcggatcacgaggtcaggagatcgagaccatcctggctaacatggtgaaaccccgtctctactaaaaatacaaaaaaaattagccgggcgtggtggcgggcgcctgtagtcccagctactcctgaggctgaggcaggagaatggcgtgaacccgggaggcggagcttgcagtgagcggagatcgcgccactgcactccagcctgggcgacagagtgagactccgtctcaaaaaaaaaagaaaggaagaagaagcaggaggaggagaaggagaagaaggagaaggagaagaaggagaagaagaacattctaggcagaaggagcagccagggaagagaccccgacggacaggagctggacagggccaaacataaagaaggcccaggtgtctgtgattggtggtggtggcaggagggaaaaggtcagcaaaaccaggctctaacggccttagagcagaatgtgggttttgttcttggtgtgatgaggagcaatgggggcctttgagcaggaatgacctgggctagcccttgtttagataatcccagctgctttcagaaaaggattctgcaataagagtggaagtccctgccctcatccaggcaacgaaggggagggcctaggcctgggcagggcaggtgcactgaagggggtcactttggggtatgttttggaactaaaatcaagttcttgctgatgcatggatgtgggcaggaaaagaggcatcaagcatgactcctacatttctggcattaacagctggttggatgaaattgccataaactgatctgggaaagactggagaagagtgggtttggagaggaaaatccaatgatcatttatggacacgtaacccttgagatgcctgttagacatccaagaggagttgcagagtcagctgctaggtgtatgactctggacttcaggagagagatcagcactggagccttggatctgggaggcatagtgagtgaatggatggtatgtaaggccataggcctggataaggtggggtgggaggaaatcagtgtagtcagagggagacagcaatcgggactgtgccctgggacattccatgaggtggaggtaggggagatatgaagcagagctatcaaagaagctgagcaggaacagccaggagaaatctgagaatgtggggactcaggacccaaggggagcaagcattgaatgctgcctaggcagtgagggtgaagaacaaaccactggattcggcagtgcataggtcactgggaaccctgacaagggcagttttgtgtagagagggacaagcctgattagagtgtgtggagaagagagtgaggactgaagaactggagatggcaaataaagacaaccgtttttgtttttttttttgagacagggcctcactctgtcacccaggctggagtgcagtggcatgatcttggctcactgcagcctccatctctggggctcaagtgaccctcctatctcagcctctcaagtaactgggactacaggcatgtgccaccacactcagctaattttttttttttttttttttgtagagacagggtttcaccatgttgtccaggctggtctcgaactcctgatctcaaacgatcctcctgcctcagcctcccatacaggcataagccaccgtgcctggccagaaaacttaaaaaaactgacatataaatacaataaatagacagatctcaaagttacagcccagtaaatgttaaaatctgtagacacttgtgcagctgccacccagatatagaacatcctcagcaactcctggatgccacctggtgccctatccaattgatattcccaacggtaaccagtatttgtatttctatcataaaggattccttttgcttgttggatgtagacaactttttttttcttttttctttttttttgagacagggtcttgctctgtcactcaggttggagtacagtggcacaatcatgactcactgcagcctcgatctcttggggttcaagcaatcctcctacctcagcctccagagtagctgggactacaggcctggatcaccacacccaactaattttttgtagagatggggtctcactttgttgcccaggctgatattgaactcctgagctcaagtgatcctcccacctcagcctcccaaagtgctgggattacagatgtaagccgccacacccagcaagttttgagagattttgttgacggttgggctcattttttataggcagataatgttctaatggagggggtccagctggagttgagactctgtggggtagcaggtcctgggccaaattttcctgggtgctgtgcttgctctatctccacggattgcatgaccagtttcctcatctgaaccttaatcctcctccccttccatgcccttagagttgtaatgaatgggggcaatggaaaatgggatattctgagcctctggaagcctgccagaggtctagaactcagtcaccagggatgggtggggatagaatctgggaggcccaggagtcccgcctgcccagctatgtttgagcaactgacctggcaacagggtgagtcagacaaacagcctagctttctgaagcctcctctgctgtctgtgtcttcaggtcatcatggtgctgctcaggctcctcgtgttcctctttgctccggtggtctctggtgaggaggtggtgggtgggggaaccgtagttttcccttggagtcctgacccttcccagataagctaccatggaggacagggattgggggagaggtaggaaagtgtaagaatctgaacccctggccctcaccccttctcttggccacttcctcagtcaagttctcactccccatctgtgaaatgctggatgctggatacaaggaaaggccttagctgcttggccccatggcatggccaggccctgtggcaaaaggacaggactatgctagtatgtgtggttccatcagcctgggggcctccagcctgaattctctgctcttcacagacctctgcagcctgccctgctttataaatgtctctgagagccagggccctggcacagtccttcagtttttatccttcaactgctcctcctacacgcccacacccaccctggagttgctcaatgtccagccacccaccaccttcttcaacccacccagcttggctaggtggcaagggaccta

SEQ ID NO: 93926 - DNA, 281966 bp, Homo sapiens
  misc_feature (1)...(281966): n = A,T,C or G
caaatgttatttagaatagccatatgtagacatagattcagatgtaaataactagctaaataaaagcataagcttaataatactaagctgaattggtttcattatcagctcactttaagtattaacattagaaataatatttgtagcacactgctaatattatacttattttatgatgctactgagtataaattttcttttacactaatttttcatcacaggtattagtcttcaaaaatcattatttacctttatttgaaaaaaaatcctcccattaaggacaacacattttgaacagtcaacaaaatcccttccctcaaaaaggctaagtcagtcaccatgctctgtgtccctctgggctgaaatgatattagatttagtgargtgagccgtatatcacaagtactcccagtgctggacgaggaaatatttcattgcatgggattggaggtggatttagaattactctgtgccctcaaattctatattttttcttaggatacatcattgacatattctctatttcatcaaatttcttaccagcttgcctgttgcctgcattctctctctctttcaagtacacgtacacacacacacacacacacacacacacacacgcacatgcacaccattgatagaaatcacaaagccattttttctttttccttttattcactcccagcagatctttctttttcctgtaagcttaccacttctaaatttaatatgtgttttgagctcattatttaaaggaatcacatcttgctaatcacatccaaggcaccggaacatagtgtctatactgactgaacaggccaagcttcgtgagttaattaataaaatatttggtaagaaacggtccatcattatcttatcacttgagatgacaatgttgaaacttacaggatggaaggcatctcattaattcagaccatttcaaatcaattttattttgacttacagtcttgaaataacatatcattatctttggccatatcaaaaactgaacccagttggaaaatatttatatgtccaaatattggtttagaggaaagtatagcatttttttggtaaattgttcacacagaattttccctattccaaccacctatcaaaaaccatcaaagatataaaatataatttctttctacagaagcacatttatatttccacattttatctatttccaatttaggttttgctatatataaacattatcttataaaagatttcattgtttaggatttagaggtaactgttaggaaaggttttgttttatattgtttcaaaaggaaatttatacttgcttagyttaagaaattacatgcataacttcccaagcaactttgattttcctaaaataactgcaagcatttcttattcaatcaaccaatcaatatatatttattgacctgctctatttaccaagactattaggtgctgaccattctaagttatttgaccttgaattattgctttactggggcagctgatatataataataatggcaacacatcttgtttcatttttatttacttacaattatctcttagtttttctgttttaccaatattatttttcatacaatttaaaatttataattctttaggagtcatagttcttcctcatttactattaatcctatgctctttccataaggcatttttccttttgcattctgctttttctccccaatattcttctgaacacttaatttgtgctttagttatagatatttggtccttgatttgttcttgatttttaagaaaataattccttccttaaaaaaggttagagacagagtcaaatctttttttaattatgtcttcgtcacacaataattttgatcaaccccaaatcataaaatttgctataccatgcttgctatggcaggaggtaaatcattatgtttccagatctctccttgactggaaaatcttaatgctttctcctttttcctgtttattcctgatgttacaatgatttcttcttaaattttagaaaggaatttctactttgtacaatgccacattctgtatcctatagatcgacttctggtaatcaggcctttgtttctctcttgtattcacatttttttattgtcaatttcttctactgaagaaatcagccttttatttcctgattagaattcactttaaatgtcactacacagataaatcaatatgtgaaggtgaaaatgacttgaagagctttgtcaaggtaagtgttctatatcagacgtyatgggatttttgaaaccagaaggatccttagggcttatggagttcaatgacctcatgcactgcagatgaggaaactgagcccaggaagagaagacttgcccaacttaacgtgaacaaatcctgttctccaagactctttctatttcatagcactaatgcaaggaagctttctaaaagtgattttaaatttttaatagttgtttttatttttcttcccagcaatatctggatacggtgggttttatcttctctttcaagagttctattactcttttcttctggttcagtgggccggcttgtgttcacttgaccaggaatcaacataaatcgcattctatcatttttttctagttttactcgtatgctgcaaaataaaagcaagataagataaagggaaactactgtagctactggactatcctctattgacttgtgtaaaaatatctcttcccagataaataaaaccctgctttccctcaaaaaatagttggaggcataaataagaaggttcagaggtatttgcaacacccacatgacctggcatattgtgctaaatgcatttctgctgaattttgactttggccattaattaagccaagtcatcattaacaccggcataattagagaaaagcataaactcaaaaatagcaagaagtatcccttagcagtgtcatgctgataccttaaattagttttgttttgttttgttttgtttttgtttgtttgtttgtttttggtacataaggaaaccaggaaaatatcctttcttactcttttcctacctctctaccccaggtcaccttacacacatttttcatctctatgagcagctcactgaagtcattctttatactactagttatactttcaaagttaagtttaactttattgttgtgcttagcctagcggtatcagcattgtatgccttttccaaataaacctgagaatgatgaagtcttccttctatgaaggcacttttgctattgaatgtaccttgagatttgatgcagaaaccacgtttatggaccataattgttaccaacctattcattaaaggatcaacaatacataagcttcacacttgcccagaaacagtcaatagttaaacattttaagaaattgaaagaactaaacaaaattaatagactggagagtttagaaacatgctgttaatcaatgttttagaaataattcactgtgtaaaattaaattagtttaactacaaaattaaaaggtaatattttcacataacaatataactcccaatcaaatggcatgagaacatgcatcttatactggtgcttggtatacattttaggtaattttttgatcctttattcatcaaccttggatattaacaatattcaattttctataatagtaattcttcaaatttttaaaatcagttttaaacagaggtctaggaatgaaagacagccacagttctaaatatttgatttgctgtgatagataagtgaataaaatagattctaaagactggaaaccccataatggactagcaatgcctagtagctcatcaatcaagcaaattcaataagttgatctgatcatgcccaattcccccgttagctactaaaacttttcaatttatgcccattttaagcatagaactatattcaaatacagttctaatgatattcttgctcaacttctgaaaggcacaggctaaaaaatttgcatgttttgcaacagcctagaagtagagttcatgtattatcaggttggcctgaatttcctcactgctgtgatataatggatagtaccaactccaagaattcatagaacatggatggatacacagggaaccaaaccaagagcgagtaagttaaatggttagttcattcaaggagcgctcatcaattgcctaccaggcatgtgtcagttaaatacagctcagggaacactagcttgtttctttcaactcaggaaacatttattctattggagaatgaggattttccccatatgaaggactgactctgggttaaaagttaataacaaatcagcaagttgtattacaatggtttgcttgtggaatgatttgtttactctttttcaattttccaaattttcaatagtgtgtttatatggcattgataactttaaaactcctttacaattaagctgaaataaaaagaaatctataaaacaaaaaaaccccagcaaatatacaaattttaaaaattaaactcttatgtctattcaagtcctttgcccatttgtatcaggttatttgactttttgttgctgagttataggagctctttatatattctggatattaatcatatcagagatctaacattgtcaaattcatagaagcaaaaggtaggatggtaattaccaagtgctagaggggagaggaaaagggggagctgtttgatggacaaagtttcaggtttgcaagatgaagaaattctgaagatctattttaaagcaatgtgactgtatgttaacactactgaactgtacattaaaaatgataaaaatgtggtgtttaccccaatttttaaaaatgcatgaaaataaaacacttgtgacagaataataaatcagcttctgtttaaaaagaaacctgcatcaggcaaacaagtcctataatggtaattcttcaaagaaccaaagttcactactaccagatgtgttattactaaaccattaataagaataagacctactggaagtgcataaggctaatatttcagtttcagcaaaagcaacaacaaaattctaatgtcgtaataaggtaggtttaactagttaatgcttttaaaaaaatagttgagtttttctttgttaatttatagaaatcatctgaatgcaaaataagcaatcaaggattcatttatttttatttgccctagtttggtcaaattgttgatagaataatgtttagaactaatttttaaacctgaatgaaccatttttattttttcttttctctctctttctttctttcaagacaaggtcttgctctgttgcccaggctggagggcagtggcaggatcagagctcactgcagccttttactcctagcttcaagtgatcctcccgcctgggcctcccaaagcctggtgtttcctttaatgatttaaaaatgttattctagtgttggtctttgcaaagccctttaaaaccgccaacttcagcttgttcgattttgaaatgcgtggcctgagaaatctcctaggtcttgaacattataaatgggtactatgctcattttgagggagccctggtttacacaaacctgctgctgaacttagccgtacttacaacaagcactttattgatctattataattgatgtattaaaataaacaaacgaacatcacctcctgtctgtaaagcaaaacacattttgactttggagttaacgtttgcgacagccttctaacctatggacgtgttcctcagaactgggtttctagaaaagctaggagaagaccccagcgcaggggagaggagagggcgaattgggaaagaactgctagggtaatcacttcctcgactgggcatggggtggcacctgagccctggcacgcggggctgggagggcgagtcgccagcggaggcgaggccagaaagtcagaggaaagaggggaccagagagccacaaaggcagagctggagaaggcagggcgggcagcgggggcgagggagagaaaaagagggaggcggagctgcccgggcgggcgggggcgggggcgcgggcgggagcgggcgcggaggcggcgccgcagccccagccgggccggacgcgggagggtcagggccagggtgagcgcccgactccgagctgtccccgctcccggcgcggcgctccgctctcagccacctcacggctgccaggagtgcgcgggagtttgccccggagcgcggggaagtttcctccgaagctgcgctcctggaacagcagcacctgcaagcgcccggcagcggcccgcgaggtaaccgcgctggggctggggttggggctggggggcactggaggggcagagatgatggcgcgctgctgggtacccgcgccgggagcgggctctggtgggcggggacgtgcgccctcacctttccaggtgcttcgccgctggagatgcgggaggcttcttcctttttctatctcccctacctccagtattccaacccacttcccttcacttcagtggacgcatggcgggaggtggggggcgggagcaggaggggatcctgactttgagggggcgctggagaaggacggccgcctgaacttgtcagctacctgagtttccttcctgcgccccggcggggcaccctggactccaggattccggggtcagacccctcttggggcatgcagaggttggaaagaggacggcaggaacagtctttagtttctgctgccagtctgtcgggtcctccagggtgtgtggcagaaagacgagcatctctgctgcgggggtgcctcctttgcgtcagtctcaaactccgcgacctggctcaggctcaggcgcaggctgcgggagaggtgggagggaagttagggggaccgggaggccaggtgcgatcgtggccagagcagaggggttgggaggggcgatctgaggaggggctccaagtgggttgcggggagaaggaatggtgtgtttgtttctgctgctgttactttcacagggttgcctgctccctcttctgccccgtttgaacatcctgcctatcagcatgtttctgttagaaggtgttatggttgatgtctgtcaggagttatttccaactaagttcacaggtgctaagtctagagctgcaggccttcctcctttctctctctctgcggtccacccccagctccctcccacaaacatactgtgcctgaataatccccagcgttttgaaagcgatggcaagtgaataatacacaatgtgtgtgtgtgacttttttctccctattatgctatcagatccaaatcaaaacgccgtggatgcttaacaggactcccttttcgcagtttttctgataattgagagtattaccaatgtttatttttcttcgctttaacctcagaattgcattaatctatctttgtacaattttatttacattgttattattcctctcggtttgaaggacaggggcctcttttcaactcacatatacacatccaaatgcattgtgaccatatttagtatttatctgtcttctgattcagttggctggcacctgttaattccagtacctaatcataacaccatatgcctgccaaccaacgtgaggataaggtgaatgctattgtttttcatgggcaagagcaccctgaactaccactttttattattgctcaaagggtgtaagagcttcaatcaaagtgaatcaaatttacaaaacaatattacaattctacaccatacgatcaaacagtatgattcctaggcacttacagctgactagtaattgaggaaaaattaaaatcctctcatcatatggaaaacatttagattgcatatcgtcaataagaaatagcacacactgaatgcccccagaaaacgagaagaatgttcctcttacctcatttggtttttatccccttcattacagtaccgtcctccagaaaatgagcaccttgcatatagatgttggtatgtactaactaaacaccatattttttaatacagaggcttggtgatagtccaaaaacataaatgttttaaatcattaccaaccatctgttctctcccactcacttacagcacaatgttttattttcacaggtatcaaaacgtacttactcatttcatacmttcccatgactatcctgaaagctgtaatggtatccaatgttgactcaagttcagtaactgttgtgtttggcttattacaccataagctctgcttcttttattttcaatgaaagaagacattctaaaagtttcaaagcacttggccaaggctggtgtatactccagtaaaaatctgattgctttccccccaccccccacctttttgttaacagagagaagctagaaattagtgcagctgcagggccctcctgatgaccttcttttcctttcttcctggtcacaagggtagcatttgatgctctgaagaagtgcattaaaaagccctgtgacttcagaaacttagtatggtttccaggagaatgtaacatcttccaaggaagaatttacaaaataagagactaacttactcttacaaattccaaattcagtaaacctaagaaatacacattgtttcccacatcagtattgcatatgaatagcataggatgtgagataggatatgaataacatgtttacctgttattatatactttatatttgtatttgggaatctggatgagttgggatgtaatcagcagatagattcacactctttgtttggttgatgtcatcaataaagcaagatttgagatattcagttccctatccaagaaagatttcccatttaggggtgtttgctctaattagagcttcaatattacggtattttatcattccaaattaagttacataatacatcctttgttcctttagcctagccagcacattaggaaaattcttttcactcaaatatgggtgcaatgtcccaaagcattttcatattttttgaggaaaaagatagtgatgatctttttcacactttgcaaataattgatatgtacttgaagattatcaggaaccaagaaaaagtgggccattatcaccagctacagtgttctatactgctcttttccctgaaagcgttaagattctccttagaagaatggctttggacagaataaacccaaactacagataattttgaaagtaaagttgcctttaaaaatatagtctaattaaaacctttggatattacataagaacatgttacatcttatttttctgtatcctaaaaatgaattattgaggagaaaccgtttcaccatgtatagtaaatactatgaattattctgttaatgagaaaaatagaggcaaagataatgtaaaatcatggttatttaaaaagtcatttgtgtttgtctttggaatgtattgcatgtttggtttaaaaaagattttcattgttattgtgggcaagttgcctttctaattattttcttgtgtttaggttaatttttaaatgagctttcatgcctcaaacacgaaaacccatttgtggggaggtggggaagatgggcagactgcccagaaatgagctgggtggcagaagtgagcaaacctggtatgaaaactttgcaggaaatcatatgtaattcaaagaaagataagcaagacttgattgtatgcctgtttaatgaatatgtgttaaggattagatatgttcccagcaaaaataaaagtcttatagtcaaagtttgagaaattcaatcccactttacatgtaacagaggtggttaatatattttaagaagtgataataggttgctcctgaaaatcaaataagaatgtgttaatgtatgcatcttactattaatacactgcatttttaagtgttttcctaaagcatatgtatgtctttgacgttaaatggcattcctaggccttatatattaatatgtcctttccaagagaaggaatagcaagaagccatctaaataaggggtttggtccatttcatctctgtacctatgctccaaatcaaaaacacatttcatcaaagagaacctctcaattattgttacagtggaccaagctagataaaatagttgaagttcagcaagactgccaatttaacagatttctattgtgtttttcaaaagctctagggcaaaattggttgtagatgagttacttcagcaagaagctgattcataccatagcgtgaaatatcttgtttatagtcagtttttagttggacatagattttgttgaattgttagttctgtggactgttagaatttagaaaacctctgtgtggaaggttagaactgccaaaaatatatgatgggaaaagcagataagatcatttttatttcaaatattcacagccaaactgtaacttttatggaagtaaggagaatggtgatagaaaagtagatgtacccttcagaatagagactatgttctcatcataaatgtgctcactacataaagtgtagggatgctttttttttaaggaaacattttcattttttgtaaggcatggcattttttaaagacttgactagactgaatattttaaaagaaatattgtggttggaaatataattgagacccacaggataaattttatatacacttattaaaggaatccgtttcttcttatcaatgcctaagtcttaggatcaagattatgcattttttaatagagctggaaagaatcttaaaagtaatttattcctgtgtcctcattttacagttgcagaaataatggggacctacagtgatcatgatgaactgctaaaggtcacactggtagtggcagagcagaaactagaaacctggtctcctgactcctcatccagctacctcttagaaagttagattagttaggtaggggagttaactctttctggccatcatggtatcaactaatatgtgatagtcacagaatgaagcagtacagaggtaaatgtagaaggcttgtgatttgctgtcttctttcatgcattgagtagtcatcgtggaccagactgtgatccttgaccctctcagactctgtcctcttttttaaaaacaaatattttgttacccccttattatcctcaaaagtcatttataaataattacagaatatagttgtaatttttaaaaactaataaaataaaagtaatgtgtatttcactactaacgctcagggataacttcactagacacatagtaaagtcagcgcttgtatgaatatatgatgaataaatttgaatttaagacaaataaaacattagaagacatcccgtgcaagaagtgcacgaaagtgaaagaatgagggtagacttaaactagtgttgagatactaacaacccagacttatttgtagatgaaaaccggaagaagaaagttaatggtatagggaaaatttgccaagtcaaatgtagactcttggagtggagaaaattttaaagtatgatattttgcaaatgagagagtaaataccattgatatacttccactaaaatcccaaaagtactttctggaacatttccatgttgttaactaatgttaattctatttcaagagatgaaggttactcaccgtattgtcaataagtaaaatacttgaaaataaaaattactgatttggtgctgagttggtcttaagtttaatttctatcaacattatagtctatcagttctagagttagaagatagagtacatgaaataactaaactatttttgtaaattgctcggcttttsgtgggaatgtaaataaaattcttaattgtaattatgtaccagrttatacagtttgatatgcataacatttagctaaataggacacataaactttatatggaatatttttagaaaaactcttcattaaattgggytgcctcccccatatacactaaaagccaatagcacaccaccactaccaccaccaataatttgtgacaaccctgaacatacccagtcctacctaaaatattctgtaggtgtgtcacttgccattatgagagccatagagctagataaccaagatttttatgtaggcgtggattatttttcatgcccctacctatctatctttacttcttttaagtaggaccatcccatttgttcactgatacactggctctaatggatcagaaccacagacttcactgccctcaagcaggtcatgttctaatctttttctgtcgctgtcaccttggtaaaaattcacttcttctggtccttatttctcttaggaatctatcttttttgggtgacaataagtggtgacaaactgaagtacatgctgggtaatattttagtggtcttaggccttaactgcttaaatgtatatctccataaagcactgaaagttttcatatatatatatatwgagagagagagagagagagacattatcacacatgtatgcatgtacatatatgtatatatgtgcatatttatgaaagcatatatgtatacacacataattttaggctttgaaaaaacaggaaaggaggtattattaaggcttatatttttaatgcccttgaaacatgcttatgcaaaaaagaactgcactagtccaatactggaatttataccacaaaactacgtgctatgaagtatgcttatagtaaaagcccaaaagctatttccaacccaaataaactgctgtattagaattttgttatattgcttgtggtagatgaatcctgtgcagcatattagaagttgagggtaaggggtgtggtcagttttgtctgtttcagaggtatttaacctgtgcactcttgacatcctaaaagcacaccaacatctctttgtgcaatatacagtatttgcagagagattagagggttttgaagattactcatatatacaacatacaggagggtgtaggatcccagaagcaaggaggaaattgagagtgaaattcaaactttcttacttctgtctactggactgtaacttaagatctgctcttgaaaatgaagagttaatatgaaatgtaatttgagtgttagctacaccatcttgaatttatcaaattgtgagatattttttcttagatttcttcccagtcagggtcyacgttacatatttttaggccattgtatatattattctttttaaagaaagaagctttttaatgtaagcgcagcacttgagattgaagtcaataatatgtgtgtgtggtgtgtatgtgtgtgaataaccaattgctttgacacaatcacaaaattctctgcatagaaggacatgttttaccaaatcaagagaggcagcttttccgacaaagaggatgcagcaattgtacagaacacaatttgatctgtgattgttttctgtgtattgttcattcttactggaagcttcttggtctgttgaatggcccaacattcaacctcagactgacccctaactttattcggtctacttttgttacaatttctaatgcgagtatagtggtgcaatggggattcagagaagatgaaattgaagttgttggattggggaggcgataaggaaaataaggtgtttctttcatttgaacagcacaaagatctatataggcagtgaaattttattggaatatctgccttttactctgctttttatttttgtatggaatagagggaaagattgtggaagtaaaaccctccttcctctttgtactgttaactctgctatacaagagaaaaccttctttgtcagagtaaacagatatggcacattccactcccattgttcagagtgcctccttttgctatagtacttcaatgctaccctaaactgaactctataacactaaagaatatggttaagaaaaggaaaaatatacccagctaatgtggtaaaagaaatttcagaaggctctgttagatttatgtgaaaatgggaamaccaaataagatgacaccgtcaattcaaatgaagaaacgatacttacttttccattaatttcagtaccaagaagcccaaaattccacttagttttgcggtcatttctattgttttctttcttttttttttcttttcacagatggaattaaagtggtgacctataggtccagcttactttaagcaaatatagtctgtaaggatttaggtaaaatagtgatgttgattatatactttaatgaatacatttwaaaattaaataggcacagttttaaagaaattatcatctaaattaatttagttttttacaggattctttgaacagtcgattagaaggagggtaatttttttccccaaaagatcgatttctcaagttattaaaaaaaatgcttaggtgttagtgacattttttggacaaaaagcagtaactatcaacacccttttaccttctaacatttgcactctattttcaattaggaatttttattatcagagaatgagattttattactccagcagggctggcattcagctagatgcactggtatagtcttactggttatttgtagctggagtccaaattgtgctgattgttaaataatttaaatactaatcctcctcttgcatgatcacttttgtaacttcaacctataaatataccacttgctacttgctaaaagtctagcaaagtcattttttcagattttgcagatcagggaattagaacagcatttagaatagaaatgaatttgaaaatcactgaaatcccaggtaccagagcttgttcatctaatacctcagacctttgattcaccttgggatttctcaacatacatataccaagtactaaccagtaagaatgscttgagattattgatatatatttaatgcagaacactctataaaacataatcgcagctcagaaagtccctctacattgcccacttgtagatacagctcatacacctggcatttcttcttgtctatcttaaagaaacatcaaatgaaacatgtcaaaatcaaactcctgatctctgctcatctcacctcaagggtgcagggttcccatagtccaatctggttttaatcttgacattacttctccttcaattccattaccaaggctttgattttgacctccaaaattaattacaaaaatctgcctctgccgtcacacaagtgtaagcattcaccatcctttgtgtagaaaaacaacaatgtctccatgactgatctcctggcattgttccccacccccaaattcatcctccaatgggataccagatattatatttgcattcaaaatgcaaatatgaaaactatcaccttscaaccacggataacacttaaatgaattaccattgctttgcttaagataaagaccaaaactcagcacctgatttttgtagcccagcaaggacagcctcctccacttttatctctttagatgctcccattcttccctcagcttcagctgcctggctttcttcaagctgccttaacattccagctctctcccatccccccatcccctaaaaacacaaactcaagcattctctagttaactcttagttaacactttgaaaatatcaactcaaatgtcacttcctcaaatgaaccatctcttacccctaaattgaattaaatccctttataaaatacatataagtatatacacatttatgtatctgtatccattgtgcttagaagagttgcaaattcacatttatttgtataattatttaattaaccgctaagatagggatccatctggttttgatggtccttgtattcctaacaaatactacaacgcctgcttcagagaggaagtgtaataaatatttgttgaataaatgttgagtgaacatctctaactccacatgtacaaagttatacacatgtgccatatgcaaacacacacatgtatccaccctcacattctaataaaaaatacacaaataagtaaataaaataaagtttgtaagctatgatgccccacttttttctttgtgacctctccaaatatcatactcctcgttctatttctctttcctctccataatttagatgtggttggggtgttgctacatttatttagaaagtagggcagggctgttgaatttcttacaccccccaaaataaataaatgcccaggcatgcctttatattacttcctctgacatgtggaatcccttgataatttcaggaattttaaaaggcttcactttatgggggttttatgctctgctgtttgtatacattccggcattaagaagtggtctaagattttaccatattgaagaaaacaaaaatcctctgaaagttacctattcatatggcccctatatgaaaataaggaagataaaggagaacaaaaattaaaataagaaaaaaataggtgaaattgaaaaagtaatataaaagtctatgttataaattaaaggtttatatttttaagaattgcacaaaagattcaaacaaggtataaaatagttaaggaagacctatatcatactgatgggcacttactatgttttagatactatgctaacattcgtgactgaattcaaaatgctgcattaaaactgagttgggttagcactgtttttatttaaagccttcttgcttcaactagtttaggggaaactcttgaacattttgtcccagaaagcaaggaattgctcaaaaacaaatgagggcacatcagaaggacatagccagatttaaaagactctccctggccaaatttgggatcttttgtatataaagagtaataatgtatgtaatggattagagcacattgactaagaaaagtatccrtgaacccagagtgtgtgaatgcacagattgggtggagagaaggaaaggctgtgtttcactgaagaatacaagctgataatgaaaaagaaatagtagagccacatttttgcaaccaccataacaagaataataaaaaagtcatctgccattgggtgaatggttgatggggacaggatattcacattatctcttcatgtcaccctacagattgcttattaattgaaaaggggggacatccctttatggttggtgtctgacagataccagctaatcaaatgatcagacttgacatcactagaagtagtacaaattgaaatcatgtattttttttatgatacatgaagaatgacacaaaagtctcttctgaagtattctgctaaaaatgtttaacctgagtctaatcacgaggaaacaaacgatcaggcaaatctaaactggtagattttcttcactacaactaacctggacacttcaaaaatgtcagtgtgattaacaaaaaaagcctgaaatattgttcaggattaaaggagactaggagacctggcaactaattgcaagacatccatccttcttgattagattctggatgaaaaaaaatctataaaggataatattggaacaatggaaggaatgtgaatttgggctatagctcatataacagtattacatccccgttcaatttcttgagtgtgatcatcatattggggttatatagaaggatgtgtctttagggagaggatatatttgaaagtatttagaagtgaaatctcatatctgcaactttcaaatggttcagcaaaaagaaatgttttaagtgtaagaaagggagaaataggcaaataattatggcaaaatgttaataatttttacatctagataaagagattatatgccacttgttatattgctaatttctgtaggctagacatttttcaaaataaaaattagaaaaaatatcctatgattttaagttagctatccaaaggataaaataatttttatatcttgaagtgagcttaaatgtttgaaagttgtttaattaacagagtgtcttctctaaagtatctaaatatcttaattcaacattctataataattccrtaatttatatataagcactaaagaaaaaattatccttagaagaatatgtttcaggcaatgtaggagacaatacataatatgataatatcagtatgtattagataaaataatttttttcatttttccagttatatatgagaacttttcaacatgagaaattttaaagggaaatgagtcatctatggcaatatgtgttttattcttccatgtctttcctaaacattggtgctcgcctacaaaacaaagtatgagattactgatgattttcactaaaatgtctacaacctagcagaatgcagtttcagtgtagaatagatctggccagggctacagtgacatttagaatcctgtgtgattctcaactctgcaacttcaggaagactggcaagcactgttagtgctaatatattagaagcagatacttacagcctaataacacaggtatacaattatcaaaagacaaagctctcgatttagtcaacaaatatccatcaagtacaggttctatgagagggacaaagtaaatgaggttaaataaaaatatttataaatttgtaaataaaaatttatttcttcaggaaaattttaacctcaaaataaatgtttaaaatattcctcatactgtaaaagcatatgatataatatttctaatcaggtccctgtaggaatactttgcatggtgctaagatgatatttagggctcctgcagatatgtatggtaacttaatcagagcaagtagattggtgccttttggtatatgataaaaagaaaacatgtagctcttcttatatcttaacatacaatatatcatgtatcttaatgtacaatataataaaccaaagataagaatatggatagttatttccactcatatttcatatagtaagttgataaattattataaataatagcaaagagggagagtttcgagtttctgaaaaagtcagaaagaactggtctcttgatactgccagcctacactatcttgaggttaaaattcactatgatggaatctccttattaggaaaattacagttcatctccagcttatattaagacaaatatattagtaatcagtttaaacttgatattgttttaataagaagaaaatagtaacaaattgttgtggagatggagcatgttcttaagaagtactgattatcttaaaataaaggtaataatataacagctttgctcttatacccctatccccctcccactcccatgctactcatatttatatcagtggtaagacaaaggacactcataccactaagaatttcaacacccaagaaaactgggtaaaatcacatttagttatcttattaaactgttaatacatttttatttcagatattttttaaaagttccaagaccatgaataacataagttaaaagttgtttgaatttatagcagtatgaaaggtggacttccatacagaatttgacattaaaagaaaatagctatgtaagcaatttgtgtaggtaattattagctggaagctatttgtactctaagtttattgaatatacaaatatgataataagactttgcacaaatggaaacttttgataataaatccgtgtaaaagactgtgccttggggaataattctagatattataagtatatttgaattccctgcaaacagaatgcagacctctagaccaagtacataaccatttttcattcatggtatttaataggtcattttacctaaagtctcagaaaggacaagtaaaacaatggagagtgaagctgttttatttgtgcatgtattaaaacattgcaattacagaagaaatagcaaagtagaactataaaacctatcttcagaagtaagcaaaattacactgaaaatcataattattggaaataaataaatacctaatcattacctgagaagtattcctgatattgcatgtagaactcaatgattaactgttttgttttttgttttgccttttgtggtatttactgaccagtttagaaaaaacactttcgtggtaaaataaaatgtaaaacaaccacgttctctttatgaaccttgtacatttacaatacttcataggactgtatgctccccaccaagtcagttttactgtatactaagaaaataaaaatgaaatgtagaatctttcaatttcctttcctcattttagattttggttacatttttattatattatgtttcgtattttcatatttaaatgtagtcagtgcacaaaaccagtcttttcactcctctctctttattttagtttattttgtgaataaatagatttcatgatcaaggagtttcttctaggaggactcatgtaatgctacctcctgcattcttttgtgcctaatccatgtcctccccatgcccaccctttcctcttgcctgcgcctctagttcataagccactttttgattgttttccattcttgaaggggactaatgatgtggaatggcaggaggtgttgtacacggggagcytacagctccagtgtgggtcttgtttagaatatcctctgtcaccaagtttatttcacttaccctcaagttggaaacatgcaaagcccctaacactgtgttgtgattttgtagtcatgcgcttttcttctgttttctcccacagtaccctcatctgggagaccactacatagctaataaaaacggtaggagagtgtgctattttctccagcctgatgtccccagttattctgagtttcagtaggaaaacatacaccttctttatcacctatttatgtaccactgttccagtaagatttgctggacagccttttgggactaatattatttgtacaaaaatctatattaagctcaaggtttgaaggtagatgtgtcgattcttgttctcttctccctctagattttacacratttagcaggtatgcttgacagttagtggtttttatactttgtatttttgttttctttttttcaaaaaaaggaggcagagtaaaaaagcctttacttcatcaatagcagaagtttcagagttctagttgccacttttttgcattaaatattttatttaatgtttaaagtaaaattacatatattgacaatttaaagaataataaaagataaatatccatgtattcactatcacactgaagggaaagaatttttccagtatctttgaagtgtcctacttttgtcaggggagattaactgcttaatcaggggagatttgaccaaccaaatatctcaggcatttaatacaataaaggcctgtttcacattcatgacacaattccgtgaggatcaatggagaaattctgctccattaagtcattcagggacctaggttacttccatttggcagttctgccacctttcaccacctcaagtcatcccctggttcctctgcagatgaaagaaagagagataatgtgagaatcttataggatgttttaagggaccaggccatgaagatgtgtgtatgacttctgctcatatcccacctattgtaaggggaaatagaataaggaaaataaaagggaatttagcattgtctcagcataccctctgtgttctcctctcattctctctcttcaagaggtaaccagcctcctgattttggtgttaaggattctcctgttttgcatatgtacctgcctcaagcaaatcttgtctagttttgcctgtttttgacttttataaaaatggactcatactgctgatatatgttgcttggcttggttttgcttcttgctgcttaaaagaatatatattttctggccaggcgcagtggctcacgcctgtaatcccagcactttgggaggccgaggcgggaggatcacgacgttaggagatcgagaccatcctggctaacayggtgaaatcccgtctctactaaaagtacaaaaaaawttagccggcatggtggtgggtgcctgtagtcccagctgctcgggaggctgaggcaggagaatggtgtgaacctgggaggcggagcttgcagtgagccaagatcgtgccactgcacactccagcctgggcaatgagtgagactctgtctcaaaaaaaaaaaaaaaaaaaaaaaaagaagaatatatgttttatacattttggaaatagtgtactatgtgtgtccattacataaagtttttaagtctgttattcaaatattcttattttcttgctaattttgtctgaatgttctatcaaatactgaaagaagtayatttaaaaaatgctgacgatggatttagccatttcttatagttctatcaatttttgccttatattttttgatgccatgctattaggtgcatataagtttagaattatatttctagtaaatttaattttgtaatcaaagtgtagtgatcatctatatgcttatgacttctaaatttatgtattcagcctagacctcttgtattagttttctattgctgkgtgataaattactgtaaatttagcagcttgaaacaacatacatatatcatgtcagtttctatgagttaagagtatgggaacaacttaagtggactctctgctgagaatatcacaagcctacagtcaagctgttgactgggttttattctcatctgaaactcagagtcatcttccaagcttgaacttgtgggcagaattctgtgttttgcagctataggactgacgrcttcaactcctagaggacacccctctccataggaagttcaagatgtagttttttgcttcttcaaggccagcaggagatcatttctaacttcagggaagtcctggaccctctttgaacgggctaaactgattaggtcagcctcacccagggtaatctccctttacattgactcaaagtcaacttattaagaacattaattatttctgtaaaatttctttaccttttttcatgtgctattcattagaagtgaattataggtcttgtttgcattcaagaggaggggattatagaggactattgaggtttctctcataattctatctaccacagagaccttgtcttacatattcaactccctatgtgatacctcttacttggttttctcattaatatctaaaactcaacaagatcaaaactgaactcttgatttrctccttcaaaaatttccctgtatcataaatgtcatctcaaaaaataatttcaaattctgtcacttctttttatctctagtggtattaccctggccaggtcatcagcattatctgtatttgtagattaaaacagcctccttcctaattagcttctttgtctctcagtgtattcctcctacagcaacaggaatgatcataaaacataggtataggctgggcgcggtggctcacgcttgtaatcccagcactttgggaggctgaggcgggcggatcacgaggtcaggggatcgagaccatcctggctaacacagtgaaaccccgtctctactaaaaatacaaaaaattagccgggcgtggtggtgggcacctgtagtcccagctactcaagaggccgaggccggagaatggcatgaacccgggaggcggagcttgcagtgagccgagatcatgccactgcactccagcctgcgcgacagagcaagactccgtctcaaaaaaaaaaaaaaaaataggtataatcttttcactcctctgattataaccattcaatgcctatctgtttccctttagaattgccttcaaggccttgataggctttttgcctatctttctaagctcattctagaccactttgctttcattcattaagctccagccatactgtcttatttcagttcttaggatgtgttaagttcttttctgtttcagagcattttgataggggattcactatttggaaacctctcttccttcactacaactttgcacatgattagatccttcccatacttcagatcgcagcttagatatcaccttcttaaagatacttcctctgaccaaaatgtccaaagaggtctcctgtgccctttacccaatattctctaccttaccccttgattttagcacttgtcacactttataatcatatgttcaatttgttgtaacttctttcttttctcctgctcacctttgtatcccaatacctaaacactgcctgtgtaataataggtcctgaaaatatatttgatgaatgacaactaaagtattgctgttatcatcagagtatgctagagtaactccaagaagactttctggggacatcagccttgagccatttgttttaggactgagaatcagaaaagaagaaagttctatgacagatgtagtggagagcaaaaacaaattgatggatatggagatgggcatggagggcccaggagtcagtacaccagaaggggcagttggacattaggttgcagaggtatagtgaccaatttatgaagaacctagaaaggcagacgtaagagttttccactttaaataaggatcttgatggctttttaggtgaagagtttaaaataagccactctggcaaattgactatggtgagttaaaagcatctgaaaagcagcaggtgcaaaaaatcactctgacctttcttctgtttctccaaagcaggagatgaaattcctaagagaaagatgtcctccctttaccagaaggaaagcgtcactcttactatcatcaagaacagaagttgaggcccaggaaaatctgtgcaaacaaacttagactaatccttatgctcctagtcatttctccactgaattaaggactctacccctagctcctttgctgtgtcacattttcctaatttcctactctttgtctaattcagtacatatgttcatcactgactgcatcttcgggtcttcatttccctatgaaggctcctgtgccacrtaaaacttatattaaataaatgtgtatgtttttctcctgttgatctgtcttaggccaatttaattattaggtccatctgaaaaagaaaaaagccctaaaacagtagagggaaaattttttcctcccctacataggcaaatgaaaaatagttaaaaagcaatgtttaagaaagattaatgaagcaccattatttctgttgaactgaagagactgtctagagatagatcatctacccaagagtctttttgtttttttattcaataaatatttctgttccactcactgtgtctaaggcactgtccttgggatggaggattctgtgagcatcacttcaaagatgagttctaaagaacagagatcaacccaaggttggtgaaggatcttaaaaagaaaagagagagtgttcatgtgtccagagacaaaaaaagaatgcagctagttcttaagaatttaaatagtttagttttgctggagagtagagtttgagggacaggtatgaatgataaaattaacgaggtgatcaacagctagatcaggaagagccctgtttgtgatcataagaaatttggacaaattaagaagtgtgagaaatggtggaatatacaaatgaaaatgtctagtaggcattgagaaatatgagaccagaacagatgagttattggaactggaaatacagattgagatttcctgtttgagaaattaggtcattttttggaggacgaagcagagaagagaaagaaggggagaactccaagacagaagaaagagaaagggatgagtttgttaaaggttgaaaaagcaatgattaccactgtggaagccaggattgtgaagcctttcaaaatagtctgcaggtaaaatgccacaaaggggtcaggaattcagaagatatattttgtgatagcaagaacttgtagcygttaaaaaaggaagttctatgtggctgtggtatttcagtgtggatgtccacttttgtaagcacttagatgtgggttaatgatgaaaaactatttgccagtgttagaaaatacaatgttttcttaagatagtagcactaagttacttaggttatcatttatttaatcaaccccttttgtaactaataaaaaattagctcctttaaaagaaatttttgatacatttcataattttggcatcactacggaagttttattagcaggggacacagaagcaatgtaatttggagacagacaagcctatgtttggattctggctctgctggttatgagtcatgtgaacttttatatttggtgcttacttttgtctctcaacaatatctatattggaacttgatattttagttttaggctttatctactgacttcccaccatgggatgagaggatttagtcattgttccttcttcattcaaccatgcatgtatgtcctggtccttccaaccctcctattcttccattatagtgatgccattttgtttagagtcagtgctttcattattatgacaatgtaaatgttatccacgatttagctgtgcagcttcatctaattttttccttttctgcattttctattttccctgaagttaatagcatcttactctttcatttgctcaaagttctaagtttgtatcacttatccaagcaagctcttcatcattgtctaaatattctgtctagattttaaaacaaaccatcttgtctgccagttttatctttccacacagtctcccaagcatctgttttgctccaatttgaaatgcttgctctctacacctgttacacagctgttatcctgccaaccaatmgaaattttcttttctctctctcctttttcagatcaggtttctgcatcccatttcttccgctcatctaactcccttgccttgttatgtcctctggtatctttccgagaggtagatattttgagaacttgtctgaaaatgtttattttacacacacaaccttgattgacacattgatagaatttggtagcatttaatacaattttaagtgataattgttttccttgagaattttgaaggcattcttgctccattgccttattctagattccagtgttgctactgacaagtctaacacaattttgattcttgatcctcctcatgtgatctgtttgtttttctctgacaacatatatagaaccttttctttattaccagtgttctgaaatgtcaagacaatgtcccatagtgtatttatttttttatccattttgctaagtactcagagtgatctctttagatctagaaactcatgtttttcagttccctgaaattttcttgaattatatcattaatggtcttcttcattttgttttctcacttctaactgtctgaaattcctattacttagatgttgaatctcttaaattaatccaatttcctggctttttttcctcttcaattttccatctttttttttctttttgtttactttctaagaatcaccttaacttatcttccaactcatatgtttttcacttggttatatttttcatttgcaaaagcgttttttttttttctttctgatttcttgtctttttattaaacatagggcctttccttttttggtggaaccaatattttctcttatctttctgaggctgtgacatatagttattttaactttttggttttactttgttttgttttgttttgtccccacattctttgcctcacttttgttctgataatctgttgccttctctcttgccttccctcttcggggcaacctggtcaacctttcctggattttatagcaaacaacatcttgcttctttctggtatctatgaaaaaactttcatttcagcttttatgatctttaaagttagttatcactcctttgtctgcattccatatttataaaactttgtgtgaaacaagggtggagccaagatggccgaataggaacagctccagtctacagctcccagcatgagcracacagaagacgggtgatttctgcatttccaactgaggtacagggttcatctcattggggagtatcagaaagtgggtgcaggacattgggtgcagygcactgagcgtgagccgaagcagggtgaggcatggcctcacccgggaagtgcaagggatcagggaattccctttcctagtcaaagaaaggggtgacagatggcacctggaaattagggtcactcccaccctaataatgcgcttttccagtggtcttagcaaacgtcacagcaggagattatatcctgcacctggcttggagggtcctacgcccacggagcctcgctcattgctagcacagcagtctgagatgaaactgcaaggcggcagtgaggctgggagaggggcgcccgccattgcggaggcttgagtaggtaaacaaagcggccaggaagcttgaactgggtggagcccactgcagctcaaggaggcctgcctgcctctgtagactccacctctagggggcagggcacagccaaacaaaaggcagcagaatcctctgcagacttaaatgtccctgtctgacagccttgaagagagtagcggttctcctagcatgcagctggagatctgagaacggacagactgcctcctcaagtgggtccctgacccctgagtagcctaactgggaggcaccccccagtaggggcagactgacacctcacatggccaggtactcctctgagacaaaacttccagaggaacgatcaggcagcaacatctgctgttcaccaatatccactgttctgcagcctccactgctgatacycaggcaaacaagtgtctggagtggacctccagcaaactccaacagacctgcagctgagggtcctgactgttagaaggaaaacwaacaaacagaaaggacatccacaccaaaaccccatctgtacgtcaccatcatcaaagaccaaaggtagataaaaccacaaagatggggaaaaaacagagcagaaaaactggaaactctaaaaagcagagcgcctctcctcctccaaaggaacacagctcctcaccagcaacggaacaaagctggatggagaatgactttgacgacttgagagaagaaggcttcagacgatcaaactactccgagctaaaggaggaagttcgaagccatggcaaagaagttaaaaacctcgaaaaaaaattagacaaatggctaactagaataaccaatgcagagaagtccttaaaggatctagcaaggcaggccaactttcagtttcaggaaatacagagaacgccacaaagatactcctcgagaagagcaactccaagacacataattrtcagattcaccaaagttgaaatgaaggaaaaaatgttaagagcagccagagagaaaggttgggttacccacaaagggaagcccatcagactaacagcggatctcttggcagaaactctacaagccagaagagagtgggggccaatattcaacattcttaaagaaaagaattttcaacccagaatttcatatccagccaaactaagcttcataagtgaaggagaaataaaatcctttacagacaagcaaatgctgagagcttgcctcaccaccaggcttgccctaaaagagctcctgaaggaagcactaaacatggaaaggaacaaccagtagcagccactgcaaaaacatgccaaattgtaaagaccatcaaggctaggaagaaactgcatcaactaatgagcaaaataaccagctaacatcataattacaggatcaaattcacacataacaatattaatcttaaatgtaaatgggctaaatgctccaactgaaagacacagactggcaaattggataaagagtcaagacccatcagtgtgctgtattcaggaaacccatctcacgtgcagagacacacataggctcaaaataaagggatggaggaagatctaccaagcaaatggaaaacaaaaaaaggcaggggttgcaatcctagtctctgataaaacagactttaaaccaacaaagatcaaaagagacaaagaaggccattacataatggtaaagggatcaattcaacaagaagagctaactatcctaaatatatatgcacacaatacaggascacccagattcataaagcaagtccttagagacctagaaagagacttggactcccacacaataataatgggagattttaacaccccactgtcaacattagacagatcaacgagacagaaagttaaggatatccaggaattgaactcagctctgcaccaagtgggcctaatagacatctacagaactctccaccccaaatcaacagaatatacattcttctcggcaccacaccacacttattccaaaattgaccacttagttgaaagtaaagcacttctcagcaaatgtaaaagaatagaaattataacaaactgtccctcagaccacagtgcaatcaaactagaactcaggatccagaaactcgctcaaaactgctcaactacatggaaactgaacaacctgctcctgaatgactactgggtacataacgaaatgaaggcagaaataaagatgttctttgaaacaaacaagaacaaagacacaacataccagaatctctgggacactattaaagcagtgtgtacagggaaatttataacactaaatgcccacaagagaaagcaggaaagatctaaaattgacaccctaacatcacaattaaaagaactagagaagcaagagcaaacacattcaaaagctagcagaaggcaagaaataactaagatcagagcagaactgaaggaaatagagacacaaaaaacccttcaaaaaatcaatgaatccaggagctggttttttgaaargatcaacaaaattgatagacggctagcaagactaataaagaagaaaagagagaagaatccaatagacgcaataaaaaatgataaaggggatatcaccaccgatcccacagatatacaaactaccatcagagaatactacmaacacctccacgcaaataaactagaaaatctagaagaaatggatacattcctggacacatacaacctcccaagactaaaccaggaacaagttgaatctctgaatagaccaataacaggctctgaaattgaggcaatacttaatagcttaccaatcaaaaaaagtccaggatcagatggattcactgccgaattatactagaggtacaaggaggagctcgtaccattccttctgaaactattccaatcaatagaaaaagagggaatcctccctaactcattttatgtggccagcatcatcctgataccaaagcctggcagagacacaacaaaaaaagagaattttggaccaatacccctgatgaacatcgatgcaaaaatcctcaataaaatactggcaaaccgaatccagcagaacatcaagaagcttatccaccatgatcaagtgggcttaacccctgggatgcaaggctggttcaacatacgcaaatcaataaatgtaatccagcatataaacagaaccaacaacaaaaaccatataattatctcaacagatgcagaaaaggccttygacaaaattcaacaactcttcatgctaaaaactctcaataaattaggtattgatgggatgtatctcaaaataataagagctatccatgataaacccacagccaatatcatactgaatgggcaaaaactggaagcattccctgtgaaaactggcacaagacagggatgccctctctcaccactcctattcaacatagtgttggaagttctggccagggcaatcaggcaggagaaggaaataaagggtattcaattaggaaaagaggaagtcaaattgtccctgtttgcggaagacatgattgtatacctagaaaaccccattgtctcagcccaaaatctccttaagctgataagcaacttcagcaaaatctcaggatacaaaatcaatgtgcaaaaatcacaagcattcttatacaccaataacagacaaatagagagccaaatcatgagtgaactcacattcacaattgcttcaaagagaataaaatacctaggaatccaacttacaagggacgtaaaggacctcttcaaggagaactacaaaccactgctcaatgaaataaaagaggatacaaacaaatggaagaacattccatgctcatgggtaggaagactcaatatcgtgaagaaggccatactgcccaaggtaatttayagattcaatgccatccccatcaagctaccaatgactttcttcacagaattggaaaaaactgctttaaagttcatatggaaccaaaaacgagcctgcattgccaagtcaatcctaagccaaaagaacaaagctggaggcatcacgctacctgacttcaaactatactacaaggctacagtaaccaaaacagcatggtactggtaccaaaacagagatatagaccaatggaacagaacagatccctcagaaataatgccacatatctacaaccatctgatctttgacaaacctgacaaaaacaagaaatggggaaaggattccctatttaataaatggtgctgggaaaactagctagccacatgtagaaagctgaaactggatcccttccttataccttatacaaaaattaattcaagatggattaaagacttaaatgttagacctaaaaccataaaacccctagaagaaaacctaggcaataccattcaggacataggcatgggcaagaacttgatgtctaaaacaccaaagcaatggcaacaaaagccaaaattgacaaatgggatctaattaaactaaagagcttctgcacagcaaaagaaactaccatcagagtgaacaggcaacctacaaaatgggagaaaatttttgcaatctgctcatctgacaaagggctaatatccagaatctayaaagaactcaaacaaatctacaagaaaaaaacaaacagccccatcaaaaagtgggcgaaggatatgaacagacagacacttctcaaaagaagacatttatgcagccaaaagacacatgaaaaaatgctcatcatcactggccatcagagaaatgcaaatcaaaaccacaatgagataccatctcacaccagttagaatggcaatcattaaaaagtcaggaaacaacaggtgctggagaggatgtggagaaataggaacacttttacactgttggtgggactgtaaactagttcaaccattgtggaagtcagtgtggcgattcctcagggatcttgaactagaaataccatttgacccagccatcccattactgggtatatacccaaaggattataaatcatgctgctataaagacacgtgcacacatatgtttattgtggcactattcacaatagcaaagacttggaaccaacccaaatgtccaacaatgatagactggattaagaaattgtggtacatatacaccatggaatactatgcagccataaaaaatgatgagttcatgtcctttgtagggacatggatgaagctgaaaaccatcattctcagcaaactatcacaaggacaaaaaaccaaacactgcatgttcttactcataggtgggaattgaacaatgagaacacatggacacaggaaggggaacatcacacactggggcctgttgtggggtggggggaagggggagggatagcattgggagatataactaatgttaaatgatgagttgatgggtgcagcacaccaacatggcacatgtatacatatgtaactaacctgcacgttgtgcatatgtaccctaaaacttaaagtataattaaaaaaacaaaaaaacaaaaaaactttgtgatgtctctcttgtaaaattctcccttcccttatctatattttgtaactgtatttcttttctaattcatttcctttcagtttagagaggtttgatgagggagtagagatcaatgcatgagtccaatatgcccccattttactagaaattctcttcattgattagttaactaaactaactaaaattaaccagcatattcataacactaaaattatcactaattatttataattttatggtatccttaaaattttacaatgcagtttttttttacatgttttgtattttaagcttgtttttctggaattaattttcagagttatatattatttctgctttgatttgctggcattattctaggcttctctatatatctatatttatttcagtaactaccttaggcagttactttggaattttaatgtgagcactgtttggtgtggtttttgaaaatgccttaagcgcttcctatacgtttcttgtcagtagatatttttgcggatttaatttagttgtcttttctaaaccaagatttctggattaggacctctgctgttttagtccatgctatttctctattaaatggttgcaggctaaccacacatgggctagaatgtgaaacgagagataagacagggagcatatagtagaacttaataaatatttgcatgtgattgcttgaagctagcaatgagttcatggctcacaaactttataagaaacaaatcatattaatttcagaatatacacatacttctagtgttttatagagttttatgttagccattgaattttactgttgtatggagagcagtattattctttctataaaagacacactacaataacaacacatctgatgcctagataatatatgatgaaggaaaaaaatcaatcttccaaataggtattgactgctaatcattaacagaaatagctatgtcacatatctggcataaggaaggaggattctctataaatacaatacttctacaaggattttattgttatgtgatgagcagaagggggaattcagaaataatgtgacaaaaataattcagaaataaggtgacaacatataaacacattttatctagataataaccaaaacaattatatttatttacattttattatctcaccataaaaatatttatttgaaaatatatctagacactgtttaatattgagcaatgccaaacattttgtataaattatttgtcacaataatttgttgcatagatgtagccttaactatttgacattaagtgcagatgtttctattttactgtaaatatttatatttcaaaaccagcttgatccattctgttttacattgtggctaataatctaatttgaactactttttactcatacgaagtatgtggggagatcataatgactttctaggatactctgttgcccattgcctcttaaatgctgctcgtttttgtttacttgtttgttgagatcttaacactatgaagctttttaaaatctttgtctctttctcattctcctgcattatcctgtttttggaatatctcactattttcagtcacaacaccccaccaaattcacttgattttatatattatactacatccgcctgaaaggcaatttcttctatttaattgacatgaaaaactcatgtactgtcatcactgaaacagaaaatgaaaatttaaattagtattgattatatacatagtacccaaaataccttatttttatttaaggttaaagggtatatctcacatacrcttcttcttttctgacatttcaaactaatgggagggatactacatttctcatctttcaattcctttcttcagaaccctttggtcctttttgattttctctcaatacttttgacactgacaaaatcatcttttcaggttcatcttttttcactgtttttttttttggccatatttcatagttaaccctcattcctactgttccttaaatcctttccttgtacttgtttattaatgtatattaaaagtttgttttcatgcatattgtgtgataatatcctatctcggtttcttaatcacacgttttttataatatgtttcctacttcatgatcttttcctttgaattattttttatatcttgtattttcctttcatgtgagctaaaagaatcccccaagcttctaacatataacctgctttattctcccattttaccggtggatgcattcaagtttagccaccatttttatggtgctgattctcataacactatttgtccatttaatcatgcttggattattgtatctatttctgagccctggatttacaaaaaggtattaacaaactagaatatgtctggagaggatgattaaactgattgaattctcctaaaccatgtcctatactaaatggctgaaggaattgtgtatatttattgtttatcctggagtaaaaaagattaagtgtagacaggataattgttttcaataattcgaaagtgtttcatgtaaaggagagaacagatttgttatgagttgttctagaaagctcaactagaacaaccagtacaagttataaacagataggttcaaatattctctratgaagatcaggtattaaatcttactcattctggctttgccacattgtctagcacagggccttaatcatatctgggcctaataggtgtttattgattgatttgaattggcatgaatggaaagaataaacctctctagcagtaaaaatagactgtcttttgaagtaacagtatccaatctttcaacaaagaattattcattacctacaatgtagctgtccctgtgctaagcatctggaatataaagatactaacatcttaatattgtagatcatttctatgggcaaagcattcttctaaatatttttcatgtactaacttattttgcagcagccttttatggtaggggcttttattatccccaatttagatgtaactgaagcacatagaggttactttttttttttttttttttttaacttttgaaacagtctcactctgttgcccaggttgaagtgcaatgctgtgaccttggctcactgcaacctccacctcccaggctcaagggattctcatgcttctgcctcccgagtagctggaattacaggagcgcactaccatgccagctaatttttgtatttttagtagagacagggtttcaccatgttggccaggctggtctcaaactcctgatctgaagtgatccactcacctcagcctcccaaagtgctgggattacaggcatgaaccaccacacccgaccacatagaggttacataatgagctgtgtcacaaagctagtaagtggtcaagttgtgatttgaattcaggcagtcaggctccagaatctgcataccgaaccgctgtgataaacctcctccaagaacaaggcaagatgtgcatataaaccaaaggacagaaagatttttatattggactataatctagtatagttcttttctggtgattccctggccaatggctaatctgttgacttgaatgcctgtggtcttctttattttcagtcagcttgcacaccacatccgggtgatcttccccaaaagtaaagctgatcattccactcccttgtccacagcacaaatctattcattcttcttgtccacagaacaaatgtaatcaccataatttagacaccaaggccctctgcagtctgtctccacccatacctcttacctcatctctccctgaactctgaatttgaccatgtgcttaaatgatatttcttgtctgaaaagaaaacaaggttattgtgaaaattaagttaaataatcaawataaaatgcttagagtagtagcaccgagaatataactgcttaagaaatattagcatatttattatcatttatttctgattatcatgcaaaaaatgctgtaccctaactatagcttatttttagttccctcactataccttaaaattgcctcataataaaattgagaaataaaaatgtattggcttgcctaatttacaaattcagaggcagggtgggtctagttggggtccagtcagagcttttcctctgtttctctacaggtttctcagcttagcctcctctgtgccagcttatttttcagactggcttccatcaaggcagccagagagctgccagcaacagcaggaactacatgctttcttattcacattcactaggasataaaatattacttcccatarccatccaactgaggctctgagcttcattctcagatcacctgcaaaataatcactgcagcctgggaagccctgagtcacctggtgtagtgggttgaatggtgaccccaaaaagatatgtccacattctaacacccagaatctgtgattttatttggtaaaagagtctttgctgatgtaattaagttaaggatctcaaaatgagatcatgccagattagctggatgggccctaaatctaaggacaagtatctttataagatacaggacagaagagaaggcacacacacacacacacacacatacacacacacacacacacacasagagagagagagagagagagaaagacagagagagacagagacagagacaaagagaaagcaagagagaggaaaaggccatgtgaagtgggaggcagagactagatctacgcaaccacatacctagagccaccagaaacctaaagaggcaaggaggattctgtccttgcctccaaggggagtgtggccctaatcacaccttgatttcagacatctggcctccagaactgtaacagaatacatttctgttgttttaagccaccatatttgtggtaatttatggctgccacaggaaactaatataagtggtcattcccgaaccaactattttgacaaggagcataggatgacactgttgggattacactatttcaggcccatggctggagctggaggtgggggcaatccattctaaactgtgtaacttccacacacaggagcagaatggatattagagcagcaacacagcacccacttcggtattctttaattccacttcctgcttataacctgctcgtttctattggttacagcacaatggatcccaatcatggtctttattcaagagctttattcagcacttcttagtttacatgattaattacgacaactaaaacttgatcatctcatttgagttgctaactgacttacccaatccatagttawcttagctcatcagacacatccctcactgataactccttcaagtcatcttagatatgaccacccaaattaccatttttttgtaccaccgcagaaaaatcccaggactccaaaaattttttaaaaggctccctttaaaatcttctatctctatctacattggtctctttaataaattataatttgagtccagatgtaccttacatgttacttaatgcaatgatgattctcaacatatgttggttaacattgatcctgatgatgcttaactggcatgtaagtgcatgctgcatattcttgtgactatgtgtaaacaaatgtcaaatatgatatttttctttcactcaaatttagtgctttgaaattctttaaaactttgaaatctttagaatggggaacaagcagacttgagggatgggatgaacaaatcattttgcaataacctctgtgttttttcactctttaatgcaaatgtgtacaaaggcctttggttttagcttgtgcagtctaaagatagactattgttgcttaaaatgaaaaaaaaaagactctacactgaatactagaatgtaaaatatgagtttaaaactttttcttctaaaacaaagaatataagggcaaagggttgtcttgctaaaaattttaattataattaagtcttaatcacaacagctaaaagtagaagacacctgttaaataaattatagagaaaatcaaagcaacaagatgtataaggaagcacctataaattagtgtctagaaaaaggatatatttctgtgttctgtatgacaaaacacagtgagcagttgagttattacaggaatagcccatgaaacactgcatctgagaaaccatttgaaaaatatgtgaaaaaatcccagaaggattttacccattcaaagcaactttactactgtcttccttcaaaatgatactttgcaaatggcattgtactgtgttcgttttctttgctgctataacagattatcacaaatttggtggcttaaaacaatgcaaatgcattatcttacagttctgtaggtcagaagtctgacaggggctaaaattaaggtgtcagcaggactgcggtcccttctgtagctctgggtagaatctgtttccttgtcttttttagctgctagaggccacctacattccctagctcatggttccctttctttatcccccaaatgaacaaaggtgattccagtcgttcttaatatcacatcactctgacttcctcctctgcctcactcttccattcttcaagactctgtgattacatggggtccacccagatgatccagaatgatctccctatattaagttggcctattagcaaacttcattccgtctgcaaactcaattctccattgccatgtaatgtcacatattcacagcttccagtgattagggggtggaccttttgggagactcattattctgcttgccacatacaccattgtcaaattcctggtcttggtaactgtactgtgcttacgtgaggtgttatcctttgaggaaactggataaaaggtatgcagggactctgtgatatttttacaacatctatgtaagtctaaaattatctcaaaatcaaagtttaaacaatcccacttttttggagaattgagtgaaaacatatagaaatgattacaaaatttcaggaattacacagtattaaaatagattaaaatggggttatttaactactaaactagtaaatgaaataataaatgataaaggtcacattcttcatttaattaaaaacaatttagtaaatatttactatttatggttgttacacattttacaaagacttatatgagtaccatctcagtttctttccctttaaataaaccaaggcccataattgactaaatatcattaaactacataccacagtttaatttcactatggttgatagaaacaatacattttcaaaacgtttatgtgcctaccaagcctatcaaatgaaaatctaaaccccttaagccaatttatactaaggtgctttataataaatttcatactgtttttatagttttctaaaagaccatcacattctgttttacttaatattttgtaaagctgttggatacatagggtagattttattgacctgttcttacagacaaagaaaactaggattgaaaagttacatgaaggtttctggtcaagaaagacaagtgtatttatatttgggtattctagtctgctcactaaacaaaccaaagtcagataaaatttaaaaatgaaaaaacaggaagacataaccaggactcaaaatcaagaacagaagtaaactaacaaaaatggtgaaatgggctgaaactgtagtaagcctgttagactttaaatttggaagctgctggaacagctagaagattaactcctaagtaagagctgggaggcaggctcattgattgaagacaaggacagggactaaggtgccaatctatgccccagtgagaaagaaggtggaagtaaaagaatggtagcaatctccacctgaagctgtaatgtttagaatgtgctaggcttagagaaccagactcagacacagacacagaagtgctggaaaaccagctaatctccaggctaactctcttgcctgcactagtaccaatgtcactctggctcaggggacaccaagccaatgatgggaaaacttagctctgaaaaagagcccaaagagcattttagagataactgcaaagttgtttgataaggaaggaagtgacaaagagaaaaagaagataaagagaaagaaaaaaaaaaaatcaaaaagcctttcactaaaatgaatgtaaacatcagaatttaaaataaagaaataaatctaatgctaagaaagagaggccacaatactacaagcaaaatgtaacttttatattgcagtctgacaaaaacttagatatatattttaaatatgcaaagagataaaggatgattttcaattaaaggatatataacttgaaaagcaaagaaaaatgaaacttgaacaagtgaatatgaaataagtaggaacagaatattagaaatgaaaaatacggcattaggaaaacacaacaggcaaaataaacactaagatatagataaagacagagaaattgctaagttgcaaaatggctcagaagaatttacccagattacagcttaagaaaaaaggaatgttttaaaataaatggcagagcagttgaaaaccttgtgaggtatattgaaaggcctcaacatttagtaagagtttcagaaaaatacaatgtaaaaagaaaaaaaaaaaaaaagctgaaaatagtttgtacagacaacttcagcaatcccattacgggatatatacccagtaatataaatcactctatcataaagacacatgcacatgtttgttcattgcaacactattcacaatagcaaagacatggaattgacctaaacgcccatcagtgatacaatggataaagaaaatgtggtacgtctataccgtggaatactatgcagccatgaaaaagaatgagatcatgtcctttgtggaaacatggatggagctagaggccattattagacttcrtgtctaaaacaccaaaagcaatggcaacaaaagctaaaattgacaaatgggatctaattaaactaaagagcttctgcacagcaaaagaaactaccatcagagtgaacaggcacctacagaatgggagaaaatttttgcaacctactcatctgacaaagggctaatatccagaatctacaatgaactcaaacaaatttacaagaaaaaaacaaacaaccccatcaaaaagtgggtgaaggatatgaacagacacttctcaaaggaagacattcatgcagccaaaaaacacatgaaaaaatgctcatcatcactggccatcagagaaatgcaaatcaaaaccacaatgagataccatctcacaccagttagaatggcgatcattaaaaagtcaggaaacaacagatgctggagaggatgtggagaaacaggaacacttttacactgttgatggaactgtaaactagttcaaccattgtggaagtcagtgtggcgattcctcagggatctagaactagaaataccatttgacccagccatcctattactgggtatataccaaaaggattataaatcatgctgctataaagacacatgcacatgtatgtttattgtggcactattcacaatagcaaagacttggaaccaagccaaatgtccaacattgatagactggattaagaaaatgtggcacatatacaccatggaatactatgcagccataaaaaaggatgagttcatgtcctttgtagggacatggatgaagctggaaaccatcattctcagcaaactatcacaaggacaaaaaaccaaacaccgcatgttctcactcataggtgggaattgaacaatgagaatacatggacacaggaaggggaacatcacacacgggggactgttgtggggtggggggaggggggagggatagctttaggagatacacctaatgctaaatgacgagttaatgggtgcagcacaccaacatggcacatgtgtacatatgtaacaaacctgcatgttgtgcacatgtaccctaaaacttaaagtataataataatawaattaaaaaaaaagaaaatgtggtacgtctataccatggaatactatgcagccataaaaaggaatgagatcatgtcctttgtggaaacgtggatggagctagaggccattatccctagcaaactaacccaggaacagaaaaccaaatactgcatgttctcagttataagtaggtgctcaatgatgagaacatgtggacacatagaggagaacagcagacactggagcctatcagagggtggaatttgggaggatggagagggtcaggaaaaataactaatgagtaccaggcttaatacctgggtgacaaaataatctgtacaacaaacccctgttacgtgagtttatttaacaaatctggatttatatccctgaacttaaaagtaaaaaaaaaaaaaaaagaaatagtatagtattgaatcaatagaacagaatagtgtccagataaacacacacatattaggtgatcactgtaggggtttacagaggaaggtgtcactgagaaaagacgtagaggataagatcggactggggaggtgttgatggagttgcgtttcaccagaacctggaaaagatagaggcaaaagtgaggactcctgtttttcagagacagaggcaaagatgtgtgggtgtggaccaatgaaggtaaacatgtaagggttagtagtaaacggagggagttcatccctgctggtctcggtttactcagagagtgggaaggagatagaggatggtgtagctgctaccggaggggagaaagagtgggctaccaacactcatctgggaacagcaagcccccgactcctggtttcttttctgctaaactgcctgcatcatttggtccaaaccgacattccccaaaaccccaccactccttccttaaaatcataaatgtctgctgggtgcggtggctcacacctgtaatcccagcactttgggaggccgaggcaggcggatcacctgaggtcgggagttggagactagcctgacaaacacggagaaaccccgtatctactaaaaatacaaaaaaatcagccgggtgtggtggtgcatgcctgtaatcacagctaatggggagcctgaggcaggagaatcccttgaacccaggaggtgaaggttgtggtgagctgagatcgtaccattgcactccagcctgggcaacaagagtgaaactccatctcaaaaaaataaaaataaaaaaataaatgtctgctaaactgggaaactcataatttaatttatgtgaattgtcttcagcaagtaatttattgctatacttaagtcccaaaatacttccgtttgtagccacaattatttaaaaaaataatttttaaacttttggaaaagagatgacagaatgaaataattatatttcttttcataattgttagagataaataaaaagatatgcaaatgaaaatatttttaacaaagaaacatcgaccctatcttttagtatttctccatgtttcttcatttggaggttaggactaaggatttacaaatacaactataaaaagtatcaattacctgtattttgttattggagctccaaattcagttcaatgcaacaagtttttaagtaccttttaggctcaagatattctgtttatgggaagggagaagaaggagttgtacaaaatacaggaagcctttggctgtagaaatgtataatgctcgtacataaagcagcattattccaagtaatttaaatctccagtagtctgcactttttccgcaggcttggagatagatatatgatctccaaataggtgtgttttcccatcacagctgaccttcaggtttgcttaaagcaatcctgctgctcctaccacctcacctttgtttaatgagagccatttcctaacgccaacgttgggttaatggactgagatgggagaaaatcaaacatatctctccattttacaccagattgcctttctgccttgtggctttaatcactcaatcctactcacatctgccataataacaattatgggttttctactgctttctcacccaggaggatatgtcagaggatagtaacatctcctgaagaaaggaagggcaaattcttaatctttttccagcatcgtaggtaataattttcctctgcaaacccccgaggagtactccttttggctcttactcccaccgttcccacaggttcgtggctctgcttggatttatgagttttcttctagccttttctcttctgagataagttttaattatgtagacagattgtaaaagtctctttcttcttgtaaacaactatttctttgttagtactagattttgtttaactggtttcctcctttctgaatcttcttatgyacccaggaattatgtctgttcattgtttaatggcagcatcaagagaagagaaagctggcttcatttcatagcttcccttgagggattcaatttggaacacctcaaattgcaagtctccctcgggaactgttctttgttacatatgtttggaagcccataatattttagtttagattcaatataagagcaaagtatcacccatcaaataagcagtatgataatactctcggctcttctacttatttaaaaactttctttactacctgaatcaaggaaatgtctgaaatcctcaaaagcactagtgaaatgttaaacagttgccccttcctcagagaactcagagaactggatttgagaaagcatcttaggtagcgctgacaaacagctcttaccctggccccttccaggtcagagttaaaatataaagaaraataactattcaggccaggggcagtggctcacgcctgtaatcccagcactttgggaggctgaggcgggaggatcgcctgaggtcaggagttcaagaccagcctggccaacatggtgaaactccatctctactaaaatacaaaaattagtcgggtgtggctcagctaattctagctacttgggaggctgaggcaggaaaatcgcttgaacctaggaggtggaggttgcggcgagccaagattgcggcactgcactccagcctgggcgacagagtgaaactccaccacaaaaaaataataaacaaaacaaacaaacaaacaaacggaaaagaagtattcatgacatgatatttttctcattttgcataagaacttttaactatttggtgggtttttttttctaatcaagaaatcattctaattacttaatacattcacttctaattctgaattcttacattatctttgaagctcatttgtttgagaactggttttttattttgtatttttttttgagacacgatcttgctgtgttgcccagggtggagtacattggcacagtcacagctcactgcagccacaacctttcaggctcaagggaaatgccagccagccttaaggactgtagaaacgcagggttgacaggagggctcccattgagtcatctcttgttctgatttctgaggtcattttttgagctcctttaagagatgaggaattctatcaccacaaagttaaatgtggtatcatggatatcagctacagtttttttgtttttgttttttatttatttatttatctatttatttgagacagagtctcgctctgttgcctaggctgaagcgcagtggcctgatcatggctcastgcagcctccaccattctgggctcaagtgatcctcctacctcaggctttccagtatctgggactagaggcccatggcaccacgctgggctaattttaaaatctattttattttttgtagagacagggtttcaccatgctgctcaggttggtcttgaactcttgaggtcaagcagtcctccagcctcagccttccaaagtgttaggattacaggcatgagccacctcgccagccctgaaaattggttttgccaagaatacctaaatattatcctttaaccagacaagcaatttcccacagcagtttttaacttttaactggcaccccataaaacacctyttaggcaaaatcaatattttccatcaaagactctcctcaaatattttgaggcaatggaatagaagagataactttttgatgcagcaatgtgcatgatatcttcacatttaagaaacatttattcggctcacccagaggggttgtgttctgtggccaaggaactgagccagggtttctggccagcgttagatacaaagccgtgaccttggccccattagccgggctgctaactaggtgagctcaccacacggcttactgcatacttgtgtggcagttcattgggaacagggattctttttgtttgtttgttttttctatttttatttttattttattttactttaagttctgggatacacgtgcagaacgtgcaggtttgttacataggtatacatgtgccatggtggtttgctgcacctatcaacccgtcatctaggatttaagctccgcatacattaggtatttgtcctaatgctctccctccccttgccccccatcccccaagaggccctggtgtgtgatgttcccctccctgcatccacgtgttctcactggggaacagggattcttaatgtgggtttcagtgaaggtacatgaacactttggcattttatgtaagattttgtaaatcttttctaaagagagggctcacattttcatcagattctcaaaaaaggatgcaattttttttaaaaaaaataaaaggttaaggttatattaaacgagattgttctaaaagaaaatctgttcagtatttttaaaaaaataaaatagctctttattactgaggtagatttctgtaatctgaggtagatttcagtaatttcatgttattgtgggaggggtccttgaaccctgaccttttattatttatctttttatgcctctgaaggattttaaatgtgctctttaaattggagaaatctgttactttatatgagagaaaaatgatattacaccttcaatttttgaactttatatattcttaagacaggaggtgatttttccttacattctacaagcatgtttttcaaaacccgtcctttaacaacccattctgttattcttcctacttgcaattattttaaggtatcccaaaccttactttacactttacaatacaggaggacttaagtctggccagactttgcctaactaaatgttaggatgttacttattaactgtaggataatacattccttagataagataaaagtatgcaatagaaaattgccattctaggaacacctactacagtcttttctgtcttcagagcattagtgtgcacattaagtcttcagccttgttgagatagtgaatatttatgccgtatttgagaattaatattagcagaaatgtacaatgtagatttctttttaaaattctaggttactttatggaattgggctcttagagaayaagaaaagactgaagttttacgggaaaacaaatcatgtggtcttcagattctgaaataaggagaaatgcagccatctgaaatggtcatgaaccccaaacaagtcttcctctctgtgctgatatttggagtagctgggctactcctcttcatgtatttgcaagtctggattgaagaacaacatacaggtaacacatgtgctttttcttctattttaattgtaacaataatagctatttttaaattaaattagttgtgatgcttattaatatattgagaatcacaatattttcaacaacaaaaaatgagtcataagataaaattcccrgctcctaaaaggaaggaaaattatacaactctggtaggcatttgtttggtggcttaacaatggaaatttttgttatctcagtgggggaatagcagtgctcccacagtccagcaagaactgcttgtagagaatttgtctccaaaagtatagcatttatcctacttcttatctgtccatggagcatcaggcataagcctaaaaggccctgaatgtacagcagcctctcctttaattctgtcttaatttatattgatactcaaaattggtataaatatcatttaatacctttattataaaggaggggttggcaaatcttttctataaaggactagatcataaatgttttactctttgcaggccataccatctctaccacaactactcaattctgctaatatatcaagaagcagccatagattacatgtaaacaaatggaacaggctgtgttccaataaaactttatttacaaaaacagctggtgggccagatttggtccacaggcaatagtttactgatccctgctgtgctcatcttgtacttttgtctttcaatttgcaattgctgcccattggaggcactcamttactgttaaaaatgattatatttataatgatatagtattattaaagtaaaaaacttagaatatcatagaaatgtatacatacagatcttgtgaagttctgatggtttccattggtagaaatagactatggcttatgactgttaaggataataaagtaaaagcagaagaatgattttttgattgtctccagttgtggcccattttcttttttyttttttttttaagttattctagatataaaacccttaagaatcttctccaaaagacaatttaatactgagttacaactatgattatttttaaaattgtttccatttttaaattcctttctttggtttatcctcctacttttttttttttttttttttttttgagtcgggattttactcctgtcgcccaggctggagagcgatagcatgatcttggctcactgcaacctctgcctcccaggttcaagtgattcttctgcctcagcctcccaagtagctgggtctacaggcacaaaccactgcacccggctaatttttgtattttttgtagagacggggtttcaccatgttgaccaggctggtctattttgttgttgtttgtttgtttttgagacagagtcttgctcagtcgcctaggctggagtgcagtggcgygatctcagctcactgcaagctccgcctgctgggttcacgccattctcctgcctcagcctcccaagtagctgggactacaggcgcccgccaccacgcccggctaatttctttttttttgaatttttagtagagacggggtttcaccatattagccaggatggtctcgatctcctgacctcgtgatccactcgcctaggcctcccaaagtgctaggattacaggcgtgagccaccgtgccccgcccaggctcgtcttgaactcctgagctcaagtgatccacctgccttggcctcccaaaattctgggattgggattataggcgtaagccactgcccctggacaacacttttgatgtatttaatttatatagtaacctttgtgaaaagaggttgcatataatgattttctaaagaatatgtaacatattgtcaaaatatattcttaattccctttacagtttacataaactattatgctaacttttctatactactgaaataatttatcataataacatcatatttaatgaaaccacctgtagtaaaatatataggctaattcctcctgaaatataacccttagcatagatcctgtaacatagtaagccttcagtaagtttttgttgaatgaatgaatgaatgaatgaatggattgaaaattcactgaagactatagactgaaatacagcaaaggaagaagaaagaaaaagatctcattattttgagttttgctcatatcatggtctcataacaaatttcacaaaaagactatcacagcaagattttaatacttaagggaaaatatattcatatgtatagactacttttttgcagaaatgtgtttagtctgtcactaagaaattatatatctaaggaaacaggttaataataccatacatataaaatgtagtttaccaaatgtgtccataagcattaatagctaccatttatggagagcttaataagtgccaaatgtttacataaattttctgtaatcctcatatcttactaggtgagtattattctaaatttacagatgaggaaaatgagactccagagggataaggggcgtatccaaggctttgcatggccttgttgcagaggggaaagcctggatttgaacccaggttgtactgctacgaggtccacgcctctgctcaatgtatcacttccatgaaggaaaaaggtgaatattattatttctctatagcacagatgaagcaagggagactcagaaagtttaaatgacttaacctgtagctataaagctacaggtttttgaagtgtaacccatacctargttttcctaattgtcggaatccctgaaagagtctcctaaccaaaacactggattatgtaggcatataattataaatgcagtagtatcagtacagatgttttaaaatcactgaaattggtaaattaaatgacatacagatgtgtaacttcttctacaagattaaatcttaacttgagttcataattttcccaagtgttggaaaattattttccttggttaagactggtaaaacacttaccatttattctcttaaattttatttgtaattttgatagaagtgctttccctgattcttgatatattttaaatgaattatgtaatatttcataaactactcatgacaaaaagcataaatgtaaaagtcaagagtcctgtagataactatttctctgaagaaaaactgtaatattctttaagaagacttccatctgaagttctgccttatactaggttagtgctgtgagttgaaattctgcagttttctaggtaggcagacatttattttttatatatatatatrtgtgtgtgtgtgtgtttcaaataacatcaggagcattaggcatttttaaaggcaatctctttttaaataaataaatatatgaatatgtgctttgatgttaagtttaaaaaaatggaaaatctgtcttttggacactttagaactgtcactcaaagaaactttgaaagatgagctggtttggttcctgagactttctataagtaatgctggttttaaaatctaaatggctttgatcacacatatatttcagttatatatgagaattcttaggttttcttcgtgtcttttatttgaggcttttcaaatctaagatatggactattttctaagcctccctggttttcttgggtttttcgtattaaaataaaatactttagaatccaaaaaatctgaaatatgctctgatatactggtaaaggattatgaaaacagatttttttggaagtaaagagaagctgtatgacagagaaattaaaatctatccaattatgcaatagagttccataataccatctactttttcaatatcactatccattaatttatccatttcctagtgctaatttgcagtatgttgatatgttatcacaaattttattttagttttttttttcatagttgttacaggtacaagtttttcattcagaaggatcttgaaaaatctcagatctcctgtttgttagctttgtaaccctgggcaaatttctttgcctctctaagcctcagtttccttatctgtaaaatgaggatagtcatatttttcacagagggttgcagtgaagattaaaggagacaatgcttgcaaagcactcagcatggtgcctggcaaacagtaatgcacaatgaacgtgagctgttattattatcctggaaatgacgcagaacatctgaaaacttgctttttctgagttgccacaattaaaactcagccacaattcaggaaaattcaattgtgcccaagcttgtgccttgactgagtaaggtttaaaaaaaaaatgaaggcttagatccaactttggttaaattagttgggagaagctaattggcacagagccattctggttcctaatgtagaagctggcaggagaaggataggattgagtgcatagagagaggtcattgtccaggggtatctcgtgtccatacaagctgcctccatgggcagaggaatcactcatccagcagtatttcttgaagacttaacaattggatgtgctgagcaccatggtgaatacaggcatgtaatagtgagccagatataatcctttttctcaaggagagtgcagtcaaatgaattgtaagggagaaaatggtcctgagtccaggccaagccattgggacaaaaggaggagtcctttgtgacagaaaagagacagrccctccattatgggacaaactaatgagttgcaggcaggagaagcagcacagtcagttgtcagggatagaattgctgaccagatagaagygctagaaggaggggagtggaggctgggcaggtgaaagcgtgcagaggacccagaggaccagaggagagcagggagctatgcgtatgatgcagcagtgatgagggctggttaggataaatcacaagaatggcttgttgtttattttttcccccagctactgtttaagtttataagtggcactatttgtctagttagaatcttactgctatatggaactcataccaaaagtcatggtgtataactgtttcgtatgtgccgtaagacagctttgagaccctctaacgacagagtcrccatctcagctttagataagaattcaaagatcctcttgaatccacccgttttttaaaaatacaaattggattatatcactcccatgtttaaaatttttcaatcatatttcatttcctttaacaaaaccttctccccagagcccacagctgtgtgagctgtagccactgcctgcctcctcagcctcattctccattcactcaccatgcttctggagctgcctctcttcctctgctaaaccaagccctttgctgactggatgtgctcagtttcaggagcctgggatcccttctgtcctctcacctgtcagggcttggctcatatgtcaccttctttgatcacccccacagtcaatcagtgcctctttctctctctctctctctatacacacacacacacacacacacacacacacmtatatatataaataaatcaatatatacagattatataattatgcatataaatcaatataatcaattatgagtcaatataattaataaataataaattatatattcattatatgtataaatcaatctctccttcttattcattttcttcagaaaaattatcacaatcagcaattgactccttaattatttgttgacttattaattgtctgtatcctttcctattttatgaactctgtatggacagagagctcataacttgtgttagaaatactcatatgtaacaacattttctatcaagtaatgaagagttatatgcacatattttaaaacatacaaagcagtaaaaatcaatacagattgcatctaatagtttacattatatattttcctgagattttccagagtcaagtttagtttgagccattccaaactgaaaccatttcctcaatgtagcctacattacaacaatctgtccaaataacttctaagcatttctatctaggaccaatacttttttagctatttatttataacaattttacatgtttacttaaaactcagaaacttctttaaaaactgtattaaaaaagctttttgtagacaagaatggaagcrttatagtttagcagttattgggtcccaggcaatgctctaaacacatcacacccactatctcatttaatcccacaacaagtctgagataggtaccattagtattcccatttttcaagacaagaaaactgaggctaagcaaataagaaaccagaagtctgattcaagccgcctcattctaggactccaactaagccaccctgcagtgtgcagagatggtgagcattgtagagtcatgctaagagaaggcactagagaaagacacagtgcactggccaggcagtgggcagcctgggcagtcactccaggtgcagaatgacactccgtgcttccagaccacaccacattcctgggatgcctcgctgtgccacagtaggtcatcacgtgtttcctggttgtgcaacctttcctgggttcctgtgaagcctgatctcatttccacaagtaagccttctccattgctctggataaactatggtatctccctttcttgcccctcaaaagcctaacactcaagtaaactcaaaaatattatccaatccaatagttgttctcaaacttcaatgtacatcagcatccccttaaggtttggttaaaacagactgttgggttccacccccagagttactgatttactagatctgggatgaggcccaagaatttgcatttccaacaagatttctgtggaccctgatgctgcagatccagggattatattttgagaacccctgatccagagtctctgtacccaaaatgtggaaagcagcagaagcaacagcgtcacgtgagacttgttagaattgcagaccctcagcacccacacaggtctgctgcatgggaatctgcattttaataaaactctcaggtggttgctgcacatggtgaagtgagaaaagcagttagatcagtggttctcaccagctgcttgagaaagaccagacgttttaaggaacacgtgccttggtccacaccctgacatgttgattttggttcctggcctcctccccagagatgctaatttgccaggctgggagtgcggccctgatacggggatttttaaaatctccccaggtgattttaatattcagtcaaggttatgaaccactgacccagaggtactgactttggctgatttattggcacttcctcttacctctcactcatctacaaggcatgcactagaagaagaaagagtggtcactgtaatactcttattaagctgacagaagaggagaaagactgtaaataacattatgtctgaggtctccattttcaccaagacaggcttcaagttataaaaagttgaacaataaagtgagaccaacaaagtgaaattatttctaaacccagaaaatattactgcagtatggatcagctgacccagccaaggaatcagacagaaaaatatactcttcccaaacaagtatttgttcccaatatgaaacggttcactactgcttcccttccttttaaagcacttttttgtcccttgttttgtgttatttttaaatttttttaattgacaaggaaaaattgtatacacttatggtacacaacatgatgtcttaatacatgtacaccttgcagaacagtcaaatcaagccacttaacatatgcatactctcacatactaatttttttgtggtaaaaaacacttaaaatctcctctcttagcaatttgaaaatatacagtataatatattgttattaactatagccagcatagtgtaccatagatgtcttgatgtaattgtctctgtctaactgaaattttttgttttctgactatctccccakaactcagaaactttttamatttttcttgtatacttctagttagattttttttcctgacttttaccagtttttttctgatttatgtcaaataagtacaatgtctgaatttaggattcagcattaacatctaaggtcaataatttagctatgaattatcattgctaaggcttagcaatgctaaggcacatagcaatgtgcctataagagaattatataaatataaccccaccttttaaaaactcattgtcaccaatccatgctctgtaggaccctggtcctgaacttattttgcctgaaaatactctttttttggtcagtgatatgaccttttggtaggtcgaggttctattcaaatcctacatgctactagcagtggcaagttggccagaatagatggtgacttgtactagtttttgttttgttttgttttgtttaagcacataaacatcagtagtcctggttgtatttcaaccctcccactttgtatgaaaatgaaaagtagtagctgcaagcttctgatttcaggcaaagtaaagccaccttattgctttttctcagataattgattctggtctgtgcatctggtgtttctaaggagacttcatcttgcttttttttcaaactaagtacactttctctctctacattgaagcatatttttggcatataaagttttgtttctagactggactgatataattcttttcccctgagcctctctgatgagagagtctgttcttttccttcaaaaaccaggccgttcatcctgattgcgatgttgctgttttgaaattgtattttctttcaggttatctctgtatacctgaactagaacaaagccattttttacatagaaggactttatgtttactgtcaatcatatactcagggaaataaaattgcttttctttaaaaagtcactgatttgaattactttctcctatatctgtaagtgtggcaaacaatttttttaatcaaatgagcacatgctcctgctgcccacttctggacagcgccacacctcgtcttcccattatgtgattattcccatgtcacggctgttccctcttcctggagcacgtttccttggccatttccatggctgacttttctgaatccttcagggtacagcttcaatatcaccttccccaaacatcctatgtaaagtggaagttttctctctctgcagctgtttcattgttttttaaaatttacttcatggcactgatctcaatttgtaataattccttttgtttgcttacatatgctctgcatctcccagtaaaatggaggcttcctgagggcaggaaacttgtattttggtcaccagtgtcccacagctgcccctgcttccagatgcacatttcagtcctcaccttgccatgtaccccagcaaccctattcactcagccaattacaactcaactctgtgggctctgtcttaactctctgccctagctttttgagtctcttgtattcttacgtgctgtcccctgcttttgcccgataccccagaagtgaaggagtcatggatgtcaaattgcttaaagtcttctgaacctgaataacatgcagcagccaagctttgcaacagagtcgatcccatcaacatagatgtttaacatctagtaatatattgaatgtgtttgttctcccaacatgttttgagcacatataaacaatgatgcacttgctatctacgaagtggtaccaggaactgccatattacaatgtaacccttcattagttctgttggcaggtacctggccaatgctagacctgttattcctagtgtaccacacatgatgagcacagtaaatttatcgtccaggggatgggaggctaatccaagcctggccagtgattccctttctgggcattctggcttttgagacttggaatataggctgagtacctggactgtctgatgcaaaggtcagaagcttgttcagctgttttctaccaggtggaccagagcagctgaagattctaggcttagagcaagagaaagaagaaaagcagacaggaagaaaggagcagagttatataaagggagccccagcaaatgttggggtcccttgatccatttactcccagacctaacactattcctactctttcttaatcttctttcctacccacggtgagcactcatctgtctcagagaaggcttactgaatttcagaggggcctcataatggaccccattttctctatttacctcttagagtagagggtaaagcagaggatggcgcagagcaatccttcttcactgtttttaattcattttacaccacaaaccccaaggtactgccttgttcactcctgtgccctacgactgagcatggtgcctggcacatagtagatgctcagtaagtctttgctgtatgagtgaattcaccccaaaactaagcacctaagctaaggaagacaagtgaagctggtgtttaactcgatttttcagaagttaaattgcttggtttggggtggggtgcagattttctccagggatatcctgaaatgtcttcgttgaggtcagaaatgtgttatctgcagtttatttttccttttgcaatacagtattttgtttgaataaaacagtggatcatcatttagctgacatgttgtgaagaaaagtcaaaacctgaatgaggaattatagaagataaccttttaaagtctcttacaatgttaaattttatgtgactatcattttgtgtctaaaggagatgttaattgaaaaaactaatctctgtgaaatattttaaagagggttattccaagccaatataagtgaccagagcccagggtaaacacaaacccaagatgcctttagtaagtggccccaaggcagttggatgacggtttggttttatacattttagggaggtgggcattacaggcaaagacataaattaatacatgaaaggtatacattggttggcccagaaaatgcagggtatcttgaagtgagggcttataggttaaaaatggattcaaagattctttaacttacaattggttgaagcagtaagactctgtgtaaaatttggattcgcagaaaggaatgttttaaattaaaatagggatgctgtgtagcaagattaatggcctgcaggtgtgtcttcacccttgcctttcatggccttaggtcttatttataatttgttacctattgccacaaaaagtctgttgtgtcagacttatgatctcgattttaacattaatgatgatcagttgtgtctaaactccaaaaggggtggggagggcataacaagtcatgtctgaccttgtttctcatcatagccaggaactcagtttttgtttttttgttctgttttgttttttgatacggagttttgctcgtgtcgcccaggctggagtgcaatagtgcgatctyggctcactgcaatctctgcctcccaggttcaagcaattctcctgcctcagccacccaagtagctggaagtacaggcgtgcgccaccacgcccagctaattttctgtatttttattagagatggggtttcaycatgttggccaggctggtctcgaactcctgacctcaggtgatccacctgcctcatcctcccaaagtgctgagattacaggcgtgcgccaccacgcttggccaggaactcagttattgaaggtttctctggggtccctgggccaggaggggtctatttagtcggtggggaacgtaggattttattttaagtttacagagatattaacaaataagtctcagaagctctccaaaatggattagtagttaatgctccagttagtagtttgtagtgaaaagtattctctaggatactcacttctaacctgctttgtgtctttgaacaaattggaagtctctgtacatgatggtttcttttcttctctcattttygtaccttctttcttgccttcctgaggtaaccccatcctaaatttgatgtttattaccacattcctgtatgtctctataatttttaacacatgcatgtattccattttcatatttgtagccttatgtgaaaggtatctatctgtatataccctttggcaacttgctttttctttcaacagtaggtttttgagatttatttgcattgatatatatagctctcagtcatttacctaactgctaactaatatttcattatatgaataagctgtaatttatatatacattctccaactgatgcacattaaagttgtttctaacttttgactctcacacataattctgctaagaatatcattgtataatctctttgtttatatgtttgaaagctgctataaggggctgaattgcgtattctccaaaatcctgtcagcttcaaaattctatgcttccatatcgtatctattcctcggctcacatgaatccaaattagggtttcttaaaacagtagaagtgttcaatgataattctaataaaacatacacagaactatttttttggatacactgattgctattcagaattatagcggaaagatataaatataagacacagaatctgctctcagtgtttcttactttattggtatgccaacagagtatttcacagttcattgaaaatcgattaaaataaytactaggtcattagtgtggactttgagtatgagtgtaaagacctcactcactaaataattcatggcagtcagcaagttaagtcctgttagcaagtattgattcagtaatgtaatactacctagtccaaactacgtaattttcctaatagaaataaactcctttaaatgtcaaagcaccatctagtcccagcctcctcccgaaaagcttaaatttgcatagccagtaggtaacaaaactggaactaaaacagaattcctgctaattgtttttccatgctgattttttcccttcccctcctccacctttgccttcttctttcctgccttcttgagatccaagagggctcaagatcctttggaattattggcttatttcccaaactggtttgaacatagcttttccaaaacctagaattaggaagtttagcaactagatgcaccacgaggagcaagaatatggtttctgttctccagctgaaaatctgtctgctgagaacttactactgtaccagccccagacttcaagagaaagttcagaagtacagaaccaatgtctttggaacaattcactgaggttttattttcaaactgaggtattcttttcaagaataaaccaagggtcatgcagtggctcacatctgtaatcccagcactttgggaggccgaggctgatggaacatttgaggtcaggagttcgagaccagcctgggcaacatggtgaaactccatctctactaaaaatacaaacattatctgggcatgatgatgcacatctgtaatcccatctacatgggtgactggggcaggagaattgcttgaactcaggaggtggcagttgcagtgagctgtgatcatgccactgcactgcactgcactgcacgccagcctgggtgacagagcaacactatctaaaaataaaaataaaaataaaaaaaataaaaaataaaaataaaccaagcaattaaggcaattaagaggtttggtggcaagttgcacagtttctctaattcatcacagaccaaagaagtataaaacttgaaaataaaataaggatcatttttaaatgaaagaagaaacttagttttcattaagtgttctgtctgttatttttccctaagtcacagaatgctaaaagttttatcgtgttttatacagaaacttgaaagtacattttgtgtgtgtgtgctaatccaacagacaaaattaattcactttcctctactatttctcaaccttttagcttcatttcttactgcatgattctgcctgggttttaaacatttgccattgtgcctgcctccttccctactgaaagccccatgagggttaggaccacagggcctagaacataggagaccccaaaaaggaattcaatggaaagaaatggaggagtgattccaaaaagacagagcagccaacggtttatccatgattcacaatgtatcagatctttggtgtagtcactaccttctaggtccatttgtgagcattgcaattctagatacttcattttgccagtttccaagaattaaacaacttttgggtcactaatcatactacacagtcacataggaatttaatgtataacccaaaaatcatttaaccaatgattatcacattaatggagtagtatcttgctactagttaagtagatatatggactggccaatcttctccgttttgctaggttcagagtgtttgagaaaaaatttactgttcctggattcacttaatgatttggggccgggcacggtggctcacgcctataatcccagcactttgggaggccgaggcgggtggatcatggggtcaggagttcgagaccagcctggccaatatggtgaaaccccgtctctactaaaaatacaaaaattagccgggcgtcatggcacttgcctgtagtccctgttactcaggaggctgaggcaggagcattgcttgaacctgggaggcggaggttgcagtgagccaagatcgcgccactgcagtccagcctgggcgacagagcaagactccatctcaaaaaataaataaataaaataaaaatgattttggaatctttttgtgggtgtgttttgctcgggtcatgaagaagcctcataaccaatgtatcacaaaatactatatttcatggtttcatccccaagatcagccagggtgtctgttttcatatatggcaactgtagattgtgacagaaaattacacaagatggattggtaccaggataaattgatgagtccttaatgttgcttggcaatcctaagttctctactgagctttttccctcctgttttctagagaggcagcttttatgttactttctccttgacactccaaacacgtctcctccccatgtcactgcagatcacctctcctctgtcgtcacagaaaagagatggctagtatcaaagaaaactcccagagcttcctgctaccaagacatagactcacttatttccaccttcatgcctggctcccctctcagctacttcctcctcctcctccttattcttctactcacatctggctcccaagggcttctgcctcctcagtggtcttgcccatcgtctatgtattctcttctgtatcatcgtctctttctgtattgctttgtcgtttctgtaattatacacagttcaatctcttctgtctaaaaataaagcacaactcaaatatctaattctttcaaccatattttccctattccccccaatttattccttccctcctctttaacttctttgaataattttgtgtcataactatctccactgtatgaccatcctcaccctcacctttcttactggagtctgcccctatcaaccactggtccttttctccgcaaccaccttcccaccattaaatccaataagtccttttcagtcctcctcttttgagttctgtgcagcattagatactggcgatgtccacttcatgccactttcccttgacgtccatgaagacaggcctttccagttttcttactgctgtctggctgcactctcagtttgctcttcagactactttatttccttttctcatcccttagatattgatgttcttcagagttctacccttattctctttcatctcactctacttggattccctgtgtgatcccatacacagaaatttgatcccttgcaagtctctgtagtgccatttgttccctgggcatctatacttgaatgtctccagaccccttaaactcagtaattgagctaaagtcataatttctctccaaagtctatacttcctccagaatactccgattcagtagtggtgcaatggctccacctaagactgttgtcatgtatgatgcctccagtttcctcttccttcctctctgcctgcacctacatgttatccagaaagatctttgtagctactcccaagtgtgtctacttctctctatcccattactactgcctcagtctatgtcacaattatccttttctgaggttgctgcagcagcccctaaagcagccttcctccccatcccgtgaccttgccctgtcaccatcccattgtcctcactgagcctcattgtcctgcttgaagcctgattatcctcctgcttgaagctcttcatgtctccccagtggctctcrggacaaacctcaactccatactcaggctatcaaaacccttcatgatgtggcctctgcctaactctttaggctcatttctggccacattgctcacattgccctaaacctccagctgtcctaaattttcagtttctcaactgaccatcagatctctcaaccctaggcctctgcaggtgcctctcaaacagttcctgttactcagatgcttaagttgcctctcccttgtgctctctattcttcccagttgaagccctcacgagggtagatttaaagtgttgtttaatatcatccttatcacactcaacccactagaccatgagatctgtgatggcggcactgggggaacattgtaccattgcatcccctgtgcctaacatatgtgttccttggccacaactggtaggattttgttaactcaatttgaaaatatcaagttagaaatcttggaagctaaatacaggtgtatgccttctctcttagtcagaggcacatgtagcaacctccaaacttccgtaaccatgaaaatgatgttttttatcagaatgtctgtgagaatccatcatctgatttcatagagcgaaaagtgcatgattgtactctgtcagagcaacatgcttctgcaaaacttctttatcatgcggtattttactgaaaaggtagctaaatttttgtgtaatataattttgtttttttctgtaataaatacaatttactattcagattagttatcaaactttcattctgttacccagactccttatttctcttattttctccatgttacccttttacacttcctttgttttggagaatattgaaactcacttgggtagcctgtctatgtgacccacagtagaaagttgttgtctaaagtacttgtgatttttaaaagccaacaaaaaagaatatggaggcagagataacattagtgacattgacggctatcttctcaggaagcttcccatttgtttggctccgtctcagagaaagaacaaaatatatcctgtacagatgccattttcttctttcccattgacatttaactgatatgtgggtggctgctggctacatatttagtatgaatctctttagcaagaatcttgatgaagaatttttctcattaattcttaaaaaaattgagaaggggaaaagttaatatgaaaaatggttcaaatttatttagagagaaaccaatacagaaggaaactccccagcttcccgtgctggggctgtgttctgagcccagtactggtagaaaatgcctaaaagtactcttaagaaaaacatcagaatgataaatgtagaattccagaatgtttattacgtaccatatgggcaaagtctcaattaatacttgtttgcaaatgaaaaacaatagacataaatacttacatatttcatggtcttatgaacagctttcaaattacttttataactaatttaatgtgaatagctagtttgtataaattagggctctcacagttttacatttcttatcatatgaaatatacttaaaaattggaatgatttcatcataatatgttctcattgctttctatatgacccatcacataataattagctaagaaagacatatttagtagcacaaagaaaaaatcctcaatttgaaaattcttttcagatgtataaagccaaagaatgtctagtaacaggaataaaccgagtagcagccagctttcatacactcaataaaccaatgtaggttttactaagccttcttttaagtttgctcgggagagagacaaatccataaagtgatcaggctgcttattatcactctgccagaaatatackgtaaacaatgaaattgcttcagaattttggactcagaattttgtgattgacattaagggtcagtgcctgcattttagacccatcccagaagcaattcaataatcaacagaaatcagaactctattcactgaaccagtggcagaaaattaggtagagactcctggtttgctttgaatcaaaggtgtgtccaataaactaaagctaagggaaaagttataactgcaacctgaaactccatatccaaaaagyaggatgctgtagttttggaagaggtttgaagagttatgagcaatcaagaattgatggaaaaatggtggtgtgcttaaatggaaaactagtggtaatgggaaaatgtaatgggttttaattctgtttctggtccttttgaagtgtttttgcctcaactagattgagcttgtaaaagcaggtatgcatttgaaatcatccaaacgtattcaaattttactctggcactacccattgatatttaaatagcataagtctttgttcattcacagcaacaggtaggcagctttttccctctgtatctctgaaatttaaatttcatgctctctgtttacaactggcaagaatcaggttatccttgatttctgccaggatgccaagttaacttggctcatgttggattccagaagataaagagccttcttccctgaagcaatttctgattaagaagaaaatgagatctcaggtgtatttttagcatctggatttcttaaatattcatttattcagttttgactttggggaccctttgggttgttacatttgtgtgtgtgcagcgggtagcactacagcatgaatcactgtattaacttcaaagaattgtgttgcctttcctttctgtcagctcctttgtacagctcatataacttcataagggcatacgtctgtccgcatttgtactctccaaatattcatgaaagtcactgatggccaaggactgcagagaggagaaagaattcctgagagaggtgggtctgtgaaaatgtgacaggatagtattttctctgcttggcccagtataagatggaggtcccaggtttgctgtggtggtggtggtttgcaaagagtagccttgttgccagtctctctctggcctcctcagatcctagcagaccatgttcttgatgtcagcacataagaaatactctcttctgttgccacaatatttattcctgctttgcagcaaactgctcaccagcaattctaagaactaataaggtgtcttggagaaataagtaaatcttctctgatttttgacatttttccccattgcctattagccctccccagacttctcttttttttctgctcctgtagaatttaaacccacagcatgatggtctatctttatggtattataaactattttttatctataaatgcaagtctctatttttaaaaaccctacataatttcaaaagtctctctaggatattattgaacacaatggccttttaccagggtgatggtgtgttgggaaaaagaagataatcagatttggggggtattacagggcaccagctctgaattggcactacttttgggagagccaaaacataactgtcagagtatgggtgtatggaggtcaggtgatcaatggagtttcagcttagctccatctcatagtggatccaatggtccccatatccatgctgtggtcattttccctgtttctgcatgcatcattggaatagacatactcagcactgatagaatccccacattgggagttctgagaaatgtgtctaatataagaactgtgcttgatctgtatgttatttcctcattgatatatatttcagagagggaaataagtcattaattggcaccacaagaacacccatttagtagctgcattgtcttagccaaggccctcagtccacacagatgcgtctcctcacctaaaccatgaggaagttataataggagttgttcaagtttccttccagctctgcagtgctggtcctttcactcacttaaaatgctttccttttaccctattttttttcttttgagtagtcaaactggagatgtattaggttcatatgtgtttcttcatatgataaccaaaataaaccttggcactcctgcacatttttagtaacagatcgttcaataaaaactgatgttttcctatactcttttgcttccacatgcatcaaatttgcctttttctccttcactctttcagctccacytcttcattttggagttcttgctagttctgtatgacaaatgttcattagtaagttgaatggataattacatgggatggagggggagagaatgatctagatttcaaatgtggaactattacctaagtcttaactgaaactagcgtaattatgtactttctttccttcaactttttttgttgttgttctacatgtacaaggctgatttttcattaacttttaatgttgcttgtaaycctattccgatttgtattcaatgtaactctgaatagaggtctactcacaatagaatgcaatattataaagctttaatgtaagacaaaagctcttattgaagttgtaagaacagcatttttattaaggttgtttcatttagtggaaagaacagrcccacrcaaatccagaattatatctgggcagtagcaaaatttctgagcagttcagatagtaaatcaatttttaaactttctatgagaaatgtctgtaattcattcattttaaatacactggtgcgtttgttcttccgtaattataatacaaagattgctaaagcagttatgatcctgcctccatctcttatccatactcctgcttttactcctctgggttgttagagagagacagcctcagcctcagcctctcacgagcttcaaacacaacaccccagaataagccacattgaccaccaatttatcataaaaaagacaagtatatccaaatgtactgtacagaactctgggttttaagtggcagaaattcatctccaagtaagttaaactaataaatacattaatagatagatgcatagaaacctagatgtattcatttgatgagagacgttctcagtatcgcccctggaaagtccagagtgatttcagaatagctagatccagagggccaacaatgttttcaccagggctctctccatccatggcttcttctcttgactctactttcctccatatggtgtcatcctcaatcctcagcagattcctgcgtttgacatcaaagatacccactgggaagttcctgccttttatcatctttattgatagcagtttcaaaaaggactccctttcttccctgtttccccmattatttaccaaaattggattctgattcatcctactgaggtcttctgctaacctatgtaccagctgccatacccacagaaataaatattctgattggccaacctgagttatagaccttcttcacctgtggctaggaaagtatgatttgagaactgacagcctcctgccaatcaacagggagggggagtaggggcagtactccaaaataggcatgtggtacaccaaaacaggcatgtaggcaggttttatgacagtagctgatgccaggcatggtgactcatgcctggaatcccaacacttttgaaggatgaggcaagaggatcacttaagcccaggagtttgagagcaacctgggcaacatagtgagaccctgtctcaacaaaaaataaaataaattttaaaattagccaagtgtggtgcctgtagtcccagctgctggagagcctgaggcgggagaatcacttgagcccaggaaggtcaaggcttcagtgagccgtgattgtgccactgcacttcagcctgggtgacagagtgagacctcatctcaaataaataaatgaaaacaaaaacaacaaaaaaactgtagctgatatccatgaaaccacatttaactctgtggtggtagaattgctcatctcttaaaggagctcacaaaatgacctcagaaatcagaaccagagatgactccatgagaaccttcctgtttttgggaaaaccctgagttcctaaggcctttagaactggcatttccttcagtggctgagtttcccatccaaatatgttacatgaactctgaattgtctacatctttttatactgacaacaactctgtgagataggtaccattaagattcctattttataattgaggaaactgagtcacagagaaaataaataatttgcccaaaggcacataactaggagtgagacaagggttcctagctctccttcagatcataatcacacgagaagcattttttttttaacgtggattactgaggtctttccctgggacatttcagttcatgagttctggaattggttggggaatcctacagtttctaagatggccaaagttattctgatgagtaattaggctcaagaaccaccaaccttaagaacaagaaggaagcagaatggcagagggtccaagggttttagtcataaaataaacaatagtaaaaggcaaggggagaaaaataacatctgttattactggtggtaaccttatgaggaaactctgctactgggtcatcaggaaagagtattctgagaagaggataagtggtaacgtacttggatctctccttcacccactactttctttacctgtatcaaaaatttactcgtaatgtaggcaattgaaatatatccaactgtttccttgccagcaatattgaaaaatgcacggtttcatcattggttaactaatacttgtactagtgtaaaatgtaaaacttaaaataaaaccttgggatcattctaaatgctgtttctcttgatggggcctttccccctctacccatctccattaggttccctggatattctctctcacagcaccttgtacctttccttcataacatttatcatactttgcaatcattaatttacttgtgtgacttatagtcagtctagtattgatctcccacactaaactgtaactgagtgaccatattttactgttgtattctcagcatgctttactgtgcctgacccttacttaacattggttcattctctgttgagtgaatgaaaagactcttttaagaaaacatcaatacctagaataagtgcttaaggaaacatcactctaaatggaatttgaaccactcaaaagaaaaaggtgtgaaagaaagtctaggagaaacttagaaaaggcttagagagcaagtagaaaaaaaaaaaaaaacccaaaacaaaaaaactgataagtaggcaattatcacctgcaacctaagtatagacataaacaaacagaggcttaagctgtgaaaatagctagagactcactggagaggggcaagtaatcaggctagagaaataagagctaattacagtgaaacagagataatattcatgggagtattttgtggtttctttttcacaaaatgttacaactgaaaaagacttttaatattacctagctagtaatccacaaactgggrtcccaatatcccaggtactcagatctgagaactattaagctaagttcagaacttctaaaagcccaatgaatgttacacctttttctataatgtggctgagtgatgtagaaaacaaaagccctttgcatttgtttctaggcatatcgattctgtgaggttataagaacacattattaattaaaccgagaaggcaaatgtacttggtttggtgggttaatcatttaaaaatgctgggccaaaggggagatgaaatgtggttggataatttttttccagtggcaactctaatcaaccccttgcccagagcctatgatcttttcaaagacttgtgaaaatgtttgggtgctgaaaaacataggttttggttccaaaaaaagaaaagaaaaaggaaattgctaaatcaaaatgaatacgtgccaacataaatgcctacaaaatgtaactgttaatcaattttattaatggttaaatagaaataattaatgatttcattatttttgaaaaccatrtaattatttaggcagmgattttgatttgcatacggtgggtgatggaaaaggaaaagttagaggaatagtggccattctggcaagactgtgggactacttgggaagaactgacctcaccrgtggctaagtgaaggaagccacctgggcaatccaggagcatgatgatgtttcaaggcagcataggtgagcatggcctcaggggccataggggcaccatgggatgccttctccagagccaaatgcagaccttagggtcattggtattatttttcatttattaaaaatctctttctaaagcattttgttgagtaccttaaatctggcttttcagccaaacaacctggtttcagatctctcctcgattgatggatatctaaatccctgatgttgaactctctgttttctcatgtgtaaaatgaattactaatacttattttgaagatgcttataaacttactacataatgtaaggagaagaagtaattgataagctggacttcattaaaattaaaaactgttctgcataagacaatgtcatgagattgagaagaccagccacagactggaagaaaatatctctcaaggacatctaatataagactgttatccaaaatatacaaagaactcctgaagctcaacaataagaaaatgaacaactccatttaaaaataaatgggcaaaagacctgaatagacacctcaccaaagaagataagcagatggcaagtaagcatatgaaagatgctcaacattgtatgtcattagggaattgcaaattaaaacagtaaaataccactgcatacccactgaatggccaaaatcccaaacactgacaccacaaatgctggcaaagatgtagaacaattgtagctgtctcattcgttattggtgggaatacaaaatggtacagtcactcaggcagtttggcactttctttcaaaactaaacatactttttttatgtgatacagcaatcatgctccttggtatttacccaaatgaactgaaaacttgtatctatgcaaaacatacacacaaatatttatagcagctttattcataattatcaaaacttgcaagcaaataagatgtcctttagtaagtgaatggacaagttaactgtggtacttctacacaatgtaatattacttggcactaaaaagaaatgaggtgtcatgccatgaaaagacatgaagaaaacttaaaaatgcatattagtaaatgaaagaacccaatctgaaaaggctacatactgtatgattccaacaatatgacattctggaaaaggcaagaccatggagacagtaaaaacatcagtggttgccagggttaggggagagggaaggataagtcagcagagcatggaggatttttagggcactgaaactactatgtaagatactataatgatagatatatgttgttatacatttattaaccctatagaatgtgcaataccaaaagtgaatctcaatgtaaactatgagtccactttagtatgttcatgtgtaaccagtgttccactgtaatgagggatgttgaaaatgggggaggttgagcttgtgtggggcagggggtatatggaaattctctatcttcagctcagtttttctttgaacctaaaactactctaaaaaatttagtttattaatttaaaaaatgtaggagtcacttagcacaaggcctgacatagggtagatatatttttttctatcataaatatccaagtaatttaaatataacatacatcttcttatatattgcttcattattatttctatttttcagycattttagggaagaatcatcaaaatttcatatgaaacgtatagttaaaaagtaaagtccagtatgtagattggaaaggagaaactatctcttgaaaaatcctaaataatccaccaaaaaaaaaattagaattaacaaatgacttcaatgaggtggcaggatacaatcacttataaaaatgatttgcatttctatatactagtaatgaacaatttgaagtggaattaagaaaataatttcatttatagtagcattacaaagaataaaatacaaaattaaggatacatttaacaaaacaattgcaaaacttacactcaagctataaaacattatccaaataaattaaataaaacctcaataaatggaaagatatctaatgatcaaggattggaagactaaacattgttaaaatggcaataactctccaaatttatctataaattcaacatacttgctgttaaaatcccagctgccttttttgccaaaattgataagctgagtcaaaaattcatacagaaattcaagagactcagaataactaaaacaatcctgaaaaacatgaacaaagttggaagaatcacactttcaattttaaaacttaccataaagccatagtaattaagacagtgtggttcatcaatggattggaattgagagctcagaaatcaaccctcatatttatggtcaattgattttcaacagggttggcaagacagtttaatggagaaagaatagtatttttaacaaataatactggsgtaaatggatattcatatgcaaaacaataaatttgacccttacctcacatagataaaaacctcaaaattaatcaaagacctaaatgtaagagcctaaactataaaaytcttaggagaaaacataatcataaatcttcatgacaatgggttccttaactctgacaccaaaatcacaagcaacaaaagaaaaataaggtaaattagatttcaacattaaaaaactttgtgtttcaaaggtcactataaagaaagtgaaaagacaacccaaaggatgggaaaaatatttgcaaattatatacttgataagccacttgtaactagaatatacaaggaacacttacaactcaataatgagaaacaactcaattaaaaaacaggaaaaggatctgaatagacatttctccaaagaagacgtatgaatgtccaataagcacataaaaggtgttcagcattgttagtcrtcagggaaatgcaaatctaaaccatgatgaaatatcactttacactcctaggaatggctaaaataaaaaagacagggctggacatggtggctcacacctgtaatctcatcactttgggagtccaaggtgggaggattgcttgagcccaggagttcaagaccagcctaggtaacaaaatgagaccccatctctacaaaaaaatattaaaaagccaagtcggtggcatgcacatgtggtaccagctacacagcaggctgaggcaggaggattgcttgagctcaagaggttgaggctgcagtgagccatgtttgtgtcactgcactccagcctggacaacagagtgagatttaaaaaaacaaacaagataacaagtatgccaaaaatgtggagaaattggaattttatatattacttggagaattgtaagatggttcagccactttggaaaagtctgatggttcttccaaaggttaaacatagagttattatatgaaccagctattccattcttaggtctattcccaagagagttgaaaatatatgcccacagaaaaatttgtacatgaatgtttatgtgtttatatcatatattatttataatatccataaagttcaaacaattcaaatattctcagttgataaatatatctgtattagtctgttctcacactgctatgaagaaacacccaagactgggtaatttataaaggaaagaggtttaattgactcacagttccacattactagggaggcctcaagaaacttacaatcatggtgggaggtaaaggagaagcaagcacattcttcacagcacagcaggacagagtgagtgcaagcagggggaatgccaggcacttacaaaacttctgatctcgtaagactcactatcatgagaacagcatggggaaatatgcccccatgattcaattacctccatctggttccatccttgacacgtggggattatggggattacagttcaagatgagattttgggtggggacacagccaaatcacatcagtacccacgtatccaaatgtggtattctgcataaaatgtggaatgtggtattctatacagtgggaatgatattcagccataaaaaagtactgatagatgctacaacattgatgaaccttaagaacatcatgcttagtgaaagaagccagacataaaaggtcacatgtataatttcatatatattaatgcccagaataggcaaacccatagagacagaaagtagattagtggttgccacaggctgagggttgactgctaatatctatagagttccttttggggacaattgataagtgttttgaaataaaatagtggtgatggttgtacaactctgtgcataattccccaaaccactgaatttgtatacttttagtggatgaattgtatggtgtgcaaattatacctcagtatagctgttagttttgaaaaagtagactctgaaaaaacttgattaaatataaggaaaaacatcttagctgggtgtaattaaacactaaaatgtattgaggaagttcatagaatcctcagaggaatttaaaaataggacagacaaccatctcgtctatataaagtacagttctgttttgggatagaagactatatacttagatgttacttcaactctttttcacttataaagattccgtcgttataattgggtcataatcctcaaacataaaacatcacctagtgcataacatataacattataacacaaaaattcactcattttcaaacttcagtccactaagcaagtttgcattatgtcagtttgtctctttatatcctctgctgtatttacatcagctttatctaggtccaagagcagtattacttagattaacaacattaacaaataaagtaagtgtttgcattatgttcacccctaacatttaaattttcatgcagagctgtgtataatctaattaagacttgtttttctatttgcaaaatgctaaaatttttacaaattcaccatttgatatagctcattagctatattaaactaaatttgaatttaagtacctcaagttggtttatgtgaccagcaacggttatgtcttagtccatttggacttctacaacaaaataccgtaaactggggagcttgtaaacaacagaaatttatgtctcatcattctagaaactgggaagtctaagatcaaggtgccaatagattcagtgtctgggtgaggagctgttttctagctcagagatggcaccttcttgctgtgtctttacatggtttaaggagcaagtgagctctctggggtctgtttaaaagggcactaatcccattcccaagggcaccaccctcctgacctaattacctcccaaggccttggggttaggatttcaacatatgactattagggggacacaaacattcagaccatgtcaggttgctaaataggttttaacaattattaaatgaggcatattaatagttttttatttttccttttaaagtagaaaaacacatactgagaaataaaaacaaatataacatttgagttaagtgggataccagctgagtaaagaaaatgactagaagatatttgactaaaatgaattatttaaactacttttgttactgaaaagaccaagtmtgggaagatgataggttatgtgatagtactgattggtgtcatcaattgattttttttttttttttctgagatggagtctagctctgtcacccaggctggagtgcagtggcgtgatctccgcttactgcaagttccgcctcccgggttcatgccattctcctgcctcagcctcccgagtagctgggactacaggtgcccaccaccacgcccggctaattttttgtatttttagtagaggcggggtttcactacattagccaggatagtctcgatctcttgacctcatgatccacccgcctcggcctctcaaagtgctgggattacaggcgtgagccatcgggcccggctaattgatttttaaaaagatataggcagcaaattgccagaaagaagataagtcatattcttagggatgtatggactacttatgggaaatgcgttgccattttgaaaattaatcatttatatgtgatgtactctaagcatttttatttttattttttttgcttcttgactgcatgactaacaaaatataggtggttttatttcaagacttagagttttgtgtcaggaagtttattaaagttttccaagaaaacagaatcaatagattatatatatataatatatatgtatcctacacacacacacacacacacacacacacacacacacacacacgttgaatatccctaatctaaaatcctgaaatccaaaattattcaaagtcaaaaacttcttaaatactgacatgacaccacaagtggaaaattccacacataagtacttaacataaattttgccttatgcacaaagttatttaaaatattgtataaaattaccctcaaggtgtgtttataaggtgtatataaaacataaataaagtctgtgtttagactgcggtcccatccctaagatatttaattatgtatatgcagatattccacaatccaaaaaaatttaaaatctgaaacacttctgttatacacacacacatacacatcctgggtttccagcttgcagatggtagatcatggggcttctcagccttcataataacatgagccaataccatatatatatacatgtaggtatatataagtataaatataaatatagttatatgttttattaatataatatatacattattaatatatttatacgcatatgtaaatatataaaaatatatatctatatgtatatttttagaaagaaatttattttaaggtatcagctcacaacagttatggagtgagaagacccatgatctgccatctgtaagctggagacccaggaaagctgatggtataatttgaaggtctgagagctggaaagccaatggtgtagattccagtccaagtctgaagacctcagagccacgagtcaagggcagaagagcaatgcctaagagcaaagtcaacctttctcacctttttgtgctattcaggccctcactgaattaggtgatgcccactcaccttggggagggtgatgtgtcgtctgccaatacaagtgctaatctgttgcagaaccattctgacagatgctttcagaaataatgtttaaccagctatgtgggcatcccatggcctggtcaagttgacacataaacttaatcatcacagacagcaattcagtttacttcagtgggtgatcttgaactgttttaagtttgtgtggcactcttgaattcttatgtgtgtaaggggctttgtgtcattttcttgctactcaaaatactttcctggaagcaaggaagtgctcccccatgcctgtccctcctgagcagtgtagttctgccctgactggcctagactctaaagcttcaagactcaactctcatttctaccacagaaggataaaatataattcaattttcttataatttctaaatctttcacatttttgcatttccaaaaccctgtaaggtcaatgtatgcactaattatctgaaaagtggtgattaaattgctggtgtttcttataatttatggtgtcttagaaagcaggacatagggtggtttctgatgataatggaagatccagcagataatagtcccatgtgctgtttctcctgggttcattcacatcaaagaagttacctacaaataaggtttgttctctcatggtcatcagccccgcagcatcagggagccctgttctttgtagacctctctatgacttcagcaactcatttcttctcacaagagatggtggagaagccacactgatagactttaaagccattctatccaggacgatcagtggaagtcaaaactgaacttgaatcaaaatcactggagggttaaagcacagattgctggttcctatctccagagtttctgaaaatgtaggtttggggctcagcctgagaagttgcatttctagcaagttcccaggtgatactgatgcttctggtccaaaaccacactttcagaaccactagccttaggtcacaatgccctagctcaacaatgtcctaggtcagcaatgctctagctgtccacagatgaagaaattggcatgtgatctgaatttggcctctgaagcatgaggggatgtctgctgggagacatgtcatacctcatttgagaatgaacagtgttccctcccagttccccactcttttccctctaggtagtgtgtttctatatgtgcaacctagaaacaactgaggccttgctggaccatcctataatctttgtaaagtaagccctaccattactccagcctgagattgccagagcagggaactggaagtaatttggttacatgatgacaggtggcccagagagtaactagcctggggcctgcactttcagagaaagtaaatatcttcattgttttagccagtttgagttagatacttctggtttttataaagtaccctgattaatacagaaatgtcagggaatccgaaaactataaaaggaacagaaagaggtaaatagaaaaaaaaaatcatcacatgcaaacgaggaaatactagacagtgtcaaacaggaggaaatatttagacccctaagtggtaagaaaacaaccaggctaaagaagtagcaaattggcaaaacaaaccttttttcaagtggcaggaataatccaaaaaaaaaaaaagactgggctaaaaacactctggtgaggaactctacattgaatctttacacttttatagtargatttattttaatgtgttgaaaccctgagacaaaagctctgtctttctccatctgccttcccagaccaccctggtaataaatgactcaactctgcttatacctaaataaaggaaattggactttcccatttctgtgctcatccgagagcttcccctcctgctaatggataagacatagaggcctaacttctctccacggtgccaaggactcagggtctgactgccttgaaccatccctgattatgaagagaaacatcagactgtcaaactcacctaggtaactggggcacagccttgaggttaaaaaaaaaaagttgtcggaaccaattttataattcascaggagcccctgtcagacaaatgaagcagcagtgatgaacggattcagatagatcgtgatgggagtcaagcagctggcgtcagcaccaattagatctggcactagagcagtcagtgcgcgcatggccctgctctcccttgaaataaacaagctgtcgcagctacattgggactgaacaatgacataaacacagatctcagttggatcagtcaaacgctttgcgtagtcttcaactgtggctgcatgccctttcctctctacgctcaagacagcagctatatcacttagtattttgccgcataaatccaaagcgaaaatgagcgacttctcagcacaatttaaaataacccaagctttttcataccatagaaaaataccacttttcagggtaaaatagagacaataaatcccaagaaccaacagcttgtgtcctatgggtttgcagggagaaaaaaaaaaggtgctggtgtcttaattaagaacttaacttatgcgccagctcccaggtggctggaggccatcccaggtgtgggcatgaattcttgatattgcagtatcatctgctttcctgtgctttgcttattttctacataagtcttgctgtgtagtgggatttgttagaaacacaacaggcatctaattttggttacaactcaagacttctgacctcctcagcatacaattatcccttactgccttgagagttgtcacgtgatattttggtgtgtccatcaatgtgtgacagtgcagttctgcgtagtaaggactgtagtatagagaagtagaataacagttattataaactttgaagcaaattttaaaagatattttagtttaaaatttctaggaaaaataaagtttcagttcactccaccctctgtcctgttaaggaccagaattaaaaaacaaaaaacaaagaataatttttgtgtcccaatatgaaagactaagtgtatctttatattatgttatgtttgcagtttaattaatcataatgacttctgattggtaggataagaagtgatcatttttcttacatctccatgattccttccttccctttcaacttgtccacaaatattgagatgtttctttgtaaaaagtgaaataggatggtcttgaagagaaaagaattctttgggacagaaaatttcatatttctaattggatgcatttttttcttttcattcttcctgcccctaatctatctttcagtatgtgtaaatgtgcaatctaaatcccgtcttttaaagaaattacctgtttttatcaggtaaagctctatcaaagtgaaaaataatttaatatgttagtgacataccatttaaatacttgcccacactagaaaaatctcatttgcttattgctatacaataatgtacgtgttgacatcattttatataaaaagtcctaaagaatactggcttgactgatgattttttaaaaagtcaaaccagggaattttgagacacaacacaacacctcagcagagacatgtatttggaaatagatccagccacagctgtgaggggagagctacacaggcaggtgaaccatgattacaagagtcatgcaggcctaataaggaataattagtgggtgtcccagcaaacaagtagaataggtcaacagagaactctgggaacaggcaatagttaggtgtctaggtgggtagattgttgacattaggaagtttcaaagagaactgcttaggataaatggaagactcatttctgagaaactggacaagtagactgggaaccaagagaaacaagccctgagtaataacgtggacgtgagattgagtgtaactagaacacaaagcagaaatgcacatgatggggaatctgcaagatccgcttcattgttgtccacagttgcccttcaccaagactcttatcctccaaacacaacacatttagaaggaaacacattccattagattaaagttctggagataggtatttatcaagtcctcataagttttccctgaaatgactcagaaaagttgtggctatctctgtggaatgtcctgtaggatgatgtggtagccatctttcctcttcatcagtgccatgagaagtgtcggctaaagaccatgtgcactccagagctgttaacagatgcttggataggaagcacactaggaagacaaaagttttcagggcttttattctagctgcagtgtattacctaagcctgcatgtcagcaatagtatttcagcatctgtataattccagagagcatttaactgacagaattgacccataaacaatgagagcttagaaaattctcaatacaagtctttgctgtttttatgtaaaaagcagggaacaagatgatacccaagcagtcactctatacaatgaactgaacaggcgaccaaagccagggaaccctcatcagctctgttctttcctagtccacttttgatactgctgagaaagttattttcctaaaataagtccccatgataccactggcggaaacttcagtaactcttcattgcttataaaatagtcatagaattctaagtctataggtgagtatttaataacaatttgacgtatagtcactatttacctttcaagaccacttcactattcttccacataatcatatactccattcccccagggccctcaccttctctggccatttttcacacttcaccttttttcttcccaatggcctttcccatctgtggaaacccactccatcctttgatgccacatttaagctatgtcggtcacagattgtccagcattgtcttccagtgcccacccacccacatgtacacatatataacctagtgagatatttaagtggaaccaaagtgctaggattattttcctttttattgatgaaaaagatctaggtaaataaaaaggttattttatggaaatagggtagtaagyaggtagaytaacttgccaactgcgatagactggtaaattgttcattgtgaaatttatcaaaattaagaaagaaaattatatgatttctgctttttgacaggcattgcaaagtaaaaggatgtgttatacaaacaagcaatgctttaatttaggctttactcctaaattttttaccattagccagaaaacaaactataaatactaaataaattcttatttcaacatagttgggaataaattatcatgcattcaaaataatctagaagggggaaagctttagtacacaagttataaatgtgttttccaaaggtcatgtgcaaagtctgagagaataagaagctgttgctaagacaacaattacaacaaaataggaacaaattggttgggctagtaggcgaatttatccaactccaataatggcrttaacaaaattagagagctacttttcaaatggagctaatcattaagacgggaaactaagaagaatgatccttagtcaataatgttgttcaaagttgaggctcaactaattttactcttagaattagtcccacacagcatgggactgtctttatttcctcagaggcaaataaaagcagttgaaaaaatctataattcaattaatggtctggatgatgatggcaaccattactaagaataatgtctgactgagtttcctggctgtttatatattgataaatccttaaggttataaattgctaaatctttaagaaatttaagtttctaactatataagttacattcttcctctacacatttaaattttttagtttcgtgagtaaaatagcctgcctttccagaagtagaaagtttacacagtgagtcggaatcctaaaaatttgcgaaatgtatttgataacttgtattaattgatacatgtttttccaacttcctacatttgaaggatacttcatccttattaccttaaaatctcattctaactttatcgtccatttagactatcaccttaaattttaaaaaaacagattattgcctgtgtgaggggttgagtgccaaagcacatttctggtccaaataaacttttaaaagttttcataactgcatgtgtaatcacaatcacacatgcatcagattttgcataacataatagtaaaagcaatagccaaagaaattaaaagagaacttccatattcaattgggtcccttgcaggacttgaaagaggtgtaattcattgcacatagggayatttctcaaaagtttctttccttttcttcttaacttctcttctcttctcctctactttggggctgcttcagaatttctcatacaccaaacctacaaaactttctctcagtaaacatgcataacttttctgcagatcatcctcctttctctctgttctttattatgagactctccaggttctaaatcacartgagtcctcagattggtctgacaaagacagaagtcttcttagggagaagtcaaggagaagaaattgatcaaagagagattttctttattgctttcttttctttaaggcaagtagagtggctttaagacaggaagaggaaaaagatttgaacaaattcaaaattagtaaattctgtctttattatgcaaactttgatgagtaaagaaaagtgaaaggccatgtatctttttttatagtaataaattattttttaaaaaatttatctattttactaatgcctcacatgctgtcttcttttcaaatgtcactaacaaagaaagaaaaagaagaaaggacaaaggaaggggaaaagagaagaggagaaaacctgaaaaaatagatgctaataaaacttcatttccataaattactggaaggcgaacagttcctatgcttaaagtgactagtatttgcatcttttattcatttaacaactatgtctttmgtgccgtctatgagccaggcactaaagaggcatcctgcttcctcagatccaaatgctaaacaaatttcattttttttcaagtattcaaaacgaaagcatgaaaaagaagaaaagatgccatattctaaataatctgtgggctataattgtttgtcctaatatgattacactgcaccctggcttcatcttagtctatgaaatttgatttgaaagtttatggaaagtgcatatctcaacagcaccatcaatcatttttcgaagttgaaataaacagtcaaaatcaacagcttagccaaaggtgctgcttatggtgtagagatgcaccatcagaattactaaccagaatagttttgggactatcttattggcatgttgcaagaatcactcttatatgctgacttgtctcccagcagcatctcttgcctgagcaaaatctgactttcataatagtctaaggaaagggtcttcattaagggtgatttatcaccagtcacagaaaacaaaagtaacaacttctgaaaaaaatttctacccatgcaaagcaggcaaagaacctttaccaatgaagttagcacagcacagaaaattttgcatctgccaatcagtcagacacacaactccttgttcagacactgtgaaaaatcacaacaatgccctgactatgtatttgaatatattcagtccatctgttgcaatttataagataagcttggaaggatgtagaatttacttaaatgacatatgaagacttttccttgggcacccagtgcagtgcctagttcttagtaggtgctcgatgtgtggtggttttggtggcaggaatagtggtaagatagcaggtaatggcttttttaaaagtatgatmgaagattttaaatatcatattatatatttaatgcacatttaacatagtatgcatttagagtttattaaaataagttgaattctcacccccttgcatcaggtagtattgattagtaaattacctgtaaatcctagaaatctcataatattcagggacttcagggtaatgaacctcttgcttctctgtactctttactrtagtatttataaacagctatgtgagagcaagaaaagcattaattccaattgtgtggttggttattacaattaattacttgccttggactctgctaatgaccagcagttgatgatttaaagagatctatgccacaaaaggccacttggcttaactcgccaaaggcatctatatactcccatggaaggaatccagtctctttcaataatccttattgattgtaaatgatatcagaggataacctggttttggtaaactccccttaaaagcccctcatttgatcgcatactcttgcggtcaccatcttagcaccatgctggttatttgcaacctggattgccagataccattgttttttcttagagtagattttcattcaccttgattgagtcttaggagtttgtggagggggaccttgactgagccattaaccttgtgcttccacaccttgaggccagggatgaggctaaaccagaggcactgcctgtccactgaggcagaagttagcagagactgaccaggtacagtacttcctcattaacaaggggagtcaggactgggggcagcagcaaggaaagtacacagcatggaatcatcctgagacaatgtaggtgttgattctgattctactatcttgttatgtcatcttgaatcaaccacctacccgttctatgcctcagtttactcattttaacaataaaaggaaaaggttagagaaggtgtctctaaggtctgttgaagccaaggaattccaaaattctatttgtcatttaagtggccatttttccctkcttttttccactgtctacaaacacacttagttgaagacttgggcaacaacaagaatacatttggctactatcacattttcaagactaatgagtctctttgtcaatgacaaacaaatggcccattatgcaagctgataattgcaatatattaccttcttacattaagttagtcacaaacagtactttaaaattcaatacagaaaaaaaaaagtgttgaatcccagctttggctaaagtagacacaatccctgccctcaatgtagctttgagtcctgttggagagacagatattagacagataatcacaggaatgaatactgtagttgagaacctgcctgtgagggagaagttcagggtgatacccaagtatgtcccaaaggaacccaatctcatccaaagattaatgtgtgaataaacttatctgtgcaaagcttaatatcaaattttgaggtgataatatcgttrtctaagaagttgttacacattgttaactgaataagattctatatttccccaatgaagaatgctacatgtgcatagaaaaatttatcatttaggatggggtaaatatggcagtataattttagaccctttttatagtcgaggatggtccatcttcaatagtttgcgccactagaccaaagtagaatgaatccccaaatagggaaaatcacagcccttgtttctcaagccttaatcatcacaacaccttcataaattttgccatggccatcaatctgttctataaattactaatacttttcctcaaattgacttaaaaatgcttacttacakttaccctaaacaaggatatccataaattagtacaaaagttttaacatactaattatattgttttattaacttttaaaatgaatgcatatctcttcaaataaaacttgatcatcagtatagttaacatcattttgggtaccaaactttggaaaacactgacctcaactcatggccccatgtgtacacccaaacacaaaacataaccctgggaaaattcttcagttagtgggaatgatgcagaagcccagttgcaactcactatctgtgcctttcagcaaagtttttataaattttcctcatgaagccacctgtgatttcctgtggtttttaatttacttaataggtgattatgaaggaacaattgtgtagtcttatttctgaatgcaatgacacctgatcacttaacatacagaaatttggagcgattttgatttgacatgatgactaagagcattttgtgccgccagtctaagaatattcacacctaatatagttttgcaataacgtgttaggatatacagtttctcagaaaggtaagttaaagtatttgcagtgatagtgagaacccttggtaattctgagagcagagatgtcatttatagtagttaatagccgtgagattttttttaatttttttattttttatttttatttttattttttttgagacagagtctcgctctttcacccaggccggactgcagtggcgcaatctcggctcgctgcaagctccgcctcccgggttcactccattctccggcctcagcccccgcccaccctcacccccgccagtagctgggactacaggcgcccgccaccgcacccggctaattttttttgtatttttagtagagagggggtttcaccgtgttagccagtatggtcttgatctcctgacctcgtgatccacccgcctcggcctcccaaagtgctgggattacaggcgtgagtcaccgagcccggcctgagatgttaactactatgtaaaaagaaagtgtttaaagtcaaaaaaattatatatattttttacctctgtgcatatgttagcttcactctatggtattcaaaaataataatgcatgttaaataaaataattacttgacaacaaagaaaatcaattatattttggctgttcttggatttagattcctgtgttaataaattgacagattagggtgtgcagaacaagagtttatctgtggctggagactcaaagcttcctatagttctcttgacaagcatacaaactattccttaaaaaggagcattaaagcaagcagtgtacttcacagacagcaagatgtaactgacttggctgataacatttggctgcaacaatctcctctgtcccaaccaataggaaatgccaaaatcaattaggatgaactgtggactataccatcatgtctgaattacatgctgtaagttcttcctgttcattttttatctgaaattatttaaaaatctaaaattgtgacaaacatatttgaggccactacattgattttcttatcatattatgatttatttgttgcccatataatatacacactaggaattctagtcatgactgagctctgttcaactttatttttacatttttgtacattaacttattttttatttacacatgcatcatattttaccgcaaacaaagcaaagtcaaattgaataccattttacacataaaaccacaggggaatttttgcactgtcctctagcagtcagtcaagaatcagtgcccccctttccctaactattccatacccactcttattcttccttccataggtgtgtgtttttaacttgcttgactcccttctttactgctagcacttatttatcttttatttttcaatttttgttttagattcaggcagtacatgtgcaggttcttttcctgagtatattgcatgatgctgtggtttgaggtataaatgatcccatcacccaggtactgagcatagtacccaacagttggtttttcaaccattggctccatcctccctcctcactctagaagtccccagtcacaattgttgtcctatttatgtccataagtagtcattgtttagctcctgcttataagtaaggacatatagtattgagttttatgttcctacattaattcgcttagaataattgtttccagctgcactcgtgttactgtaaagaacatgatttcattctgttttatgcctttgtagtactccatatgtgtatatatatgtgtgtgtgtatatatatatatcattatatatatatcattttatttatccaaaataccattgatggacacctaggttgattccatgtctttgctattgtgaatagtgcaatgagcatacacatgcatgtatctttttagtaggatttgttttcttttgggtatatagccagtaatggaattgctgggtgaaatgttagttctgttttaagtcctttgagaaattaaaggaattagctttccacagtggctaaactaatttaccttcccaccgacagtgtataagcattcccttttctctgcagccttgccaatatctgttgttgttgttgttgtttttaatttgtaaaccaatasctattctgactggtgtgagataatatctcataatggttttgatttgcatttctcttgtgattgatgatgtggaacattttytcacatgtttcttggccacttgtatgtactcttttgagaagtgtctgttcatgtcttttgaccatttctcagtgggattatttgttttttgtttgttttgttctgtttttttgcttgttcaagtgttttaagttccttatcaattctgtatattagacctttgttggatgcatagtttgcaaacacttgtctcctgttctgtagattgtctatttactctgttgatagttcttttactgtgcagaagctctttagtttaattaggtcccacttgtcaatttttgttgttgttgcaactacttttgaggacttacttttaagttatttcccatggctgatgtccagaatgatgtttcctcagttttcttctaggattcttgtagttcgaggtcttacatttaaattttaatccatcttgagttaatttttgtatatggtgacaggtaggaatccagtttcattcttctatatatggctcaccagccatcccaacaccatttattgaatagagagttctttctattgcttatttttgtcgactttgtcaaagatcagatggctgtaggcatgcaacyttatttcttgattctctattctgttttatgtgtctgtttttgtaccagtaccatcttgtttgggttactataaccttatagtatagttcaaagttgagtaatgtgatgcctccagctttttcctttttgcttaggattgctttcactattcaggctcctttttcattgaagtgagttttaggataggtttgttttttttttttccagttctgtgaaaaatgycattggtagtttgataggaatagtgttgaatctgcagtttgctttgggaagtacagccactttgtactcccacttatgggtgagaacaggcagtgtttggttttctgttcctgtgttagtttgctgagaatgatggcttctagcttcatccatgttcctgcaaaggaaatgaactcattcttttttatggctgcatagtattccatggtgtatatgtgccacattttctttatccagcctatcattgatgggcatttgggttagttacaagtctttgctattgtaaatagtgccggagtaaacatacatgtgcatgtgtctttataatagaatgagttataatcctttggttatataaccagtaatgggattgctgggtcaaatggaatttctggttctagatccttgaggaatcaccacgccatcttccactatgattgaattaatttacaccaacagtgtaaaagcattcctatttctcttcagcctcaccagcatctgttgtttcctgactttctaatcattgtcattctaagtgacgtgagatggtatctcattgtggttttgatttgcatttctctaatgaccagtcatgttgagcttttttttttaatgttttttcgccacataaatgtcttcttttgagaagtgtctgttcatatccttcacccactttttgatgggtttgctttttccttgtaaatttgtttaagttccatgtagattctggatattagatgtttgtcagatgggtagattgcaaaaattttctcccattctgtaggttgcctgaatgctacctgacttcaaactatactacaaggctacagtaaccaaaacagcatgatactggtaccaaaagagatatatagaccagtggaacagaacaaatacctcagaaataataccacacatctacagtcatctgatttttgacaaacctgacaaaaacaagaaatggggaaaggattccctatttaataaatggtgctgggaaaactggctagccatatgcagaaaacagaaactggaccccttccttacatcttatacaaaaattaactcaagatggattaaagacttaaatgtaaaaccccaaaccataaaaaccctagaagaaaacctaagcaataccattcaggacataggcatgggcaaagacttcatgactaaaacaccaaaagccattgcaacaaaagccaaaactgacaaatgtgatctaatcaaactaaagaacttttatattgattttataccctgaaaccatagtaaagtcatttatcagttccaggagccttttggtggagtctttagtgttttttaagtatagaatcatgttgtctacaaagagagatagttggatttcttcttttcctatttggatgttttttattcctttcttttgcctgattcctctgcctagtgcttccagtactatgttgaataggcatagtgagaatgggcatctttgtcttattccagttctccacggaaatggttccaattcttgcacattcagtatgatgctggctgtgtttgtcatagatggctcttatttttttgatatatgctccttcaatgtctagtttctcaagaattttgaaaactatttctgcatctattgagatgatcatatggtttttgttttaaattctgtttatgtggtaaatcacatttatttgatgtatattgaaccaaccttgtatcccgggaatgaagcctatttgatcatggtaaattaactttttgatgtgctgttgaattcagtttgctagtatttagttgaggatttttgcatctgtgttcttcagggatgttggcctgtagttttcttttttcattgtktctttgccaggtttcagtatcagagggatgctggcttcatagagtgagttggagaagagtttctccttgatttttttggaataggttcagtagaattggtaccagctctttgtacatctggtagaatttggctgagaatccatctggcttgaggcttttttttcgttggtagaatctttattactgattcaactttggaagtctgttgatttattcagtgtttcagtttctttctgattcaattttgggagattgtatgtgaccaggaatttatccacttcctctaggctttctagtttgtgtgcataaaggtgttaataatactctctacggatcttttgtatttctgtgggattggttgtaatgacacccttgttatttctgattatgcttatttggaccttctctctgtttttctttgttaatctagctagcaatctaccaatcttgcttatcctttcagagaaccaacttttggtttcattgattctttgtgtggatttttgggtctcaatttcattaggtccactccaattttagtatttctttttttctgctatctttgggattagtgtgttcctgttgttttctagttccttgaaatttgatactagatcattaatttcaggtctttttttgtgaggtaggcatttagcactataaactttcctcttaacactgcttttgctgcatcccagagactttgatatgttgtgtctctgtttccatttatttcaaggaattttaaaatttctgccttgatttcattgtttactcaaaagtcattcaagagcaagttgtttaatttccatgtgatattgtggttttgaaagatcttcttggtattgatgtatattttcactccactgttgtccaagagtatgactggtatgatttctattttttggaatttattgactcattttacagctgagcatgtggtcaatcttggagtatgttccatgtgcagattttaaaaaatgtccattttgtggttgttgggggcaatattctgtatatgtctattaggtccaattggtcacatgytcagtttaagtccagaatttcttygttggtkttctgcctcaatagcctgtctaatgctgttagtggggtattgaagtcccccactatcattgtgtggctgtcaagtctttttggagaactagaagttcttgttctatgtatctgggtgctccaattttaggtrtgtatatttttagaataattaagtcttcttgaattgaaccatttaacattatgtagtgcccttctttgtcctcttttactgtttttggtttaaaatctgttttatctaatataagaatagcaatctctgctctttttgttttccgtttccatggtagatctttctacaaccctttgctttgagcctattggcgtcattatgtttgagatggctctcttgaagacaaaggatggatgggtcttgttttttcatcgaacttttcactctgtgccttttaagtggagcatttagatcatttacattcaaagttaatattgacatatgaggttttgatcctaacatgaaattgttagctggttgctttctagtttctattgtgtggttgccttataggttctgcaggctatatacttaagtgtgtctttacggtagcatcaacctaattttcattaaaagattattctattcatcttcatgctagattagagaatgatgaggaaatttacaatatacattgcttttccttcaaagtggctcttgtttcctgactgcaaatatgtggtgcacagttcacaaacccctcatcttgctaattactcattgtttactcaatgcttgaaactaacttgcacattttatacgtcctggaaaattgtgagttaaactttttatgtaatacactacctcattttgaaggggatcttccccaaaagaatattttttaatgtcaactaacctgtctcttaacatatagtggatagagtgtggatagtagaaatagaaaatgtgggttttagttgtgctataaaaattgttcaaatcacttaaccataattagagtgcaattaccttgtctgtaaaaagaagacagaatcttaggctttgaaataaaaaagacagaggtgttgattctgccttagacactagctagctrtgtgatctttgatgagtcacctgaactcgcagagccacattgtgctgaattatacatttggggttgtagtttgaactttgttaggttgccatgagggttaattggagtaaaaatgtscaagctttgtatctattattatatgaacataacactttataaattccttctgaccattgctttttctccaagttgttcctgawatctctstttgatatatttaaaatgaaacatcatttataattttcattgctaacgtttcatgtaactgcacattattatcaacataaaatagttatacataagaaattgctaaatctctttaacaatttggtaatgaaaacttgagaactcagtcataaacattttggtcactttgatgttatcacctgacagaaaggctttttacattttctgatgttaatatttattctgaattttgaataaaagagaggttgctattttgtatatataaaacaccaacaataaacaaatgagagttaagattttctttgaataagattttgttttctttatcaagtgttcaataattttgtcccattccacatccctactgtgaatatgataaggtgttacagtttgatcaagatgtctcagtgttttatgattatgattcccccagttcattctgttgtctatagcaaataagagttttccactatgtatacatagttcccttataaaagacacaaataaaagtaggaaaaaattagtttccatcacatactttaattctctcattgtgaaaataacccytttgcagatatttaacgtaaaatttgcgtgctccactatatggttttttactttgattctgacttaacatgaagataaaaactaagaacatacacctttttatgtttgagtagcattattcaatcatctctcagcctctttgtttaaaaaaagaaaaaaaaaaaggaagggaaggtggctgaagaggaacagctatggtctgcagttcccagtgtgattgacacagaagatgggtgatttctgcatttccaactgaggtacctggttcatttcactgggactggtttgacagtgggtgcagcccatggagggcgagctgaagcagggcaaggcgtcgcatcacctgggaagcacaaggggttgggagatttccctttcctagccaagggaagccgtgacagactacctggaaaatcgggagactcttgcccaaatactgtgcttttcccaaggtcttagcaacctgcagacaacgtgattctctcccatgcctggctcagtggctcccacacccacagagccttgctcactgctagcgcagcagtctgagatcgatctgcgagacggcagcctggctggggaaggggcatctgccattgctgaggcttgagtaggtaaacaaagcgtccaggaagctcgaactgggtggagcccaccacagctcaacaaggcctactgcctctagacttcacctctgttggcagggcatagctgaacaaaagacagcaaacaacttctgcagacttaaatgtccctgtctgacagctctgaagagggcagtggttctcccagcacagtgtttgagctctgagaatggagagactgcctcctcaagtgggtccctsatccctgtgtagcctaactgggagacacctcccagtaggtcccagtaggggctgatggacacctcatataggtggctgcccctctgggatgaagcttccagaggaaggatcaggcagctgttctgcaatatttgctgttctgcagcctgcactggtgatacccagacaaacagggtctggaataraactccagcaaactccaacagacctgcagctgagggacctgactgcaccaagcggacctaatagacatctatagaactctccaccccaaatcaacagaatatacattcttctcggcaccacaccgcacttattccaaaattgaccacttaattggaagtaaagcacttctcagcaaatgtaaaaaaatagaaattataacaaactgtctctcagaccacagtgcaatcaaactagaacgcaggatccaggactcactcaaaactgctcaactacatggaaactgaacaacctgctcctgaatgactactgggtacataatgaaatgaagacagaaataaagatgttctttgaaacaaatgagaacaaagacacaacataccagaatctctgggacacatttaaagcagtgtgtagagggaaatttatagcactaaatgcccacaagagaaagcaggaaagatctaaaatcaacaccctaacaccacaattaaaagaactagagaagcaagcgcaaacacattcaaaagctagcagaaggcaataaataattaagatcagagcagaactgaaagagatagagacacaaacaactcttcaaaaaaaaacaatgaatccaggagctggttttttgaaaagatcaacaaaattggtagaccactagcaagactgataaagaaaaaaacagagaagaatcaaatagatgcaacaaaaaatcataaaggggatatcaccaccaatcccacagaaatacaaactaccatcagataatactataaacacctctatgcaaataaactagaaaatctaggagaaatggataaattcctggacacatacaccctcccaagactaaaccaggaagaagttgaatctctgaatagacaaataacaggctctgaaattgaggcaataattagtagcctaccaaccaaaaaaagtccaggacgacagattcatagctgaattctaccagaggtacaaagggagctggtaccattccctctgaaactattccaatcaatagaaaaagagggaatcctccctgactcattttatgaagccaacatcatcctgataccaaagcctggcagagacacaacaaaaaaagagaatttcagaccaatatccctgaagaacatcaatgcgaaaatcctcaataaaatactggcaaaccaaatccagcagcacatcaaaaagcttatccactatgatcaagttggcttcatccctggaatgcaaagctggttcaacatatgcaaatcaataaacataatccatcatataaacaggaacaatgacaaaagccacatgattatctcaatagatgcagaaaaggcctttgacaaaattcaacagcccttcatgctaaaaactctcaataaactaagtattgatggaacatatctcaaaataataagagctatctatgacaaacccacagccaatatcatactgaatgggcaaaaactggaagcattccctttgaaaaccagcacaaggcaaagatgccctctctcaccactcctattcaacatagtgttggaaattctggccasggcaatcaggcaagaggaagaaataaagggtattcgattaggaaatcgggaagtcaaattgtccctgtttgcagatgacatgattatatatttagaaaaccccatcatctcagcccaaaatctccttaagctgataagcaacttcagcaaagtctcaggatacaaaatcaatgtgcaaaaattacaagcattcctatacaccattaacagacaaacagagagccaaatcatgagtgaactcccattcacaagtgctacaaagagaataaaatacctaggaatccaacttacaagggacgtgaaggacctcttcaaggagaactacaaaccactgctcaatgaaataaagaggacacaaacaaatggaagaacattccatgctcatgaataggaagaatcaatatcatgaaaatggccacactgccccaagtaatttatagattcaacgccatccccatcaagctatcaatgactttcttcacagatttggaaaaaaactacattaaagttcatatggaaccaaaaaagagcctgcattgcaagacaatcctaagcaaaaagaacaaagctggaggcatcacgctacctgacttcaaactataatacaagactacagtaaccaaaacagcatggtactggtaccaaaatagatatatagaccaatggaacagaacagaggcctcagaaataacaccacacatctacaaccatctgatctttgacaaacctgacaaaaacaagaaatggggaaaggattccctatttaataaatggtactgggaaaactggcttgccatatgtagaaagctgaaactggatcccttccttacaccttacaaaaaattatttcaagatggattaaagacttaaatgttagacctaaatccataaaaaccctagaagaaaacctaggcaataccattcaggacataggcatgggcaaggacttcatgactaaaacaccaaaagcaatggcaatagaagccaaaatggacaaatggtatctaattaaactaaagagcttctgcacagcaaaagaaactaccatcagagtgaacaggcaacctagagaataggagaaaatttctgcaatctacccatctgacaaagggctaatatccagaacctacaaagaactcaagcaaatttataagaaaaaaacgaacaaccccatcaaaaagtgggcaaagtatatgaacagatacttctcaaaagaagatatctatgcagccaacagacacatgaaaaaatgctcatcatcactggccatcagagaaatgcaaatcaaaaccacaatgagataccatctcacaccagttagaatggcaatcattaaaaagtcaggaaacactgggcgcggtggctcacgcctgtaatcccagcactgtgggaggccgaggcaggaggatcaagaggtcaggagattgagaccatactggctaacacaatgcaaccccatctctactaaaaacacaaaaaaattagccgggcgtggtggtgggcacctgtagtcccagctactggggaggctgaggcaggagaacggcgtgaacctgggaggcggagcttgcactgagcccagatcgcgtgactgcactccagcctgagcggcagagcaagactctgtctcaaaaaaaaaaaaaaaaaaagtcaggaaacaacagatgctgcagaggatgtggagaaatagggacgcatttacactgttggtgggactgcaaactagttcaactattgtggaagacagtgtggcaattcctcaaggatctaggtctagaattaccatttgactcagcaatcccattactgggtatatacccaaaggattataaatcatgctactataaagacatatgcacatgtatgtttattgcagcactattcacaatagcaaagacttggaaccaacccaaatgtccatcaatgatagactggattaagaaaatgtggcacatatacaccacggaatactatgcagccataaaaaaggatgagttcttgtcctctgcagggacatggatgaagctggaaaccatcattctccacaaactatcacaaggactgaaaaccaaacaccgcacattctcacccatagctgggaattgaacaatgagaacacttggacacaaggcgtgaaacatcacacaccagggcatgtcggggggtggggggctgggggagggatagcattaggagaaatacctaatgtaaatgatgagttgatgggtgcagcaaaccaacatggcacatacctatgtatcaaacctgcacgttgtgcacatgtacgctagaacttaaagtataataaaaaaaaatgaaggaaagaaagagaaaaagaggaagaaaatagagcttcattaacaattacatggaatattggttctaagttttacgaatagtgtgaagttggaaactatggaaaactaaccaggctgttagcttatatgttttaatatcaaatcaaatcatgacactttatttttgatcagtgactgaagggtagccttttctcctctctgtttacagaggttctgaagggcagactgttagagctgccagttcattgacctgggcattctgtaggaggattctaaaccaggtccctggtatgtgaaaccctgtctggcagctcctctccatagcatgtccctaaatctgtgcatctatctcgaagatggcattaaatttactagcagcttgagtagatagtccttgtctatccctaagggaagtttcccagcacacaggcattaaaaaaagtgataataggccaggctcagtggctcacacctataatcccagcactttgggaggctgaggcgggcagatcacgaggtcaagagatcgagatcatctggccaacatggtgaaaccccatctctactaaaaatacaaaaattagctgggtgtggtggcacgtgcctgtagtcccagctactggggaggctgaggcaggagaatctcttgaaccaaggaagcagaggttgcagtgagccgagatcgcgccactgcactccagcctgccgacagagcgagactccatctcaaaaaagcaaaaaaaaaaaaaaaagtgttaataattggaaatgcagtacaaatgcttgtaactaagtatattagtaacatgggaaattgaatgtgtgaggtacaaaggtgtaaattattgggaacataaagaagacttttcttggtagttttgtgtcccttatctttgccaggaaagcctgtctttccaaccttttaattgctaacattgttctcctatggctgtatgtaaattcccctctcatttactgaggaatccaaaactatatgcagagtattctgcaaaatcctggatattacatattctaaaatgttgggataattatcactaatataaactgggagcctataatgtaatattgtacttacagaacacaaataggtctccaaaaattccagtctttgaaaaggagcgtttggctttttgacaagtcatcaagtgggagaaattgaagtgatgaagaatttttaacatgatcttcttggaatacccaaaattgttgggagattgctcattaacacacagatcaccttgggcagtgtctaggaccaacaagtgtacgggagaagctctcatttcccttacagatgcccttttcacaaaggccattcgctaggggactgttgtatacattagcttcctctggaagttagcccactaataaggtcatctggttagctattgttagctaataaggttattagatacttatagtttaatcccccaattcattgtgggatagtgttccaactgatttagtgaggtctcagaggcaagtatgtatgaaaatatagtcaccatgagttatagttctgtgtatttcaattgttacaaatttgcaaaacaggatctagtacaatgttaaggtgaaatatgcctggtacactttccttattaaaaggaggtactcagtacatattagggagaaaaaatgaatgattgaataatttactgcaatctacagttggaaaccatccaaaagggcaaagagactcaataaaagggcgaagaagctcagttagaaaggtgrttttgctagtgtttctgctaatgttgggtccagatgagcactgaaagtcacagatactgtcaacagggatgacaagacagaaacatgcttcctgacaccttttaaattatttttttcttcttttcctactatcttcatgctgacatttctgatgtcaataaacataaatttttagaaggggctctaggaaagagaatagagtccaattcaagaatgctaactttcagatatcctaataagtgttctgtagttttattattatatgattagattcatacagtagaaaacataggagcccctactgtctttataggttgactttcaagacagtataacacacacttcaattcttgcttcatatgtctatacataaaagccattctgctgtgcataaatcatgttttagggtacttatttctgtytcatttatttttttttagaaaattaaagaaaccacctcatgttagagccccacatttcagttaagcaagattatccacacctcatagtctgacaacttccttactttatagagacccttgaagaaacaggttagaatcttctctgattcagttgagtactcattaaggctttaaatctctgaaagtgtatatagtatactcactttctccaaagaaaaaaatcaaaaattattttatgtgtatgtgtttttttaaagtaattatcacctttattaaaaacactttcagattgtgttttagtttcatattaagcactcccgctgtagaatcaaataagctagattcaagtcctagttctgctacttaaaagcagtgtcaccttagacaagttacttaattatttcactcttcagtttccttacctgttagaaaactcttttgattactgtcagaattcagtgagatgatacttatgaagtaccagatataaaggaaatactcaattaggaatgagtattattctttgattttcttggatagttttaggattgcaagtcaatttgcagaaaacaaatatccccaaacttttggcaaaggccaactcaccaaatttttagtcccttgaattgtaatttgtcaaaagaaaaattcactttgaactgttatacaaatatatatatttttctttccaactttcattttaggttcaggggttacatgtgcaggtttgttacatgggtgtgtgtcatggaggttttgtgtacaggctatttcatcatccaggcaatgatcacagtacccgataggtagtttttagactcttaccctcctctcaccctccaccctcaagtaggcctgtgtctatggttcccaactttgtgtctatgtgtactcagtgtttagctcccacttataagtgagaacatgcagtatttggttttctgttcctgcattaacttgcttaggttaatggcctctagtaccatccatgttgctgcaaaagacaggttttgttctcttttatgactgtgtagtattccatgctatatatacaccacattttctttatccagtccaccattgatgggcatctaggttaatttcatgtctttgctagtgtgaacagtactgcaatgaacatacacatgcatgtgtctttatggtagaagaatttatattcctttgggtatatacctattaactgaaatgctgggtcaaatggtagttctgttttaagttttttgagaagtttccaaattttttcaacagtggttgaactaatttacattcctaccaggaatgtataaatgttcctttttctccacaaccttgccaacatctgttgtttttagattttttggtaatagctattctggctggtgtcagatggcatctcattgtggttttgatttgcaagtctctgatgattagtgattttgagcattttctcatgtttattgaccacttgtgtgtcttcttttgagaagtgtctgttcatgtcttttgcctactttataacagagttatttgttttttggttgtcgatttgtttaagttccttatagattctggatagtaaacctttgttggatgcatagtttgcaaatattttcttccattctgtaggttgtctgctttctctgttaatcatttattttgctgtgcagaagctctttagtttaattaggtcccacttgtcagttttttattttgttgccattacttttggagtcattatcataaactctttgccagggcctatgtccaaaatggtatttcctaggttttcttcttggatatgataggtgcaacagacatctacagaacactccacccaacaataacagaatatacattcttctcgtctgcacatggcatatactctaaaactgaccacatgcttgtccataaagcaattcccaataagataagaaccaaaatcgtaccaaccatactctcacaccacagtgcaataaaaatagaaattaataataagatctctccaaaccatataatttcatggaaattaaacaacctgctcctgattgacttttgggtaaataaatgaaattaaggcagaaatcaagaaattctttgaaactaaaacagagatacagcatactagtatctctggacacagctaaagcagtgttaagaggaaaatctataacagtaaaagcccacatcaaaaagttagaaaggtctcaaattaacaacctaatatcacatgggatgtgggaatacaaaaacaagagcaaatcaaccccaaagctagcagaagaaaagaaataaccaaaattagagctgaactaaacaaaattgagaccaaaaaaaccatacaaaagatcaatgagaccaaaaattgtttttttgaaagaatagataagattggtagatcactaactagactgataaagaataaagagagaagactgaaacaaacacaatcagaagcaacaaagggggcattmccagcaaccccacagaaataaaaaaaaaaaaaacccagcgagtgttatgaacaccactatgagctcaaactagaaaacctacaagaaatgaataaattcctagaaacatacaaactcccaagattgaaccaagaaaaaattgaaaccctggacagaccaataatgagttctgaaattgaatcagtgataaaaatgcctaccgaccagaaaaagccctagaccaggtggattcatagccaaattctaccagatatataaagaagagctggtaccaaccatactgaaattattccaaaaaattgaagaggaggaactcctctctaactctttatatgatgccagcatcattctgataccaaaatctggcagagacacaagcaaaaaaaraaaagcaactttgggccaatatccctgatgaacatagatacaaaaatcctcaacaaaatactaccaaaccaaatctagcagcacatcaaaaagctaatccaccacaatcaagtaggttttattcttgggatgcaaagttagttcaacatccacaaatcaataaatatgattcatcacacaaacagaactaaaaccacagactacatgattatctcaatagatayagaaagggctttcaataaaattcaactttccctcatgttaaactgttatacaaatattttaaacaagacccaggatatgttgtcacagacagagacaagggtagacataagaacccagatggaatggggcccatgagaagactagaagcagatgttccaagagttctaggcatctgcattttgaaacatgccaaatgaatattcacccaatttggaataagtcagtggaaaaggaagcagggaagacatgatgaaattaacactgaaaaaaatgttggataaaatggcaaattggtcatttgacaaattggtttgtagtgaattggctttggataaattagtcatttagcaaattggtctgttttgctatgaggcctatttttataccatgcaggggaaaattaacattttaaatttatcttatgaaaagacatgttcagaggcaatcaaatcatatgttaaagaacatcagccttgtaatacaaaagtaaaattttcatcccacccaaagttttaatggatttggatctcctgcagaatgtgccttaaacaattaatggcaacataaagtataattcatattaaattttagtaattaataataagcccttcacaattgtacatatgagaataagtggtaattagaaagaacgctgcattgcctcccttccaatgcctatttaagcaagcttaatgtgagttaaataggagttgatgagtgtgcgtatttacctgtatatctatatccatctatctacttatatatacataccattcttcagattaaatgtattacctttccttacggctrtctcttcacatggattatatatttctttgtggatccttcatcatttgggttgaaatgagcaataccctgtactttaataacctgtctaacataagatccaacacacctaccaaagaaacatgatgttgtcttaccctgaaaaatatctatttgctaaaagatttgtgaaaatctcctgattgctatagggatttaaacctaacaaattgcacgtagcacaccaagtaagcatttagagaaaattttcttgtgcttgagtgccctttcagctggacgtatcaaaggcttagtgggttcctcttatactgtcacctcactctctcaggtagaaaaatgcacaaagttatatctttttcttgtgtattgataaaacttcaagtaaatgacagtggaaaccaactgtgagaagcttttgaaatttttgcccaagagttttacttagaaattgccttggtttgataaattaatcccagttcctgaacagtgtaattcagtcattaattttattttttatttttgttgtgcacagtgttgaggcaaggtgagtgctacactgaggatgggagaagcccctaaaaagattgatgggccaggtggatggtcattgtcataaaactcacttgtgggacacagcattataaggagtttgtacttacttgggtgtggtagaaacataatctgtacattgtatgtttttccatataacattgttctttagataaatcaatactaaatctgagaattatctgatagtaggaaaactcattgaagttagtatattataatttcttttatgcttaagtataaaatatgaacattgtgatgaatttctcaaatatctgttattttgacagtactaaaaagcaaattttcattatctaaataacttcacatatgtggatgtcctttgtcctgagtcttttgaaatcttgtcttatgggatgcatttgtacttaatatgtttcttaggtacacttttaggggaacttggtggatcttttgttagggctacatttctagtatcttaggtaccacttaccctcaggggaaacatttagtcagactggctgataaacatgtcgcaggtgactttagaattaagtctcatcttggagatagaaagcttgggtttatatttttaattaagtgcaggcctctgtcctttacttgaacctaaggagtatcatgtagcaggaagttttagttcagcaggattctgactattttcaggcagttccactttgcaaacaagatagaattaacacaaggtgtgctttgagcttctggctatgcccagtatttttaagctgctttgtaacatttttttcattccaggaccttaaggcaaactttaggagaaactggatatattatgaaataaagaaatatcacaacatctgactctttcatttattactccattgattaataaatatactaaatgtaaagaggtgagttcaacacccaggaaacgtaaatataaaaagacaaagcctccaccctcaagaaatatatcatctaggagggttgggatgggagacaagttccatactcaaagaacaataatgtaaggtaggtgcactgctttctgctgtctagcagctcagagaggggagcacttttcctgttctcctgcaatcagagaaaccatcatctgagaaaaactgctgcagccttcgtctgatgttgattcttttttcttttcttttcttcttttttgtttttttgagtcagggtctcactctgtcaccaaggctagagtgcagtggtaccatcattgttcactggagtcttgaacacctgggctcaaatgatcccaccttagcttcctgagtagctgggtagctgggactacaggcagctaccaccatgcccagcaaactgttttttctaattgttagtagagatgaggtcttgttgtgttggctaggctggaactgattctttaaaaagtgcccccacctagggtccctctgaatatattcaccaacattctgccccagatgtttttatcttctctttttctctttttgtctacctcttcctttaagccatccctatggcttgtactatcactcctagggaaactagcctcaaacataactctgatttttcttctaaattccatttcttcttggtcatgtcagtgagctgttgccttaaattcttcagattcatggagcctaaagtgaaacatagatcacttctttactacctgccattcccttgggtatttatgtttcatttctgttaaagacatgaccatttgcctggttacccaggcttgacagttgagctgcattctgccatttctcccatcttctttccagatctccctgataactagttagttgaaaagacctacttgcccctagttccagtgtgtggctcacttttccactctgcaggacatcctcaacacaccaaattacacatttggccacctatgccttctttacacagtgcctacccacattaactcactcatcaagtattcactgaatgcctattatatgcaactcagcatgaggtgccaaagaatacaaaagtaaaattttaaaaaagttggaagagttttatagaagacaagcattctttctaatgagagatatacataagctatttttcaaaaacaatgtgacgaaattaccgtctctgcttgggcatccaggagcatgtcctaaaagaaatgacttgaattttaaaggctaagtaagagttaaccaagtagaagaggaggaaatggcatttccagatgagagacaagtatgaacaaaggcatatattgccttgtggagatacgcaggttgaaccattttttggtcagttaatgacccatctctttcttttctgaactcccatatgacatgaaagttcctctaccttgttttatggtcattttagtatttgccagctcctgcmtagattacaggttttaagggcaaggaccatgcatcaattatctttgaactctctatagaacttggaccaattatacatttgtggtaggctgaataagggctcccaaagatatccacaatctaacccccagaacctgtgactctgtaaccttacatgggaaaaagggctttgcagatgtgattaagcaaaggaccccagatggggagattattttgaattacctaggtggactccatgtcatcacaagggtcagaatccaaagagatgtgagaatgaaaagcacaagtgagagcagtgggatagccaaattttaagagggttgtgagccagagaatataggccgcctctagaagctgcagaaggccggggtggacagagtctccctgcgaacctccagaagcagcacaaccctgcccactcacggtagactcccgatctccgggctgtagaataatacatctgygctattttaagccactgtttgtgattgtctgttacagaagtaatagaaaactaatatgatgtttaatattcataaatgttttataggtttgtgacatgatttttaaactttttcgtctatatggtattaggatggcagatataaatttttttaaaatttatgcagggaatccttaatgtaacaaccactagattgtgctaatttgataaagtaaaaaaaaatagaaaatattatatcatcaaagaggatttttaaaatagtgaagagaaattctagatattgtgattttagagtcacattattgaactaatgatatcctatactttataacacaattccaagaaaatctgactgggtgtaattatcacaatctgtgaattttcactcaaatttccataaaatatcatcctccatttatcttttactagctccataatttagagtaaaaagacagtatgtaatgtgcatcrcaagcttcccagtattttcaaagaagaaagtccataatcccttttagtaaatattggtggacaatgaggatgaaatatggtttatmgtataaacagttctgccattattagagcataggagggcttcagagtacgcccactcattgccacaagctgatgatggagacaaatacctgtgggaccccaagcatgcacaggacattgctcatggctttaggaactgaggtactcagtatttggtcctaaccataaatgactgctaatgtgagatttacaaatacagtaaacctcattaatgaattctatatctgcaaattcacctactcacaaaaccttatatgtaaccccaaaatcaatatttatggcactttgatggtcaaaagtggatgtgtgcagagtggcaaaaatttgtgttgtccaactgtgtacattcctagctgaggctaaagaaggccacgctctgccaccctttttcagctctttatacagagatgacaagaggatggagatggaagagacagtccaatgtagtgcaagaagactctgctctggggccatctggacagcttgagtcccatctctgatccctgttagtggggaagcctcaggcaagtcacataacaccattgaaccttgttttttcttgtgtaataaaatagtatctaccaggacaaccttgtttttaagatgtttttaaggtttaagattataatatatgtgagagagatatatatatatatactttacatacacatgtatatacttcccctaagcgcaatggttcagtattcattaattcagtgtttgcagaggctttgtagaaccaaactaccatgaataacaggaactgactatacatttcaatgtgaagcattttatagagggactagagctggtcatggtgatacttagaaaatgctcataatgaacctcagttgggaatagatgggcttcactcatgtgttagcatgcaggctggctgtatgtcacactctgttaccctgtttctctcttagagaaacaataatggataaaataatgaattccttytaccatgtttgatatggtttgattctgtgtccccacccaaatctcaagtcaaattgtaattctcaktgttggaggagggacctggtgggaggtgattggaccatggggtcagacttcccccttgctgttgttgtgatagagttctcacaagatctagtgtttgaaagtgtgtggcacctcccccttcatgctctctttttcttgcccctgccatggaaacatgcttgcttccccttcaccttcctccatgattgtaagtttcctgaggcctccccaaaaacagaagcctgtacagcccacaggctrcgagccaattaaacctcttttctttatagattacccagtctcggttatgtctttatagcagtgtgagaacaaattaatacaattygtatatttttctgtctttatatgagcaagatacattatttacctactaataattggcaagttataagttttcctcacagtattacatttcagaggtgtagataaaaagatatacagaattcatagagatgaaatcacttcatcattcccccacattcccgaaagaagtttatttcttagttgcaaaaacacatccagaaagaggctccctcccccacaatatttctctattaggaaacagaatctttttttcaagactctgatttaacaaggttttattaagcactgcactgagtgctatggaagattcagatataaagggtatttttctttctcaccaatgcatttctaccattttgggggacactaagtgaaaatacagaaaagaaaaactgtagaataaaatatatgcaagtatattaaagtctaaacatttagtcactagcttaagacattccaagagaatttgaagggtattcaaactaaaattttagccatttggaattttccttgattttcatttatgttctaattaaaattataattgttttcttctatcaacgtgattgactctaaacattagtaaagaaaaagaaagaaaaacccactagcaccaccaatgactataacaaaaattgttccaaagtttccacacagagtcaataaactctatcttggtgggttaaatgaaccatgtgaagctataaattcagaattttatgcacattataagaacacagtataaaatatagatggactgccttttctagtagagtgagaactccctgatcaatttttgcagttatgccttgtatgaaagcctctcgagtccatttgacagatcacctctctaaagagctaaatgtgtggttaaatgattgattattctcccccttcagctcctttcccctcattggacatgtagcctcgtctccttttcccatcatgtgcagataatatggaacaacctctgtcctaagctttctgtcaaacactttattggcctgatggtggatgaggagagatgcataggattcaaagcttacacagaggattcatatgctgaatttaagttgcaagacctcaaggttatgcagaggaaaaccaggagtccctcgtgtaagctgtggatagaatggtctgttctggactcattcgggtatacactaatgaaaacctagctgctgtcaataggagttggtagggaagtataggctcayggactgtggaatttcattctgaactcctttggctctcacttgccacactggcccacacctataccaggatttgcttactggtcaggcaccaaagtgttccaagaattctaaagagtttctcctttgaaaataagttttaagtggaaacttagtgacctagaaaaaaactgaacctactaaaatggaccaatactacacacatacacttacacacacacattcattaataacaagtcagtcctttaaattaaawtaaacaggatagagttactgctactgcttctggaattgtcccatatcagaaagagcctaaaatttctaattatctctcatttaactaaactctcaggaatttaatcctcttcagagagcctattgtcttgaaattgcacatttagataaggaaaccaagttctttttatcaaagtactttatgaatattragaaatgtcagattcagtaatttatcacctggataccatgtgctttgaagcggaggatgcgataacaatggtaatgacacagtaaattatgttaccatggcaggacagcctccaatgkctactcgggtttcagctctgtgcacttcacatctttatcacaacctggatcaagggggtatggggatcacacaggtgttaaaatgttttgagctcctagagtttaataatttgctccatggatcctggcattcatgacagtcttttaggtgccattaaaatatccctaaatctggcagattttttttaaatatttaggtgttgtgtaatcaattttagtcattcttacacagtacatacgagaagagtgaatgttttccatgtctaataggagatgtaagaagttttgcacatctgggagtatgtgtgtggaagagatacttcattgtaggtaattgatgctggcaaatgagatttttaagttttgttaaaaacaaagtgtttctggtacagtctaatattatgtgttattatgatccaataaactgtgttcacatgaattccacctacaagtggataaagttaattttgtaagaatgtcagactacttggagtcagaatgtattttctcaacactgaatcagaacctaggaaagaatgaatgatactttcagataagaccagttggcagcctagaatttgttttatttttccttctttggtatctatctgaaaacaaggctttcttttttcttctctgtccccctctttgtgtgtgtgtgtttgtgtgtatcttgagtactttgctttcttaagcagtggaaatttagtatgtttgctatctggttggaaaagtttgtaaactgagcgtgacaaatatcaacccaccactggagctccttgcaactaatgaaatgtrtcagccaaaaaaaaaacaaaaaacaaaaaaaacaaamaaaaaaagcaacccccaaaaccctctcataagagctgcaatatacgctagtcaaagaggcaatggctgcaccaatttaggagtgtttcatttttctttatcagtgatctacagtctctatttccyagcttttacacataaaaaaaagaaaaacatagtggaaaaacattttctttaaagcattatatttttcctatttggtgactatatactatagatgttaaatcttataagttattgtcctttcaatatataaaatataaaatttatatattagatatatagatatacataaactatatatcatatatttatataattataatgtatattttataattatatataagttaatattatttatttttattaagattacatataaatgtaacatattgacatactctcctaacctcaccaataattaaaaaataaagtataagctttgttaattttgcaaagctaggaaatatcatgtgttttatataaatagaataccaacatcaaacccccgcaaccctagacaggctgatggctttatgtcaatgccaggacttggagtaggggaagacaggtagtcaggaggatgggaatgctttgtcatcctcatttcctagagaaagtcaaaatttgacagaygggggaaggataactttagtagattccattttatttaactctataaacacacaaaccttttacccctaggctattttttaaatgctaataattttaaaggcactctcattaacttgaaacatttttatagttttgtttttgtttgaaaactcataccagtcattaaagactatgtcagttactccatagatggtattcatgtggattcagatatttggggtaaataataaagaagaaaagaaaatgaatttgacgagagatccttcatgctaagctggccaaaataaatcacagttttgaaaataacatatcccttgggagaaagttgcttccatgctttgtaacttaaggatgttagtctcataaagtttcacacatttgaagtgcatggtaaacagctagttgtcatattcaaatgtgctaggataaaatatgaatttctttgttctgttcttaactttgttgccaaatatatgctgctttaggtaagacatgttgttctgtgtctcagttattgctttgttgctacttatcaaagatgaatgatgcctgcacctcctcatagagttgtagggtgcaactaagattacaaaaaataagaaaagatgaaataataaatgtgaacccaaagagacagaaaatgtaatgctgctactttatataatatatatatttgtgactatatatagtcagtatatatatataaatagtcacaaaaagtaagcaaaatactgtttaaagaggtactgaatgtcagaagccacaaatagcttcttgcagggggttgcgggggagtaggggaaccacagagagtgcagcaggagtggctactgaatacgtcaatctcatggaatggcgaccttgactctccttcctgcagcagcctctcagcatcagcccctcgatgacccctctccattacccctaggaaccttcctgtctaggctatgccatcttscctctggtcacactgcaggtttacccattcctgactatatacttgctgctgatgtcacctcagtgtgtcacatagtgttttacagtctgggctactcagtctaagggtttcacttccccactttgacccagcacctgcgctgcccacccccaccccccacccccatcagctgggcgctaccartgcaccagcttaacttgttatcccagcagtggcatcattcttatcctgggttgtctccttaggagatcctagaaaatgcctcagccaggccagcattccaacgggataactacattaggttaagcagtcatagcaatgcccctccagaacatacgctctgctcttccaagccactgtggccttgcacgtcatagtggttggagttctcagaacattgtgaggcagaccagtgtgaattccagcttcttcatccagctacatattcacctacaagtacaaaattcccattgccaattagaggatgccctggtgctgattctgctctagtcacttggtgatttagcccaaygcttctcaaatttcagcgggcaaacaaactactgaagtcttgctgaagtccagattctgatttggtagatcctgaaatgtaacctgagactcttcataactaatgagttcctggtratcatactgcggcttgtcccccatactttgagttgcaaggatctacccagagttggattgtacttctcaaacagaaagagaagcccctactggaccaataagtcttaataaggcatacttctatgcttccattamttctagcagttactttaaagccataaactggactaaaaagtcttctgccaaggcttggattactggagcaacaaagccttttgtatctgttaggaaagaagctatctgtcaggatgatctgacctgattttctggatctcatcaggtttgggtccaagtgaggctgcacatctggccaaggagaactggtctctgtgtaaggcagagtgtcaacttagttacaggtcacacatgtggacacrcaagcctacaacttcgacctctggcacatcctatgtcccctactaacttaaagcatttcatcagcaatgtaaatattgccaagaagttgctaaggaaaagccttttggcaactagatggtctgtcttcaatgttcatcatgagtccactggagctaacaaatcatgaaattgttgctgacaaccctggttgtacagcatcctgaagtgagggaaatgccaacaattatgccagaaggaaagctttaaggatattctacatcctggcttcaaacaacaaagctttattgcagactgcaaggaagtggcagacacaaggaaatgaggctggtgcattgaaatccacaaaggaagaacttttctcagagcagagacttcacaagctcactattagtttaagatctagagctacaaacagtcacagcctctcaaaagcccagctatagtccaatcaaagaacaaacttcacaccgggcaatatggaaaaagctgttgagtcaacattcatcctaacagccacacttatacataatggtaagcaggaacagcatcaccgtcaaatagaaaagacagcaaatatgtagaaggccaattggtaataaaatatatcacattagatatataccagcaggaaaaaggggaagatgagagactatttatactaattcattgtgaagatgtctataattgatgcagtcttggaatcatgaaaatagggatcccccccaaggccctttgttattatattaatgcctgctcattatttgtatgtcctctagcaataatgtcacttttatatgaataatgcacagttcattttgtcctggcagctaatttctcaacamtgtatttatgaggataatacagatattttagtgatttctccaaaagaaacaacaaagtttttgaattgagaaaaaaagtctaatatttaccacttagaggaatgcaacaatatatttattgagcaccttctttgagtgaaatattttcttaggataaatctcacattataagtgtgattgctcatttatgctagagtgtgtccctgtgctcaaggacagcagatatatttacataagtcattatctaatgagttagaacattttaaatatcacaagagaactataagcaaactgttagggaatttcaaatattaagtctagatcatttccagttttatagttcagggctggggaagaagccaaggaaacctttataacaaggtggattaaacttgtgccctgaagagtgaatgaaatactgatgtgtatcaatgatggaaggctagataaagaggaagactatttcagaagatcaggatccagttagagaaagagaaactactctggttacaaaggtgctagagagctgaggagcctaacagtggatggcgaggtaccccaagaagaacaagaccaagaggccaccagggtggaaggatagtggaaggaaatcattctcagagcccagaaactagcgccagttggcagaggctggccacagggaggtggagccatgaaaggagagggagactcatgggaactaggcccacggagaggccacaggaccctgtggggtactggggggtcagcaacagaggagagtctggctagtcccctccttttatcctccaaaggttcatcaatacccagcactgaccaaacctaccaaaaagcacaagcaaacttggaaaatttagcttctgctaacacagagcaaagtaggataagggtgtgaataaacctgagaacaaaccagcagtagacctgcataactggcaaaagcaaggacaacaaaaagcaaggagtgtttgggaaatggcaagttmtatagtttacctctaacaggggggtgacatakgacaaggtcaaacctcttttgttcccacttagtgggggacctagagtacctgacatatggtaagtctcaataaacacatcttcattaaataaatgcaagagtgaaatcatgtaaactaaatatggaaacatagattggaaccctatcatggaaaatattaaatggcaggctaaaaggtttgacatttactactatttgacattggtaggcaatggagagccatttcagaccttcatgcctggaaagatgatcaaaattatgcttcctattgaacagatatagagataagccttattatatttggcccagtcagccaattatattatgtataatttgtaaggcttagtataaaataaaaatgtagggcctctggttcaaatgttattaagaattttataaagagcattaagtgtggagcccctgaagctgacccaagcccagtgcattatattagatgcctctgaaaaataaatttactagtatcattgttaattgtcaaacttagggcagatagtagctacaagaaagttctaaatataagacaaccaccattatctgatttattcttgaatgggcattatcctaatcttttctggaattaactttttatgtgccgaacagtggcatagagggtgatttaaataccaattatcttcctatgaaattattgctttttaaatcatttaacgtgttcaaggcactgttgctaaaatggtaacccatgttctcctgcattatttaattcatgttcttaaaacagttcattttgaacctctttctggctcaaatgccaactaatttactgctgctgcttggtttactaggattcaaattagaacagtatccttttgctgtaatttgtgtctggtggtgctcaattcartttaggtagcccccaaatcggttttcacatatctgtttaattttcattttgtagcaatagaagacaggtctattcaaaaaagtcacaatgaattaatatagcaggaatttggaaactggagttatagtgcatatagcccctatgtttcaatagatattkcagagtatgttcagtagtttatagcagatttattgtgctatctgtgtaatggttggcatctgcaatccatcaagactttatgcttgtgaagaaggagtgttgactttgtatttaatatgagtataggaagaagactggctttttgggaacattttctatcattctgatttttttcagtcatacattttctcactttttcatgttgaggacttacaaaagaaattcttagaaatgtttgcaattgtctcacaggcttattgaaccacagaaacggagataagagagtatgtcacaggtgggatcattgctttttataactgcaaaattatattaaggaactatagggtacattagagaacataaacagcctttattataggatgataagaaaactggtggtccaaaagttagcaataagtaaaagtaccaatttcataaatcaatttattaatatgtctttatctattctacagttacttatttaaccctaacaccactttacattttggctgctcctgatagtaagagcttaaaatctactggaagggaaaaataattaaagaaaagtaagcaaggatttccaggcaatttggcaacctgagctgatgtgaaggaatttcttccccgaatccaaacacataaaatggcaggcaaaatacaacaaaagctttcaaactcaccataaaacaacaatagaaaaccttcatgtcctagaaaagaaaaggagctcaaagtaaaaaatgtgaggaggagctgattccattcttacatcacgtttgaagagaaatccaggccacaggcttcatacatatgacgatgtgaaatcatgaccacatttgtgaaaggggcctggaagaaacctgcagttgtcccagagatgcagcactagcaagtaagccaaaggccacaagaataaaatgaggcatcccaaagaaacttgaacctctgacttccatactatgtgaatraatatagggtacaaattcaactaccctagtagtatgttggtaagttaaaataataaatggtccaaaattgatgaaatacctggatatcatcaggagcaaatgcaaattactctagaaaaatttccacagccaaggacacatgtaacgtacacaaagagttatcgccatctttcactggggataattcaaagatttaaacttatatartgatatgaattatttgaagggagatcagcacacataacacaaaagttagtttttaccccaagaactagaaacaaagaacctgaaaatgaaaagacctcaagtacatcttaaatgttcaaagaaataaaagaaataaatgaatagctcaaaactcttaaggaaaatgtaaagtcagtatgaaaaaaaggacatatggtataagtaaaaaccaaataaaattttaaaataaaaaagtgcctattatgataaaatttaataaatgggaaggacagaggagcaatcatagttttcaarattactctatctctctttattcctcttattttctctaattcccactcgagtatctgtaacatatacaggttcttatcaatataagcaaataaagtaagcactttattttcccttttaggggcatggttaggtttgcaagacagaggagcagacagtgaaagttgaggaagggaatgtttcagatagtcttggggactctatgggagagaggaaaatggatcattcaaaagcagctcccaaagtaatatgatatgcaatagttataacttctttgttttcccacagattattttaaatatctgctttgagttttggtaccctttctccagaccacgccctagtgtggctgcaataaaatgatagagggacacaggggcttaataaactaaactggacaggcattcctagaatcatcagggccatcagattcagtcaatctcaatatattaggtttaacattctaaaactcacagtaaccactcctttttaaaaagctgctttacgcaagagtacatatgggcccatagaaaagtgaagatacgagagcagaactgtaaatcctcctcaaaacaaaccacttcttgataaaaatagataaatgaaaaagaaacaccttgggtactatcccaccattaaaattgacagaattgagttagtcgttgaatcctttgaccctattacaggaaagccctttatttatttatttatttattttacttttttctttttctttctttttatttttctaaggagaatgaaaatgccagacagcagtgtgttgttcctgccacaaaatattattaaagcataactagcaaaccagaaagcatcgccctgtaaatttaatgcagtgtcagttttgatctagatgttttgctctccaaagagatgcttaatcttctaaacaaaattgaactgaatgattttcaaaaaaaaaagtcggttatggtgaagtgtcagtgcagtttaccagccaagttatccactagtgacattcccataggttagtatatgaatctgaaactttggtctaactatgaaaatattgattgggtggtgcaataataaatggtaccataccattttactttcaagaaagtagaattagaaaattgggtcctactactggaatttaatgtttggaatatagataattctatcttaataaaaaagatcagagtaatcaagagatcacacacatgaaacagaaaccaccacagaaacgtaaggccttattaaaaataatcactagtaagacaaagatatttactgaactttgtgctctcctagaagtcatggtatttataagtttaatgagtcctatttagtaaatatttttagaatttactctagcttttcaagaaccaaataaatacatgtaagaagttaaaataatttaggttatatagtgaagtataattaatgaaaaacacaactaggtttatgtcaaattataaatgctaaaatatcaccaactagttaaggcacttaattaaataattaatgtaggaaatgtgaatgatttaggcctttgggggtcagtgtcatcctgacaggtataacaatcatattggctgagtattgtggctcatgcctataatcccaactcttttgggagggaggctaaggcaaggggattgcttgaggctaggaatatgaggccaacctgggcaacaaatggaaaccctgactctaaaaaataaatttaaaaaacagaatcatagttatttttattttactataacttaagagttgtgaatttatatttgtcatttattcagcatttcttttaacttttataataagcctaacagtttagtattattgcttccaccttgaacatgaggagatggaagtccagagaggacagcaactggccaaggtcactttactacacctggaagagagagggtccaaatgctggccctctcgctattttaccttgttaactcctagcaattaaaacttaaaatatgcaaataagtaatagctgcgttgcagcaagttcttctccttttgactttgttgcccagatccaaaagtctcccacccttcatgaggtacccattttttaagatccaaataaatggactgtttttccaccctctgtgaggtcctgtgccctctacatgccacctttactgggggctaataagctcttccggttatcacctgtttcattttctgcttatgccacattcttgttcctactccatgttttacctcctagaacaagacactctctgatgtatatcaaccccaagatgggccataaacttttgccaccctcacatggcactataaagccaaagtgacttttgttaattggaagattgatagaatggggtccaacataatgcagaattggaaataacttaatattgaaagtagttatcatggttccaagtattttcttttcgtttcctaaaaagggaatttcttattgattgtatccttccttaggatccaactgactaccatatttatatattcacctagaggaggcctctctttttatatcgtttctcccttactattttcagggtcattaaaccttatctctctcaaaaaaaaaaaaaaaaaaagcagtgaacgactctataaatcctcttacttcattatacctttccttttctccactctctcccaactggactataccaggagtctcacttgaataaccaaaatgaatttttaaggaatcagggaattttcctaaagaattattttttttctggagatggcattctgctcctcccctagaaggcaaaagaaagtggctgccatttgttttgttttgatagcaaactttccttcttgttacatttgtgtttttaatactatctatttgcacacagtggttataaaagattccagaattttaaaaaaatgaggtctaaaattcttggctttccaaaattggagaaaaacaaaatacctcgaagattcttacattcctctgaaagcagaccaaagtccgactaaatgtagctggctgtgagctgttctttacccagcagacttccttaatatgtatgtattttaattccattacatgacattatccagtcttcaagatgaaatattaagatgtttatggaagagttttctgccacttacacacaggaagaaaagcttcaggcgacggctgttctttctgtcccctcaagtttatacattacagaccttatttgtatgcaccaaaactaaacatcttgccaggggatacagatccctgtgtgccctgctaaagaggtggcatgtgatgcttgaaatgtttgagatgacaaatagcccagcaggcctggcctcttcctctcctgccctgggctgctggcaatctatttcaaattgtgtgtgcattgtagggtgaagcctgtaccaagaagtgccagcctcaccccaagcagtgtcctattgaatatgggattaagtgaaagtctctggactagccagagaacaaaagagcgtatcatcaccagaggcaggagcagctcaccagaaggaacctgtatactccacatttctttcaaatgtttatgttgtcatatggaattctgtcaaatgtttttaaatggaaaaatgcacccaccatgattctttaaatgaatagttccgccatccatgagggcatcatctgaatgcctagaacaaaatctggagttcgaactgtcttgagttgaagctagccttgccatttttgcttatagctcaaatagtactttccagtgcaaaaatgtcactgctctgatgcgtgcggaacagagtgctctgcttgtattaatcatggtgccgtctgcatgggtggatattgttggaagccagagacagcaacctgggccccatcatgctggctccaggaaaatgttggcagagcccacaagctgattttttttttttcgctgtaaggcttaggtattacaaatgtgtgatctgaattttgtaacatttttcttcaccttttgaaattactcttttctctatctattatcacttkcccagggtttccaatgagcttgttaagaactaagatcagccagcctattcatactcaggcctgatttttctttacccataatatctagcagtgtcacaacagagcttaaaaaaaaagtctctgtatatagcccataggtattcaggattctggaggatacctgttagatgtccctggaaatataattggattgtgcacatttgggattggcttctcctccttccagagccaccccattaagatggaacacaatactacaaaatttacagccctcgtggcctcccaccttcaccacccccaccaccctcacccagatttgaatacaactggctcaactgaaggataaaacttcaattaaaaaaaaccacacatgtaatatgcaaataatctcataacttttttgaaaaaaaatctatagcaaatagtgaattgaggagtttaaaatcaaactgacagattggggctatgtaagcagccagttcagataattttatggaaggaaaaacttacatattttgcacaacaaaggaaaaagaatagaaatgacccatttccacaagacttcagagaacattttatacacatgacagtggattgtstgtatcctataaaataatgctaggaggaaaggctaactccatcccactttatttacttcacaccagtataggatttttaaaaagaatttcttcaatttttaaaatgtacaataaatttgatgatgatcatttataaagatacttgtatttaatttatttgtattttatctccttaggataagctttgctaggtgtgtttgagataggaaactggagactgtataaatcaaaaggatagtttaaatcaatttgtgtctctcagttttgtacataaattagmccagtatcacaaawatatgagggagcatatgtggtaaacagtgtgatttgtgaaagccctggattctaatccagaatctaatgtttactgggtaatcttgggcaagtttacctctctgagtctctatttcttatttacaagctatggacaaaatatttcccccttctttcccctgggactgagctgagaatccagtgagacaatgcatgtgtgctagtcatctctgtgccttctcccaggaactacccttggtgttttgtcatgacacacctgcccctgtaattgctgggcctgaggcaagagaactaccaggtgaggtgtcagagccctggcagcaaagagtggttggctcccggcagtaaaaagaattgactcatcattactggccatcagagaaatgcaaatcaaaaccacaatgagatagcaactcacaccagttagaatggcgatcattaaaaagtcaggaaacaacaggtgttggagaggatgtggagaaataggaacacttttacactgttggtgggactgtaaactagttcaaccattgtggaagacagtgtggcgattcctcaaggatctagaactagaaataccatttgacccagccatcccattactgggtatatacccaaaggattataaatcatgctgctataaagacacatgcatacgtgtgtttattgcagcactattcacaataggaaagacttggaaccaacccaaatgtccaacaatgatagactggataagaaaatgtggcacatatacaccatggaatactatgcagccagaaaaaaggatgagttcatgtcctttgtggggacatggatgaagctggaaaccatcattctcagcaaactatcgcaaggagagaaaaccaaacaccacgtgttctcactcataggtgggaattgaacaatgagaacacttggacaaaggaaggggaacatcacacaccagtgcctgtcatggggtggggggaggtgggagggatagcattaggagatatacctaatgtaaatgacaagttaatgggtgcagcacaccaacatggcacatgtatacacatgtaacaaacctgcacattgtgcatatgtaccctagaacttaaagtataataataaaaaaaaagaattgaccaaacaacagtataagtttgaagaggaatgttttattagataggaggaacgctgcagcagagtgcagcttcagtaagagaggactgagtgtgcccagttggatcttccgtaggggtatttgtggacttaacgcaggagctgaagggtgatttggaccatattartcacattggtcatgagaaatgattaacatttgtggatgwtttggtgcctttatgtcggcaaaggttgtacaatgggtttcgacatgcttgcattccagaaatgtatagaaattctagaagtctaattacttctgaattcctcagataaggagttttgcctctagatgacctgcttgrtggccaccaggtgatctttgctctcatcgagaacaagtgtaggtccccttttctttctgccttcatcacagtccctccagcattgcaaggggcctcatgcacgtgcactggggccattgatacacacatcaaagccccaggaatcctttgaacactcctcgggccttggagcctacacaccaatgatgcaatctggtcccctcctccasagatctgatctgggcagagttaggtcagagaattctggcatcccaggtactcagtgcatggtctakgaaaggtgtggatgccatatacagacacctgggccctcctcaccttctgtgaaagtgatgtgtgtgaaagagagcaagagaagatcctctaaagtacagtgcctggctggggaagagtctcacgcctacaatttttggaactgtcttaaaggcaatgctctttcctttagatwttattcctagtgtatttagcattgaatattatttttgtagttggcttgtgtatgctttcagctacamgtraccaaaaacttgaacttatacccaaaaaggtkaaataacacataacaagaaaacctgatgcagggtggtcccgtggtgcattaattcagaggcttggtgacttcatccttggggtgtgttcccctcagtcattcttgaagtgagttgrttttgtcctcagataaggagttttrcctccagatgatctgcttgtggccaccaggtgatctttactctcctcaagaaccagtgtaggtcaagaaccagtcatcatgcccagatgtgacaacatgcactgaaagaaaaggagatggtttctcccatgcgtgtctttttattggcaagaaaaatcttttaatgaagttcttcaacagaattcatctcacctatagctggatgtgatggcacatgcctgtaatcccagctacttgggaggctgaggcaggaagattgcttgagcccaggaatttgagtttagcctgctcaacatagtgagacctcatctctaaataaataaatgtacatgtcattagccagaaatgtcaaatgaccacctaaactaagggagatggggaccacgatgattagtttacatgttttatgcatgtcatgtgagaagagggttgggtaccagagtagaaaaagaggagaatggactgtggacaggcactcagttgtgtttttcacagtaaataaagctagaaagttactgcccttccctgacaatgccaaattcttagtcttgtgcaaatcttagctctcagtgactgcatctagttgggaccctcttttcaacattcccactctccttcctggagctcacccgcacccactccctggagtaccctacttcccgcccttctggtgagctgcactgtgccagtgcctggcttgctttttctgaagtcagcaattcacactgaacactaataaaagatttttccagaaaatagcttgttgccttaggcattcagacaatatttctcttcactcctggagtgtctcttcctccatgtctctattattaggtacaggcccacttccagcccccacttgaaggccctagcagttgcaccagtccacagcctcttctctagggcccctccctgaaccttgactgtgaatttcttgtttactttttacaatagcgttgcagacattaagtacctatctttctgtctctcacataatagacactcaacaagatgtgctctggttgttttctcctaagtgcccaagtkgtggggagcctcttctacacctaaaatgaactagacaattaacaattttcctagtaaactccattcaaccaagtttatgggggatagtctttacaagcttacaaagtagcctgtaaaggcctgaaagcaattaatcaatatccactgatctaaacatacttttcatgttttcttccttctatccatgaaatatcggcttccctgaatgtctgaggcccaaacctttgacgtgggtcaatgtgaaggaaaagatgagtgtgaagaggatattttcaagataaaaaaggaaaaacttggggctagcgggattaaaacctgtactgacatctcaaagaagaaaataaagctcacctctggcctccaccagttttctccacaagctaatgagatgatgattaagagtgtggggaaaaagagcaatgaaatgtccttgtttcccccagatgaaaatctaggcaggattgtgtgttcattagccacataaattgctatttmaagtgaacaaactcagacttcacaagcatagattctgtttggactcatatcattacctttcctaatgaaatgcttccygttgttgccttcatacagaaaattaactctaaataatattaaaactcttaattcaatatagattccactaattgatcctttagaagtaaatctacccagggaaaataagactattttaaaytatttaccataaattgtgttgaatcttttgagtgtttcagttcagaggatttctacataattctaacaatatatggtaragttttcgaagcctagatacatattttaatgtcattgtttcaaatgggtaccccaattgatggtttacaagttctgatgtgctggaccactggcaagtctccactttacttttactccactttacagggtaaaattgtaamwctctaataaaacaaaatatgtagtaatctatagaaattgtgctttaactgcactcctaataacaggctttattcttttttcatgaaaaggartaattttagatgctaaaatgctgaataatagaacatatttataggtatattgaacaaaccctcttaggaaagaaggaatctaggtgagccctgcttcaaaggaaaaaaaatatcaatatatattgatatgtatgtcaataaatattctcattatgaaaaaaagaaaagcgttgttttgactattcctgtgtaaccaagtatgacaaaacctaatgatataaaaatgatattttgcttgcagttttgtggcttagggatttgggaaaagtctggcagggcagtttgtctcaaatccacatggcgtttgctgaggtgactagagctggaaaatctccttctaaaatggtttcttgacccacgtatctggtccctgggttgggatggctggaacacctgggagctggtcacatactgttcaggcagctctctttccatgtggcctccatgtgtggttagctagagcttccttacagcatggtggtcttagggttgtctgatttcttacatggtgtctggagcacgtttttaaagatggaaagtagaagctgcctgatgctcaaggcctaagcttagggattggaaaaacatcatttctgctgtatccgactrggtaagcaagttactaggcctgcagagattcgaggggaagggaattaaactctaactcttaatgtgttatcatttttttctagcacaggagtgaataaacattatgaaaagatttgtcattttacaaaataattcattccagtttttctcaatataataaacacaccaaagacacttagaatattatattatttaaaagtgactactcacacctaacttactagaaacacgttcaatgctcagaggaaagtacaaatgctcacatccctcctttagtcagtagctgcagcttacgcaattaagactagyattcctattttgcaaagctatttaaaacctggcaataattaggtatttactattgccagtctgacttcaacctctaaaggtcttccaaaaatcttctctgccaagaaatgactgcctcagaatgagatcctgaatatcaaaaggtttactctaagatttaattcagccagaccaatgttgggaatctgaaaggggctgttgtttgtcacattaattacrtgcttgtcgggtagatctcagtgggaagaaattttgtacttgggaatttccaagacaacctaaaactgttgtttctcatactgattttactatttctttacagagaggtcagccgcctgcaaatctttgagcattcagtccttctcaagctttctccacgctatgcgggatggcagaccccagggctggggagtgcagatggagagtcagccctgccaaggcagatggccgacctcagaagcccagatctatctgtatcgatatgtttctgaagggccagtttttgtatctcagtacacactgtctggagctcacagtactcgctgtgctcataatggctctctttgcctaagcgtcctagcaacatatcaactaagcaaatagaaacagacaggagcaagtggagtttatctaaacctgcaggagggcagagaggattcacagccatatagaggctatcctcaatgtckgcggaggctggtgtttaatcagcagcatgaatccagccataaattataaaataaactcctcattcttttataccattgaccacacagaagctatgcagtttctrcagttttatgtagacttctacagaccagttggttttcaaattggcccagttaaacttctctgttcctcctcttacaatgtagtacataaaatcctttcacatccctgtttgcataatttcttttggaattattgaaagatagcatttacctatctaaatgaatagaccattgaatcttgcaagagccaagttacttgttcaagattctactaccaattgtggaagagaacaagttctggcagggaggtstctgatttctagagcagctctccctttctcttcagaccacattagactattgrcagtccacagttggtggccactccaaaatgtgaataggaatttaagccataaagcctgcatcctaaaatcatatgatcttagctcataactggggagaattttgacatgtaaatttggttttcatcaaactaatttgtatttgaaaagagttaggacatgaggatgagagaaagggaatccactaaaatgggaagcccctttttccttggaaacaaaaagaagggaagagagggaggtgatgtaaacatatcagaaaactcccaaagtctcaactktataatattcataatggaagtcatcgaccttaaggatataaagaattattatatgctattaaggacaacctgatacagaatacttataaagaggagcacctagcaatgtactatttgctatgtcccaggcaccaaggtgagagcattataaatattgttgtgttatgcactcaaaacatgtagagattattattaaacacatcattttatttaatcttcacagtgaccctgtgaagtaggtacttgtattactcccatttccagaaaaaaacaattcaccttagattaaaatgaggtgcccacagcccacagtgatcaagtggtagagctacaactcaaagttttcaccactctacaaaattgtccttaatcaccacagctaaaaagcacagaaaaggtaaaaatctctggattcatattccagttctgacattcactaactggaaccttgtgcatgtgaaaaaagattctgagcctgccttcaccatcagaaaatgaaagtcatttactgggaaaattaaatgaaatatttaagtgtcaatagaatgcccaactcatagtaggtactaaataaatacttacctgataaaaagaaaattgcaagatctttcaagtatcttaytcctgaaacattgtggttagataattataagttaaaaaaattgtttcattcaaacaaataatttgataaacaataattgactaataaaaagctagtctgcagaaaatttttttaaataatttattcctgcaacttttaaaacctagagactgattatatatggcttatggatatgccaaacgtatcttgtgtatacacacacacacacacacacacacacgaaagagagaagaggtgagaasaaaaagcacatgtaatgagaaggtactcaagacctcattcccagattacatggctcasaagcatccctgggtaggatgagaagttagtccatcgaactccaaatccgtgttccttttgttatatcatgctatttcctgtaggaagaaattgactaagaaaatcttgcattgaggtggattttatgtatccatattctctcatgacaaccaataagcaggaatttttggtgtactagcacccaagacagcactaattttgaaattattttaatatattgataaaggcatttttttactattattgtccaattccacatcccacttttctaaaaaatcttgcattaaaatagctaaacatggcaatagtggtgacctgggttttaggtctgrccctgcaaatcaactagcactataacctagttaccctgtctgtaaaggaagcatttgaagcatttcaagctccttcctctcttaaatccctatgaaatgaacagaaccaaaaccctaccaccttccactttttctagttaactcggaagtatagaagcactacagattctcattatccaaaaatattgcgagttttttttcctttaaaatctaggtgaaacaaaaacgatattaaaaaattcatggcagttagcattatattatctggtggttatgctcttcctcccttttttaataagtagcatgtgcacagtaattttcattgtcatgattctatgccttcttcatagtgcattttgccaaagaaacatcagacataaatgaacattctcaggtatcctagcaacaggatgtgattaataatacctctcagagcaaggcagataaaatgcctgaaagtgaacgcaaactcagaattggctactgagaaattggtagtgcggtgaggcaagtttcataagataccacaacagactttattataaaaagatggaagcaagtagaagagagaacatattttagagaggagactatagttgagcatgaaaatatagtatatatgtgtgtgtgtacatatatatatacctacatatatatagtgtacatataaatgtgtataaacatacatgtgtgtgcatgtgcacgcacacacacacacatatacaatttccttctcctgagaagtgacatgagatactgagttatgatacagatgcccatactcattattggtgagacagcatcaaattgccatttatgtgcctgtggttttaaaagatcagaaacaatcactgtgattaagagactacttccatactgaagtactgaaatgtactgtaaattgacatatatgtaatrtttctccatgaaacaatatccacaacctcaagtctaaaatagcttttaaaaatattgagactcagtttacatagataaatagtcatgagatgcggaactttagtgttcaattaaataaattttctcatataaggaaaaagttttatcttacaaattcaatttttatgaggttatggtccatttttattcatcgcaagtggagtgctgcatccaggtttaagcagaartaagatgcaaaccatattttaatgttttgtttttaaactagaatctgtgataaaataaagcacaactaggacagaatgtgtgttcattattctgaaagcctttctattattttatcacccacttttctaatataatagttttcttggttgtcagttgtaatatacatacctgctaaaagctctattcttggktgtactttcactgcattttagcagtactaaaattgacttcatgttctccagcatttcagagtgagttggagcatttgtgtttaaggcacggtgctagacatcaggagagagaacgatatgggactctcgacttgtcctgaaggaagccaccatccagtcaggaaaacaaacacacaactaattgtgaaccaaaataagaattagtgctatggcaaaggagtaaatgaaaggttacagaagcacagaagaagggtgcttcactctgcagggcatggagagtttggggagctggcacaaaagaaaagacttcacagaggactggcagctgagctgagctctaaaagctgaatagggttttgataggcaggagccgtgtgacaggacattctaggaagcagaaacagcatgaatggggaactggggtgaaggtgtaattcctggtgtaatggctaactcctctctgtgatgcttgaggagtgacagcagaaggaaagttatggccaaattgtccaaggtcataaattttatattaagaaatgtagagtttgctgtttaggagtgattggattacaatgacagaaaaaaccaacaaacaagttaggagcccatagaaaatagataaccccaggaacagatataaagttcatgaactagggtgatggcagtgagaaaggagaagatatgtctcaaagtcctgatggaggggaatgtattggactgagggacagattagatgggaagaaggagcaaaagaaagaagacggtggttcctaggttttatgtttgggtgcctgagcagacaccaaggatgagcagttttgtaggggactataattattgcttttttttttttaatgaaatcttctccttctccttctccttctccttctccttctccttctccttctccttctccttctccttctccttcttcttcttcttcttcttcttcttcttcttcttcttcttcctcttcctcctcttcttgttcttcttcttcttcttcttcttcttcttcttcttcttcttcttcttcttcttcttcttcttcttcttcctcttcttcctcctcctcttcttcttcttcttttcttcttcttctttactttaagttctgggatacatgtgctgaacatgcaggtttgttacataggaatacctgtgccatgatggtttgctgcacctatcaacctgtcatctaggttttaagccctgcatgcactaggtatttgacataatgctctcccttccctttcccctcacccccaacagggtccagtgtgtgatgttcccctccctgtgtccttgtgttctcattgttcaactcccactggtgagtaagaatatgaggtgtatggttttctgttcctgtgttagttcgctgaggacgatggtttctagcttcatccatgtccctgcaaaggacatgaactcattcttttttatggctgcatagtattccatggtgtatatgtgccacattaagctcatcatcactggtcattagagaaaytgggactataattatttaagttaaaaacatgtgttgaagtgcagtggaggacacaagtagagatttccaagaggctttaaaacctaagtagattttggagctagagatgtagtgtcacagttgtctctttgggggaaagtgaacattgagagaatgagagataagatcacctattcagactgagataaagatactaaagaaggaagcctagagggtcgtctccatctaaacagttcaatctctgtgtccatggatcaatatagtactgtcctaccatgtaatttttatttttctaatttgatgttttgtgtgtatgtgtgtgcatgtataaatatatatacacacatatatacatatatayacacacatatatacatatatacacmtatatatacacatatatatatacacacacacctatatatacacacatacatatatataactaagaaatctaagtagattcctgtaacaggactaattcatgataaaactaataggtggaatttatatagcactctacaatttacaaagccctttcatataacataggggctgagaattgttcgaggtcttcataaaaaaaattatttgaggtattcataaaaaaaagttgcacctttcagcctcccttctgaaacatgagatgccaatatttcatgtgaattttgtccatttcttgctagctttaccatatggaattgtttcatcctcatagcattccagagaagcagaccctgatccccactttaaaaataagaaaatcagggagactgattgatatgcctgcaattagcattactgtaggtatagtatattaaatgataaattattacagacttttgaaacatatatttaacacttatctcaggatttagcagctaaaaacaacaataaacttatcagctcacatggtttctgtaggggactctggaatagccaactggatggttctggttttggctttctcaarattacagtcaacatgttgcccagagctgctgtcagctgaaggcttgactggggctggtaaatggattgctcatrtgcctagcaagttggtgggggctgctggcaggcctttgttcctcattggcagttgacaggaggcctcagttccatgccacatggacctctccataggcctgcttgagtgtcctcacaacatattatccggcatcccccagagggagtgatccaaaagaaaggaatattgaagccatagttttttgtctttgttttttgagatggggtcctgctttgttgttcaggmtagagtgctgtggtgcagtcatagttcatggtaacctcaaactccttggtttaagtgatcctcctgcctcagcctcccaactaattagggaggtgacagatgtgtgccaccatgcctggctaatctttaaaaamacaatttagagatggtggtctcattttgttgcacaggctggtctgaaactgctggcctcaagtgatcctcctgcctcagcctcccaaagcatagggattacaagcatgagccaccacacccaaactggaagccacaattttcttaaggatcaacctcaaaatcacactatattattcccacaaaatccttgattacacagtcaatctaattcagtgggattacacagsacgtgaatatcaaaagaagagaagatgggaatcatttgggayaccttgatcactacaccatattatttatctcaaatacatacacttccaactttcagaattagtgacttattctaatataggttaaagacactccaaaaagttgtttttgtttacatattttacaattcaagccttgaataccattttttaaaatttatgaaaatgtccgaggcctctagtattcataagtgaataatccaacagtaagcagtggcttgcccagtggaaaacttaaatgagaaggtaccctgtcacacttcrtaatgaatgaggcctttaaatggattattcatgctatttatctgttggaatcattgaaataaattgcatcaaacaagtcctctggaaatcacccaaatgaatataacatgccattaatcaaggtgccagttaaatgaattctacacttttggcagcgacataagggaagattgtacattttccaccttatatgttaggattttaaaagactcgaagggctgttagaaaagcttggataaagtttacatgtagcttcaacrtgtggcctaacttctcagtaactagctccagctgtggaatgttgatagatgacaaaaaaaagtgacagctggaaggatggtcttcacttatcccaaaccacggtcctcacctccaccgtggtgttcatacacaccattgcccaggtacacagtttcttacctaagtctataagcatgcttaggatttccataacttagcaaaaacctttagttggcttctagtcaagctattaccccatttcacttattcaactcatttggaggctgccaaagttgataaacaagaagccatgtcctcagctccactttctcatcacacacttacttcccaaaccctcgcagtctctcttgtgttctctgcccactctctgctaaaactactctctcacaatctagcaacaatcatgtgaactcagcaagcagtagcaacatgctgttgaaaacccccatacttctaaaacttgatttgtggtaccggagcctgcactttgttgaggtccccagatctcagctgcttctgacttcccgtgggcctacatcacaaaacaaaagcagcagtcatgttatcttagttattgtcctccacccactcctctgtgctgtctgcctttatgccccattcactccttcagcttcagccatcttatgatgaacatttcttgcatctgtaatttcaactcagatttttttgaatttattgagacttgctttatgactgagcacgtggtcagtcttagagaatgttctgtgcacagatgagaagaatgtgcattctgtggttgctggatggactattcagtagatgtctgttaggtccatttggtcaaaagttcatttaagtccacagttgcttggttagttttctgcctcgatgatttgtctgatgctgtcagtgcctgttgaagtcccccaccattattgtatggctatatctcttttcttagatctagtagtatttgttttataagcctggatgctccaatgtcagatgcgtatatattaggatagttaaattttctgacctcttacaagctccttgtccccatagtacttcaaagtcagtaggtctracactgaacttgttattcccagcctcatcacattctataataccatttccccaacttgcatctctatacccaaagtcacctagctaaccactcatcttgacttcttctccttcctggcaactcacattttataaatcactgggccctattatttcggcctccccccggtctcttgcatccactacttccctcctctccactcccactgccatgactcagtccaccctttcattgccttgtgtctaacctctaggatagtcctcctcctatgcactgctgtaagtgtgcaagttcttcttgcgcaaataccctgtccatttagcccatactgtttcctttgccaagagtcagtcatttctctatttcaaatttctcaaatcccatttgtatctcaaggtcaaaatcaaataccactttctccataacttcatgagcaccccctcctttcttaaaataactgtttcatcatctcatatctttaaacattctacactatttgaggcacatctcacttcatattatattgtctgtcctttctattttttcaagtgggttgtaagagggcatagtcttatttagctgttttccccataatggtttctatggggatttgccctttgtaagtttattgttgagtaaacgactctggctaacaagattttaaaaatccaacagcacawttaatgcatagttatttattttttactttcataaattggtttgtaagcagttcttatgcctgtcagctgagcccagtcatctctaggagcacactggacatggctgaagtagaggttgtgtttggaaattgctgtaaactgggctttcatcttattttcatcatattctcatgactccatgctgtaacttatcttccacttctcatttcagggagagtggagaagagaagagaacamaaagtaacttcaggtaagattttgtccaatgggctccagctttatttcctgattttatttccacctttaaattttttaaaatttattattcaaaaattcacactaaaattaatagtttatggtttttgaactgatcratattaatttaattaaaataaattcatacatttagctttctcactttcacatcagttatgcccttttcatccaatcattacattcaaaagaaaatgagatgggaatgtkgcttaattttttcatgattatctatttaaaggtaagtcttgcraccaacagtattaaaatacasacattgtgatgtgatagttgacaaccagtttactttcccaaatgactatgaatctcaattttatttcttaaaaccgtatatgtagtggatgcttttcaggacagtgttaactgagaagcatctttatattttggaggaattttaagaatgccttcacttctaaattcatatggattcagaagtgaatcatgctttggcagaatgccattgcacatagtaggggtcagtatttgctaactaatacaaaattaagtttttacattttcatatttccatgacttgccttttagcttaaagttgtgaggtaagatagattttcatttaccaagtcgatctttgcataggagcagtgttgcagctcacagtgcccagaaattgccaacaatcatakagaacgctaatttggcatgtgtacctatgcccgccatccttcccaagtttctaccaacccactactcctgtgataagcaagagctaccaatcactcccatccactagcttcttttagctttcatttcctgtctggtaataagatattatgtgtgtttccaaagagtcagcatagtcaatagaagacaaagatccatcttaatctaaaagtgtataaacagcataagcttctgtctcttttgtcctttccaatcttagcattcatttcagataagtgggcaacttaatacctgcatgaatttcctgttaaatattattgtttgcattctctgggaaccttttaaagcctgatcatgaacacacacacacacacacacacacacacacacacacaattatgaaggcaagaaagtgtctgagtccctcacaggtatgattaccttcattattgctccttgggggagaaattatttctaaataatttctaaattgcttctaaatgctatttccataatgctgtrtgtactaccttcttagttaaagaaaatgcacagtttggaagaaagctaagttggccaaagtgttaagtctgatgcctcattaggttccctcaatagtcatggcttctgaaattatttgtgatcaaggtgacaccaaggttagagacagaggcaggacaaggactcaggcatctccactccctaccctttcctgcacccccaccatgctaacgtttcttttcaaaacaaagtgctaatcactttaatgctttgttcagttacttgcttaataaaacacttttcaacaaatggaaaatctttaaggcaacagcatctttgatagggaacacaggtcacyagggctatgagaaaaatccctttactagtggaatttttactaatttgccctatctgatytgtagcttgtcaattgcctgatttctatgagagggtgaggttaaggataactaatggatagagcccatattctakgggaatgttagggggctcctaatcatttcaaatgacaacaaatcaygccatcaggaaatctaaatttgtaacaatagtctgagttttcaagattggaacatactgtttgccactatagtcataaatactacaatcagtctgtggtactggcctgaatgtagacttctttagataaagtgtgtggctaagataccaaaaacatcatgggaactcctatttctgacttcctgcttggaattttttacatcttagttcattttcctcaggttctatgtcctgcctccccagttactatataccctgcaccctcttgtttacagctgagtttatctcctggctaagaaagaccaatattaggttctggaccatttcaatctaccctatcctattgcactaaatgtataataattgaaacaaaaaaattagaaaatattttagacagaatattcctattaaaactgggacctaccaagaccctcattttttggttggttaaggttaattctttgtttaaagagtcttgcactaagatgaaagctacacagaagtaactttttattcagggtaagaaataacttcctaacaaggaaacgtctctagcattggaaagaatgagattatgtttgtaaacatgtgcaggggttgggcaccccctaaaagaatgttgacaagagattcataaagagtttggttaaatcattgccaacgttttttctaattttgtgtctatgattctattgccattttcacttaattgaaatggctctactatgtataatggtggtcaacaaaacttaagtggctttcatttcattatataactgagtgaatcatgttccaaagattacactaatttagtttcgactgagtttctcagtaaagcgtctagctgatggtgccaggactatggaataaaactgtcctgtagtctatttagtgacttctatttagagtccgtctacactgattgcagtccgggctattgattcatgtgtgaygctatttttcataagccagaaataacttcacaagagagtatgtatcacttggtatcattcattgtcatttttgaaaacccattcaaattatatcctccttgasactaagcttgaaagtctatgtcatagtcatagaatatggttagaaacatcaaaactaaatttggcgatttggcttggtaaagaatattataaaatatatggtgatataatgataagtggatacatatgaggaggcaaatacctgatgtcatcaattttctattttcccttgattctctttaccgggaaaatttttaaaaagatcagctatttcatagattttatgtaaaaacttcattgtttgaagtacctttatctcatcagaagaaagacctctttgtgggccatggaattctcgatattagaaagcaacacagcataaagtgcaaagaggaattcttgtgaagaaaagtggattataaattattgtttagaaaaaggtatgttaggatgcttactaacataaactaggggaacaccatctgttaaatctatattccaacatttccaaaaagaagaactctttcaaattcagttaagtataatggaaagaatagccctagtggaccagagaatggagaaatcaattgcgtacttttcatttattacattagagcatccctaaagttagaaatggtttgttcatttacatcatttgcaaaaagctacccacagagaggaacaatggtttttttttttttttctcaactcaaaaggtgaaattcattattggaaatttagcaaatgtagaacatctgctttgcaaactcagtcccttgcggcttactttttgactgagtgtgttgatgcttggaaatgttctacaacagcaatggcacctccattttaaaactttttaacacacgttgaacatgcagtcattcaggataaaaaaaatagttaagtagatactgaataaaatcttccatctgtgcatgaataacatgttcattttattatatgtcacatttattgaatgcaaataatatttagcacatttagcatgatttttctctaggctatttctatttttatagtgtttttgacatagttcctatacactatcaaaaaaaaacttaaaaatcaagagtgagaaagacctattttgtcatagttttaattattggtgaccaacattaaacatatgaagttagcaggtagaagacattgtgacaaatacatttaagcaaactattatccttgaaaagcccattattttggacattggtattttgcaatatctacatgtttcattctcactttgagaatcattattccagttagaatcaagcttaaaatgcttatcatcctaacttgttcgtagcttataaaagctattttcttgacagcacttcaggcaccacaaaaggggcagagaaggaatctgaggtatttataagttggtactttcaatttgataaatattttaatggtccaggacttgttcttaacatcagagatgcaaaggtgaataagatgtgggataaatacccttaattcactcacattcagttcagggagaaaagcaagtacacatgattacaacatggtgtgaagagtgccttttagagaatgatgtacaaggtatcatgaggaatttcagggagggcttcctggaagaggcgagacttgagtcagtccttgaagaaagaattggagtagtttaccaggttaaaataaagggggggggaagggctcgctgtccaaaggagtgtgtttatgcaaactaaacaaatctgaaacacctaatagttaatgaaagagacattgccagagagatgaaggtagtgggaaaaggcatggcctattgagggaaagcttagtgatttaataagcctggaacagagtcataaacaagaggtgggagatgtggccaaaatgtaggcacacactagaatcaacaaggaccatctatgccgttccatggagtttggacttcatgcagtaagtgctgaaagctaatgaagtacaaggaattacagaatccatctgcattttctaaaaatctctccaggagagagatttctaaaaacctcagcggaagtatggattggaagagaaattgacgggaggcaaggaaatcaggaagcatatcattttaattacccaagaataacaggatgaaggtctgaggtgtctttactaagacagtgacattagagaggaagccaagaaaatggaatccagatacatttacaagatcaaactgacctggttggatatggaaggtacgggaggataactcttaggtttcccaccttagagaagagatgtatactgcaacctgtgtagggaatacggggagagagacaagtttggtggagaaaataataaattaagtcgtatctatgttgattataatgtggcatgtgtgatatggggacagaattttgtcaagaatgtcaaataagtggtaggttatgggcaatagagcctagaacttcagagagatgcagatttgccttttaagtaattggttcctggataagagttgaagccctggatatgaatgagctccaaaggcagtcaggagtgagaaaagagacaaggcaaggctgaatccttagaacatccccaacattaacaaagaacacagtaagataactcagagaccgagaccctaggaaagataaatcaaagctgtcctgtgagaatcaacagcattctctgtctctgaatccaagaaagacagaaagttaaaaggagggactggtcaaacctgtccagtgccacagagtgagcaagtaaaataagcactgaaaacatctattggagttgcagggagatatctactcatcaccacagagaaattatgctggaggaattctgtaagtgaaaaccaagtgacaaggggttggggagcaaatataagacaaatgcagacttgttctttcaaggaatatgtgaaaggaaggagagtgagaaggaagaagatataaaagagagagagagggagggagggagagagagagagagatagagagagaagagcttaatccttaggccattaagttggggaactgatgtttattgaaccactattttcaggctctgcgcccagtatcttctatttgagcctttaaatgaacatgtaaagtttgtttatggtcaacattttaaaaattggaaagctgagattgggaaggttaaattacttgctttaggccccatttattaactggtggaaccasaaatggaacctakgctgtggcttgctggagccagcttataatatctggaaagctgtctggagaaaactgattgtgctcctctcttcccagctctgcattcagtgaggtcatgcaggtagcttaaaattggccatggtgggagtatttacacatggagattggcaaacactacaaaccagggttcattcagttttaaacattgaccagtgtgcccctggatctaggtctgtgtgatagcaaagcctggtcattttgcactgccctgctatgtgacttggtcaagrtcacttgggttagctagcagatggcagaattgagacttgaacccagacctgtgatccacatctggcttaacacagaccccaaggaattgctgaaaaaagaagcaaaatattttttcctaagatcttatgcccagtggcccaggttggtataaacaaagtctcacatttttccatcctgtagttctgaactaccaattttctgcctcggcctcccaggcaatccatctccagcatgtttgcttttttaagcagctttcctgaagacctggctctctgaactatgttaatgaagtctatttttaaaagcaaccaattttctctgggtttatggtttcggaacaatatttattattgaatgaaatgaagtctcttagatgcgttttcccttcctcaaaatggaagacttacacttgggctgttcattaaaagaagtcctacaggttttatctttaaacaaatttcattttccagccagtcgaatttatgatagagattaaatagcaacacagctgtgccacattatttttaaaataccttaaattttattgtgtaacactgcatttaaaggagtgtgtgtatgcagactagacaaatctgaaatgctaagtagctaatgaaggagaaattgccatgtcacaccacatagtcaaagtacagatatgaacacatctacctgaaattccctccacatatttgatgtttaatttggattgctattatactacaccaaacaggatttatttgctcacagttgagactggaaacatgctttctttaggtggcaggggagaartattatcttcagctgcatcacaataaatttcacagggtgcctccttgtgtaactgaaaaagagaaactttwatctgtgttgactctttcacaaacaacatgtatgtgtttcttttacccagaagaggaagtggagaataatttcatagttggtgttagccaaaaattactttacactttcatcttcaattaaatatggtattacaaacacaaatcacaaataattcccaattgaaatagaaagtaactcaaataaaaatgaatattcaagagctagatgacaaatctcatcaaggcagcatgagacgaarcasgtcttgacaaaattgggctcatgctattaggctcatatgtatgtgttgaatgatcaactaatttatcgtggaagttgtatcaaagggcaacctaggtgtgtgtatctctgtatcagtcaatataataatgacagtaactacactcttatgtgacatgacctgtaattgagcattctaggtaaatgcatattttgactagctgaaagtgtcatttgtataaacaaaggattacaaatgcacacagaaatagaatatcagagatcctcagcctggcttgtgcaaggagtgttaagtcatacctgattttcmcacagggtaaaaaaatgaggtgcttatttctaaccaagaaacagatgcctaacttgttcttttaaatagaaatgaccacmmacattttaatcaactgtaaatgatatacttgtatactgtgcaacttaaaaccttctaaagtgaatgtatgtcacttgagccatgcagtatagaaatcaatcatatacattgtcygattatttaactgaaaatccccagataagagcattcgtaggacaacagagaagccatgaaactctaaggaaacatgaaacacctcaagtccaytcaccccaraagtgaggttatgacttgagtggcagttggaggaattycaagaaaggctaagctttagtgggaaaacagagagacccacaaagggaggtacctgttgtgggggacaccagaaccaggggtccctttcagaagcagctgagtgatctgattaattaattcacactgaggagttacagatgmccatgaattactrcattattgagtgtagctagcatatttaaattttcytagacgtgatccagtatcttggyttccatttggaccatttaaagggtgggatgatccccatgcctttctttgaacatctttccaacattgctttcttctagattagcaatatccaataaaaatacaatgtaagccatatatataaattacattttgagtccttggcaaatgtccgtctaccctagcttaccttcatttccttacacacctttactatggcctagttattagtatgactataaatctctaatacatttcacactgtatagaaacaatctgtacttgtcagtcagatatagtcctttcctcctccaaaaagtccccgaaatgcaattttaccaagccttctctgaaaacgaatagttctctgtttcactgatatccagagacaaacaaaacactacattcaaaacctgactttatttaatgmacttttatcttgttttctctggccatttttcttacctaatctgctagctttcttgccatttaaaaatgtkcatcccaggacatatagawaagcaaatatgaagtacattaaatttaatatttttccttaaccttcatggtaacttgaaatggactatatctttctgcagcaataggagcaatatagctatatgatttttaaaaattatttatttattttttaaaattataaaatacacataaaacttaccattttaaccatgtttatgtgttaaaaatgttcagtggcattaagtacattcacattgttgtgcaactgtccccaccacccattcacagaaatcttttcatcttgcacaactgaaactctgtattccttaaacagtaactccccattcttccatccctctgtccctggcaagcacgatttcactgtctgtctcaataaatttgactactctgggtaatttatataagtagaatcatacaatatttgtggttttgtgactagctaatttcataacatcaaatttcatccatgttgtagtatgtgccagaatttccttcctttttaagactgattcaattgtatgtatatattgcattttatttatccattcatgcaacaatgggcacttgagttgcttccacctcttgactattttgaattatgctgctgtgaacatgggtgtacaaatatatctcttcagaccctgctttccatttttttggtatataccccagaaatagaattgctggatcatgtggtactttacaaggttttaacttaggcagaaagaacaagtaaatttgtaagactctccagatttcatcattatttacttgttggtgtattttttgttgttgctgttgttttttactctgtcgctttcttctggatcagcaatatccaataaaaatacaatgtaagccatatatataaattacattttgaaaagctgcatttcaaaaagcaaaatgcaataggggaaattaatttaatgatatattatttaagccaggatattgaaagtattattgcagcatgctatcaatataagaaattattcattagatgctagaaatgatagataggctgaacatgtgtattataatagaaaatagtagattacatgatgcaatcattgaagaaaaatgtagtctatggaaacaataaagttatggttaatgaaaaaaacactttacactacttcagattttaaagtaacattttaattaattaaaattaaaaattcagtttctgagttgtgctagtcacatagcaagttctcaacagccacatgtggccagcagctaccatagtggacactgcagaactgaagcccttgctggaagttcttttttttttgaaactgagtctagctctatcacccagactggagcatgatctcagctcactgcaaccttcacctcccgagttcaagtgattctcctgcctcagtctcccaagcagctgggattacaggcgcatgccaccacacgcagctaatttttgtatttttagtacagacggggtttcaccatgttggccaggctggtctcaaactcctgacttcaagtgatctgcccacctcagcctcccaaaatgctgggattacaggcatgagccactgcacctggacagaaagttatcttctttatttaacccaatgcaaatgtacaaaatattttttaaagtaagacatgaattcatttttaaaatttacttttctagtgtttatctaaaacataagaaaaaacaattcttgtcattttcataagagagagaataaaaagagagataatcaattttttaaatataaccccatagcagaagtctttaaataacacttcccaacatatgtgtattaggtcctggtttcacattaaagtaccagtaatgtcctattcttggtatcctaattatagttgtaatgtttgaatttcagtgaacttctgaagaagmatttaatatacatacttggcagcaatgctttcttatctgaatggcttgagaattggcagtagtcaaagaccttgagagcttgtaaaaatttaaaaaaaaaaaaacttaactaaatgacctgaaagatggatttaatcatctcttgcttttaaataacgtataatgattagtggcaaaaataagcaaacaggtgtctccaatcagcttgcattgtttstcttttttcttttgttttgcttttgagacagggtctctctctgcactcagttgctcaggctggaatccagtggcagaatcacagctcactgcagcttagacctcttgggctcaggtaatcctcctgcctcagcctcctgagtagcaaggacacacaagcgtgtgccaccacatccagctaaattttttttatttttagtaaagacaaggtctcactatgttgcccaggatggtcttgaactcctgagctccagtgatgctcctgccttggcctccgaaagtgctgagattacaggcgtgagccaccatgcccaggcatttgtttgtcttttcagagaccactgagttgtgcccggtataaacacaataggatctagttcagtgtaagttaggcatcataccctttccactagtaaattatcaaattcattatcgttactcatgagaaaatgtcaaaggaagatttcttttctgggtgaaaagtaacaggtttggctatgaagatggcagatatgagggaccactcagttcatattgctggaaaaaaatgtaaacgccaaggctaagatgtgaccaatttagatttttaaaaacaatttgacttcagaatttgtatgagcaatatactacgtgacacaataatcaatactcattgatgaaggacctctctaaacgacagaaaacaaatgtgcccaataagcatgtagatgttcttcccagcagtggtgtaaggagacttgaagacaaaatttagttcagagctttttcaaccaacaaaaatatagcagctgtttagcaactccccacttcctcctccctgcagcccctgataagttctagagatccactggacagcatcatacctacagttcacaatactgtatcgtacatgtaaaatctgttaaaagggcagttctcatgttgcgttcttaccataaaataaaattttaaaaaaaatagtctctttctatctagcaagagtgattggctcattgcaggtataagcacactaaaaaggtaaccaaaatgtcaaaaatcatgtcgtggcccagtccttggtcccaggcacttagagatttagaatatactggtcttaggcaggtaggaagttttgatgttgcttggctttgcctgaagtgggagaaatatgatcttaagaaatgaagcttttcaacttttcagcatgtttgaaaattatcttaacaaaatgttgggaaacaaaaacaaaacacagcacctgtgcctctgtatttccttctatagaaaccctgtaatgtaattctaggttacgttatttaattctaggttacattgtattcccagaggtctagttggattgccacatcagtttgtgtcttccagacagtttagacaagcaagagatatttgtttctttttttaattgtccatccttctttctttcctgaactggagataaaggagaggtggaagtccagttatcctcagccttgagacttacctatgaagcaggactcttgcttcttccatgtcccatcggaagagctgatgcaccttgctctcttttcaccaacctgaatcatccagtgtctgtattcggtctgcattcataatatcatacgtactgttacactcggaaaaagggtgtgtacttttgaatttggcacatgaatatagatatatatatagcattttatatatttttatttttttccaaattcattgaggtataattgacaaaattatatatatctaaggtgtacaatttgatgttttgatatttgcatacattgttaaataatcaccattatcacactaattaacatatccatcacctcacataattaccttttgcatgtgtgtgtgttgagaacacttatgatctaccctcagcaaattttaaattttacaatacagtgtggttaactatagtcaccatgctctacattggagctctagaacttattcatcttgcataattatatctatgagttcaacaattttagattmtacgtataattgagattatgtagaatttgtctttctgcctctggcttattttactgaacataaagtcctccaagtccatccacgtcatcacaaatggcaggattttcttctttttttgaggctatataatattccattatgtatgcattatatataatgcattatatattatatgtgcacatatataatacatatacatatataaaatgtatatatgtgcacacataaacaatggaatacacacacaaacacacgtctcacattttctttatccatttatctgttggtagacatttagattgtttccatatcctagctattttgaataatgctgcaattatataagaaatgcatacaacttcatagcaaaaaataacaacaaaaaccatgatttaaaaatggacaaagaccctgaataaacactgctcaaaagaatgcatacaaatggccaataggtatatgaaaatatattcaacaccgctaatcatcagggaaatgcaaatcaaaaccacaatgacatattagctcacacttaycagaatggctatcatcaaaaagagaaaagaaaacaagtgttggcaaggatgtggagaaaagggaatcctaatacactgttggtgataatgtaaattagtacatccattgtagaaaaccatatggaaattcctcaaaaaattaaaaatagagctactttatcatccagccatcccatttctgggtatgtagagccaaaagaattgaattcagcatctcaaagagatatattaaactatttttctctaattttaaataacctgcttcagtaggcctgtatttttctattttaagaaaaaaagctttcaactttttccactttcaattttttagttaaaaaagaacacacacattcatcagtctatggtaattatcccatcagaagagataaaattaaattctgaggagttgtagacaggcatcacattagccagaatgggagaggaagacttctctgaggaggaggcatttgagctaaatcctgagtgatatgaaggaamcagccttgagcagatctgagagaagagtgcaaaggccctgaggcagggcaagcttggtgggttgaggaagaagaaagaaagttgacatggctggagcatggtgagcaaaggtgaacgtgtggcagcatgcagcttacatggggccttatagactgtgggaagcagtttggattttattataattgcattgagaaaaaaataaacactggacaattttaagccaggtaatgaaattttttttaagctctctgacacaggtgggattttaggaaaaaagtggagatagggagcccatttaagaaagctgttaaagtaaaccaggagaaaaatgaagtggccgagaccaaggtggtttcagtagaaataatgagatgctgtcagatttaggaaggattttagaagtaaaactgacagcacatgctgatagagtggatgtggaaggatacraaaacagagataaaggatgactccagrtttaagctgagaacaagctggtgaataatactattagctgagatacagcagacacaagaggatccatttggggggctgaggataaaaggagatttctattttatttatcttmaatttgaaatgactgttagctaccaaagcaatgatgcttcttggatatctactgcaattatctaggttagaaacagggaagcagcagtgcggatgggggagtgggtggatttgagaaatgtttgaagaaggaatgaacaggacttggttatckatgacatgtaagtaatggaggaatgcaagaggaattccaaggcccctgatttgagtgastgagtgccacattccctgagaggcggcacaggagccggagcatgtttgraaggraagaggaggacttcatatttagataggctctgttttggtgctcgtggaaaacctgaggccatgtgctctgggcacattcttatttgagctcaggtaagaaatacagttcagaaatttaggagtcaccagtgctaatatagttgtcattagagccaacaaaatgaatgagattrcccasaaaaggcccatakcataaaaaacaaaaagagactttatttcagatcaaaagaaaaagcttgatgtgtgtcatgctggtgagcaaagcaatcttgaaaatgagaaaaagagaagggagggaatgacgcaaacatccttccaaatcagatgcatcattttatcagaagtagctcctcttcagccaggacctgcaactaggaaatattggacataagggcaagtctcacatccaaagagcaaaacctgcaaccacagagcaggatgataaagaactcagaaactgagaygttgatcttgaactgcgtgtatgaaaggggtggggtaaaggacasaccactgtatatccaggtgattatttgggttgggtgattgtctaccasacagttgaggacagcagatgacaaactggaagtaataggtacaaaccacggtgacasgaactgatagcaagggtgctgggctattcaaagaaacctcattctgactccaagattagtgaacactcactgyccaacagctgcctttstggaataatacaaggtctgtgtctgggaggaattctggagattgcttggtgctaatttttaattttacaaatgaattgaataaagccctgggaacacctgctttcaggtaaagtgtgtgatgatagtggaggcattcctgttgtaccctgatactgtktatggagctattttcaaaggatatgaaactaattttaaatatgcctstggtrtgttgcaaagctgtatctacttctggcggaagtcaagtgtaaagggtaagagtgcaggctctcgtttcaaactacccaaactagaatccttgcttgtcccttatgagtcmtatsaccttcacctttctcaccttatatgtaaaatggagataataatctttttatctcatagagttttaataaggattaagtgagataatatctgccaagcccttgcctaatgtmtacctggtggtatgctcacaatacattttagcaatttttttgttgcttttggtaatcacctaatatcacttggctctgtcttttagcagctcaktagaaaccattagtaacaaaccctgaggtgcgttgttctggcacagggtgtgcataaaacaaatgtttgttgagcaagtgacamaagaaggaagaaaagaaggaagagagggaaggasggaggctgtactgttcaaagacctttcttcattatctggcccacattctgaaatgtggaaatgtatcgggtatttttattagtagtattactctttttctgatctatgaaatatgcagtcagcacttttgtcagagtakaggaaagatcaagaaggarggtgtatgtctctgtgtgttttgagcccasagacactgtcaggggtttgctcttgtttctactgctaaactccatctctggacctctaaggcttcacatacggggtgtttctgtgtgccagtcacaggctacagagcacagagacaaagagccttcccttaargagcttgcaaatgmtakagaccagtggcacaaaaggatttttagagcaacagaagctttgatagatcgtgtggtgtaaaggttagaagcacaaactmtatggcccgaccaccaagatttgggtccagcacttggcaaatctgtgacctagacaagttattaacctctctgagccacatttgctcctctaaagtagggacagtgatgatgcatgcgtggtaaggttaagagcasatgagttcatgtatatataaagggcttggcstggcatgstgctcatgcstgtgcygttgccttcctcccaacgagcaatgcctgstgtagttcagaggatggccactctgaaactgagagaagaaaccatcttagatcttgaagaatmtatatgaatttttcaaacagaaggatgagggctgtttcaagcttgggattagaagtggcctattcaggggactttcagaatttgtagagaattctgagttacacagggaagcagagattgtatttaatgcagttatactggatcctgtaacagtgaaaggaaaaagcaaggtttttggagaggagtgtagcataggaaaaacaatttttaaaacaattcattggataaattaagatgaaaatggatgctgaagccagggataccagcttgcagacagttgtaatttgatgtgctaaggaccttggccagaatgctgcagcgctgaaaagctaaaaagaatgattatgagatatakaaagaaaggatcaaaaggtggctggaagcaagtgttggggagaggagatggtggggggatatgtcaaagctgcatgccggaatggcaggaagaagtgtccatataatagacacttgtgcaagttcagaggggtgggtggtttgggkacmaggattacaagtttcattcaagtccagctgcacttgaggcaacaatgggacactgatgtggaagctagaatttgaagaagcagaattgaagttcaggagaggtcaaagcgaagattgcataaatatttggaactgaatcaagtataggtgagagtgaaataattgagagagagaaatagtatggcaagattaaggcaggctaccatgccagccagtaagcccaccatacttgggaaactgttgtgagaattacatgaagtaacacatatgagaacacttatgggatgggggtggggtggactattaaatacaatataaacaggaaaatcttgatgattgcatgataatgaagagcttgtttgtttgtttttgccctatttcctagaatctcaaggctgaagtggacattaaagcattgtataggtgaaggtgagggaatgagggctcagagaagctgaatgaatgggtttcccatgagatcgctgaagaatcaggcctgggatcaggccctccaccccttttcagtgctattctcactttagaggctgcctcttgagctagtcctgtctctcagacactccccgaatatgattcgattttcactctattttacacaaagcrtgctctaaagtgctggattctcctgcacagggggtctggcacatggacaagcacacccggcagccggcagtgcacaggaagctgcctccgcacaggcaaggctttatgcagggcatcctgaaaagaagcacttatttcagacactgatcttgcatctcgccrtcttttaagcttgtgtttccttttaattaactaattttacaatctttaaatcatgaaacaagccatctactcatatactctttacttgtttacycatgttaatcaaataattaatccatggcttgtaatctccttccaaaaagatatttaagctgaattctattttataaaaagaaagttttcaatctcaaccacatcatggcaataattacttttataaccagatcggttaaaaactaaacagctatttttcaaagtccataaaagtgatgacccatgtacaaacattttgaacaatttaacataattttattgaagggatagccatttgagagcttgacctttttatgaattccttgtgaagtcatakaaatctgagtacctttcaaattttcttcttgaaggaaataacttgggaagtgccaaggaaattaacggagaaagcatttaacataaactgaaatcattaatacctaatgggaaaacataatattctattctcaggcattttaaaacagctactacaaaatcctttctaggggactaggaagttcttcaaaactggtgcttaaatagtattacctaaagaaggacttgatggaaatagaacatatgaaacccaaagattakaaaaaggtggatgatgagattcaaattacaatcagcccttcatgtatgtcggtttctgcatccatggataccatcatacgtggatttaaaatatttgggggaaaaaacatggttgygtctgtactcaataactgcagactcttttttcttgtcatttcctaaacaataccatatcacaactatgaacatagcatttatattgtattaggtgttataaatactccagagatgatttaaagtatatgggagaatgtgcataggtgatatgcacatgatatatatcaaggacttgagtattcacagattttggtgtktgcagggtgccccagaaccaatctgccacagataccaagagacaactgtacttcatttgaagtacagttgctatttttggtcacaaatytccttaagctttatcccacccttggttccttggttccccatgggaccaktgcatcatgggttcttctgtgttgttactgtttgctggagagacgcgatgccctttcaagatttcctcaattttagagttagaaaamccagttctattagcaaaatttgtatgctaaamcccttttgttttgamccagtgaggtacaaagtcaagaaatacatgggttaactcaaggaaaacagaatcagagtgctcttcttttgcaagaattgtcttttttctaaaactatttaatcactktgtggtttcttctatcttcttttgctctgttctcctgctgaccaggagaactgtcttgagccccctttctggtctgcagcagcacacccaacccaccacaatcatccctgtcctaacgcataatgggagggagcaaaagaattctagacttggaggccaaattcaggcgtcaaattctagttccaccactagttttgcaatcttgggtaggatacctaaactcatgctcttcctccttgtccttccattttaaacgttttaataattttatcaaagtaatgaattttatcaaatgcatacatagttaragtataaaayacaatagragttacttttactggccaggcacagtggctcgcgcctgtaatcccagcactttgggaggctgagacgggcggatcacgaggtcaggagattgagaccatcctggctaacatggtgaamccacctctgtactaaaaatacaaaaaaagtagccgggcctggtggtgggcgcctgtagtcccagctactcaggaggctgaggcaggagaacggcgtgaamccggaaggcagagcttgccgtgagccgagatcgtgctactgcactccagcctgggcgactgagcgagactccatctcaaaaaaaaaaagaagttacttttactggcctcctaagtgatttgcctgattaagcaactctgtccgttctctcattatatcctatcgactgatgttcacagccacctcagtaccggatgccctctagcccgcctgtaaactcctgatccctcctgtggagatgtrtgtggaccaagcgtcagtggtgtttgtacccasatgtgctgtgccagttttgctagttcatataattattcaatgataattatgtaaaccaatgatatatgggtgtgtagaagagaactgctatttctattaaaatgttttgtaaagactcaataaaattgagttactaaaaataaaaggctatataggccgagcatggtggctcacatctgtaatcccagcactttgggaggctgaggcaggcagatcacaaggtcaagagtttgagactagcctgaccaacatggtgaaaatccatctccactaaaaatacaaaaattagctgggcatggtggcacatgcctgtaatcccagctactcaggaggctgaggcaggagaatcgcttgaacccaggaggcagaggttgcagtgggaggaggttgcagtgagccgagatcgcgccactgcattcctgcttgggcaacagagcaagactctgtctcaaaaaaatacaaaataaaataaaataaaggctatagaattatatgtgagctagatagtggtaaaatattggggaaaaacttaaatctaaaaggattctgctttgtgcctttttcaatctactttaatgaaacagaaactgagaaatatacatgatgattatgggtgtagtttatgtaagaaaatgcagaactggaaatatgtggctatattctatatgcagaaatcctggtagtatttccatgggattcttatgatactaaattagataaggttcacataacgcactcagcagcatgtstgatatttaataagcattcaatccatgttagctgttattgtggttattattcatttaataatggcgcatccaggcgattttaaaagaaaagataaaacaaaaggcaaggtgagmccaaatcwatctttcaaaagaaaatattgggataawcttttaaacccagcaaccaaaggacctaaacttcactgtgattatttttttctttgcatccaaatatctgtgtgtaaaattaagaggatattgatgatcaaatatctacaaagtttagctggaaaaacaaatcctgattcattattgaaaataaagccttggcattccaaatgtaaccctatttcaactttaacaacaaactgccacatagccttaggaagctctctaaccttttcmtatccttgtattctcagttagataaggatgatgacaaacaactaaattaatttatcacatggccagaagaattattttgaattctttgagaaaagtacaccatggttgtatttgtgttctctcacttgagtgtgagctctacctggctcagtgstgtgtgaagctctccamccctcaggataaggatcagtgaaatgctaatttttwaaaaaattaaattttcatcaaagctctagacctattcacttattatgatgtttatgccaagtttcaagaggtaamacatgcttcaccacaaaaaacgatgatcagaataagttatggaatgaaaggcaaagatcctattttatttgattatctaaattaagtcttaattctttttcaatcttctaaacacaatataagaacagatatactggatgtgaggtttaaactcattaattttagtggctctggccaaacccaattaatttctgtttgtgaagcaatccccattgttggggtttcaagttattttcacagttaaccatggaagaatatgcatagctattcagtacatgatcttgtagctagtcagtcagtctatattgattgtatggastgagcccaacatcctacatatttattatgtacaaatatacagaaaaataacaatgatttaaaagatatagttaaagcctttaaagagctatatactatattactattattgagatgtgggagaggatacttttcyttaggagacaattcaaaagataaaaaataaaktgtatttatttccctatcatttaatcgatgcttacagaaatagctctttcagaaatttaggttaattcaatatatatgcataagactaaactaggttcagagaagttaaaaagaggaaccagactggatcatcccagtgttcaataagtttactatagtgggggagaacggcatttatctaactagtatacttccatccatgatgtgtggagggacaaactagaccagggaagaattaccaatacctgagtgtactctcattgtaatgccctaatatcaggtctccagacatccttaagaaattgccagatttgcacaaccttcatatttgagccatcatggagatggaggaaagagcctatcatgtccacattttttaaggaaatgacttgattgttataagtcagatagcttaaaagcaatatttgatgagaacaatctctcatacaatcaataagcaacttaccagaatattgtaggatataaagaagcagattttttgaataaccagtttttccacaccaatttaacttccttccttgattcagtgacagcctgcataaataatgataatatgctakaaataatcaattttgtgtggaggaagattttgttctagtctaaacaatattcttatcactaagccatgatagtgtgaccttaatcatgctaccattacctgggtgaacaggtraatatagagttgcaattacaataaattgggtgggagcaatgcattacatatccaggtccagcccctggggatcagttgtactgaaggacctgtgacttactgatgagctatatgactcataaatacctgcctccaaaatgcagatattactaaatcaagtagaatggscagtaccttacaccaggaagttcataacaagacaattaaaaatgcccttggatatatgctttaaatcattctaaaaacagaatagcatatcattgatgcaagtgtaaactggtattttttggcacaygtgaaatttgctaaaaaataacttaaaagacaagtaccamtaagatttttatctcaattagggttagcaaagcaatattataaatgagtcacactgagactaggtgatttaaatgaggcrggctagcaggacagacaattaatcctaccattgcttaagccacaccatcctttagtactcattcaagttttagtcaacatatgttgaaagatattttttaaaaggcrtgcagagagcaaaacattacctatatatttataaaatacasaatagaatatatattaatatataatatatgtaagtgtattatataatatatatttcattatagttatatattatataaaatatatggtatgacatatagtatatatgttataatatgtkgtattatacatattatatatatacatatatatatataatgtkttaaaggaaagaaatggaaccatgtracccaaaaagccaaaaactaagtagtcatataattacattcttactgctctstaagattgttctcagaaggaactgaggctcttctctccccataggtgactaggccagaagaaatatactatgttacagtaggccaacttcatctggcagaaagatgcccttggtaatcaccatgaaaaatcacccgttcaaggaaaaccttaagatttctttcttatagctgtttactacagaataaactttcattcgttctggataatttaaatatccgtggggttgcttgcctcagagccctcttttttatcctagctttstgttcatttactcttccaagcttcccaaactaaggcatccaatagtgggtcactaataatgccaggagctgtacatggcatctctatctcaatttcacccaaagacatmgagcccragtactcaattttacacaaagattttattaataaatgaaaatattattgtatattagcacattgatctgttatgggatggaatgctgagaatcaaaggaaattgtcttccttgtgatggtcattttccaatgctacccaccccccagtccctggctccatttccctgccataaagagtacaggctcaaagcccaggcttttmtataccaaattttcrtggtaatgccaggtttcmtaataagtgacaccaagcttaatcaggccagaaacacaggggatgacacattttatttcatgmccctctccyttcccatcattttccttgttacaaataaaatatgagaggctttgaggcatctttgtgtagaaagttttataaatgtctttggatgtgatggtaatatatgaatttctttcctcttctttttcaggatggggaccagtgaagtacttgcggcctgtacccagaatcagtgagtaacttcctcataatgtttgaatcttgggtagttatagataagcagagcaacaactagaatatctgaaaacctcagagtgtggcttttaagcacctgttctgctgatgatagccatccctaggaagcactgcctaggtggcatttttggagtgcgtaaagtcttggagggtggggagaaaaagcaagcaaaccacgatccttgtcctcaagggatttacaaaggaaactaaaggctctgaagactgatttcagttatatataggatggtgttttccttatatgaaaaagtttacatatttttctatttttattttaaaagtacttaacactttcctggcacattgcactgtagtctattgtttaaagtgtcttcctctatgaatagagtaamacctcattaattcagatactgctaatacagaattcttgagaatttgatctagactaagctgaaatttagctttgaattttctgcaaggaatggatttgctaagtgaaatggaatatttgtgacccatgtaaaaagaatacattgttttcatggctttggcatacagtggtctttaggcaaaaagattcagctgtaaaataaagattattaagatcatgaagtagatatccccttagactttattggcaggtaatagtattgaaagtaataaaacaatgttgctttcaataaattctgacttccataattcaggmtagatcttcctctcctcctttccaaactaattattctaatctaatgaggtttgctattgtgtaacatgtggatggaagcatttagtaatagaagatgatcaattcctattatcttaaaaatttataaatataaattctaattttgggatgcatatctgtaatgttgatcacctagatgacagtagtatgtttactttacaagaaaaaaatgatatattattccattttctttttcatgatctcacatggcaggtaacatttgttttcatttaaaactcaacatttttgcaaagcaagcaagtcagattcctagggcaatagcaaagatttgaggtgagggaaaaagacaaaatcagaccatgccctcctaggggtatattgaaaaattggaatagtaactgagtcaccatgcatccatttattcctttattcattcaataaacacttagccaagggccatgcttattgcatcaagggatgtagagataaataaaattccctttttgtcttcactttactggtagcccataagttgagacagagatggagacaagtgattttctcatgtgataagcaatgtgttatcccaaaaaacaaagtgctttgggaatgcacagaatacactgttaaatctaacaggaagagttgggagaatattcagtmacagttatcaygcttgaactgattctttaaagaatgaatggaatttctgcaagtagagaaagggaagggcagcatttcaggcagtacaagcaaragcatggagacatcaragcacatgtattgcccaagtaaaacaacgtagacttagagttagttgtatagagctgagggaatgtgggagtagtgtatggtctatacataaaggtatattmccaagaaaagataccctttaagtggtcgaaaacaataattggagtttagagaaagaaagatttgagagtcttttgcataaagagttgaaatgtgaagaaatggaaatgaataagattattcaagggcacaggagagaacttttaggaacacacaatagaatcaayttcttcctgagacaggagaaaaggatgagtggggaaaarctaagatgagtttaaagatggatataaagaaatttgagagagtttatgcctgaaagcttccattttcttgccactatactgtgaacaagcatgggatgtagaatacgaggacacaagttcgaaactcagttcagccacccatgaacaatgcaacatgggtaggtcacataacccctctaaatttccattttaccatctgtgaaatggagataataataacatgcaattcataggtcagagaacttcataacacatgtggaggcattttataaactacaatgcacttggccagaacacatgctgggtgacctcactgagctcttgtttataaaacagggacaagctgggcataggggcatgtgcctatcatcccagctactcaggaggctaaagtagggggattgcttgaggccaagagttcaagattgtagtgtgtgatgattattgtacctgtaagcagccactgcagtccactctgtgcaacacagtgagaccctatctctaaaaaatcaaataaaataaggacaacagcacatagcttacacgggttactgagagcattaaagatatggtatccaccatgtgtgctctatagataggaaccactgggttactgtcttctgtgagtaagagcttatctctggggaaagaggaaaaaattctgcaatggggaagcaagacaagaaagagacatggaaaaatatttttgagcggaattaaaagcccatcctgaaaacatgagtttgcaggtacagccacacctgtgtactctggagcaatcaaaaggaatgagttgatggtctggggttggggtagatcaaagcaggtatactagtggctgagagcaagtgccattgaggggacaattggaaacgttggccagtgcagatctcagaagtttagaggccctgttctccggcctcagcattagtttgacagaatggcgccctttctattcagagtccgcagcctgtgatcctgtgacttgttgttgtcaagtaagtgagtggcttgtgcaaagggctgagcagccagatgcctccaaggttatatgctgtcaccatcagctaacctccagccctgacgctactgctcagatttaggacagtggccagccagacccctgcctgaccctcctaccctctcacctcccacccttgtctcacatcccaactgcagcctattcccagcctcccctttcacttgaactttcattcttccctakcacataaggtagtaaaaaagctgtccacctcctctgaaatagaaaggtraagtttcagctaactattaataaaaaggagccagactgcatgctacctgcccctcacacctttagcaccaagtctaaacctcattccagaatttgctggttgcaacaggcaagattgcacttcctcccacacttggaagtgagttatctcaccatccactaggaaaatgttcagngtcctcttaaaatgtttartgagccttggggaccccaagagagagctgccaagatctatcttgatagttactaaacttacctccgagagagatttgaattgttagagctttcgtcctcaatttgccaaatggcagtaataaaggaaatataggctatatcttgcaygttattgactcctattttaattaatataagacacattcctcatttgggagcatggttgattccctcagtcaatggctattcattaaatatatcaaatgcaaggtgctagctcctagtcaagatctttggagataatgaatrtaaacatctcccatgaataacatttgaaacatctggaaaaacctatccaattggacaaaattccaggcacctgtgaaaagacagctccaaagactcattakgggttgagagaccgagagtattttcttctctcttctcagccttggctcccaaagcccactcttctgtgacttccaacatgaatcacgtgaaattcacttccaagcaccttgcttcctgtacatttctttcggtccactgtggtaacctgctaatgtggagattgccccatggcacattactaccctcaaccccacaggtgggacttccctacacagcatgaaccacactgaagtgcagccctgcctttcccagggtaggaagcaccaagtaatgtgtctcctaatatggtttcagacagggtactctctcccattctacaaatgcacatcagtcctttctccaaggtgctttaatctcctagtgtcatgccagacacccacccccgccagtgccctctacaactcccattttatttctgcctggkttgtacccagttgcctgctcaagaaagcaactcaccactcattaaaaacaaatgcaaagacaagcatctattcattttatttctttgaccctaattacaccctccttatatttcctcctgtaatcaacatgtctcccatttctgggttctttgtgtatgtkctttttcactcttgtktctatcctttacatatctcacagattttagtaatccttggaatatggtcttttagtttatttcccacttagaacacaagactcacatccattcagtggcaaagccaacattagggaaaggtgtacagtggcatgtcattaacatgtttttctctcttttttttttttttttttttttgccatgtagtgaaacagtggtcaatttggaccagttctgtgcgtccttgacggcaagaatataacccagactagcatctccgatttggagatctcgatatagttcaaagcagaatctaaaacttgactcttytgactctgactcctttacgtctmtaggcctccatttacaggaactgaaagaaaatgcttttcctctattttgtaagtggagagtaattcaacatcatttcttagggtcattgaactgagaaatgttccttggaatttcatgaagaatatcttgaggcagggtttatgtaccagcaaaaggatacacatattcaaggataayacctttttacatattgatagcatactctctctcggagtagagggctgcttttgtgccaaactgcagtgccgtgtgattttaaagctagagttaatccttgcaggctactgtgggtccacaaaccggcacttggtgccmtakagctttgcatttggtaggcatgttctcctgggcacgggtcctgaaatggactattgtttacctatactcagtgtctttgccctcatttggcaaagggagggaggtacatcgtattcacaagcactgcagattgcggagatacagttcccaaacataggtcaagactccagcccagcacagggcgtggctcagggtattttctggggcacacattgctagctcctctgcactcagtttctccggagaatgagacaaattgagaagaaggtgctatggtgttagaatcaagggtgtggttgtcacgaaggttagagggtaaagagggccggtacccatctcataagtgtccatatctggcaggcccattctcctgctctctctcctgcttgcctgggggcatgtttcccaccgtcagcctgaacattcttttctgtaaatccaggattaccaaagttggtaggaaaggatagttagagacttttctgcagccttcctaagcttttgtgagaattaagccttacaaatcttataagaattgatgaacatgatgatattttttaaaattcagcataaatcttcagatttgtagcctaacaatctcaactgaaaagcccttatcctgcaggggaaagaaaaagtactgtttgccagccttatctactgtcagaccaagcctcgattttccaacagtttgtaccttctgcacacactggggctgtccttctcacatgtataaaaataaactgtgaagttgttgggtttttttcttttgtagggaaagggctgtatatgattattcttgtatgaaaataattagcaaagaaaaagtggcaccctgcagttaatttagctattctcttaaatattttcctggtaccagaattacatgaacataatattctaataagctgatcagcaagtatttttctccttctcattgaggttcggagtaatctaaagggtcaaggttttcaatctttttctcttgcattaaaatgatstgtcatttccatcatgacaacactcaaaagtcaatttttggggccttgttaaagtgccccatagaataattcagcggtgatggagatggagctcttctcaaagtgtaactactccccttgctggcatagtgtggcaatgacattcatctctgaaattttaatcttgattctggacaaggctttttggttttggtttktgtaattctwtatgtktttgaacttcacaataaattgaggcttaakctaaggaaactggatgcattaatgttgtcatcatacttgataaactaagttgataaatttataaaayacaagaattctaaaaatgtttcacatgcctagaaagtagggaaatattccamacagtgttcagtaatacaattttaaacaaaataatagaatctcttaattttaaaattgatgtataatttrcaataaaatgcccagatcttaagtattctctcaatccagtaagttttgagaattagatacacctgtgtaccasccacccaaaataaggtrttgaatcccacaccctaaatagttttctctttgccctttccagtcaattccaattcaaaacctcatcacctacctccctacccttcttctaccttctctctacctcccaggaaaccacttcttacatatttcaccatagtttagtttggcctattcttggacttaatataaatggaatcacacagcatgtactttgtaaaggcccctttcacatgccgtaataattttgagattgttgcatatatcagwcattcactccttttttattgatgtgtgatattctactgtrtgactacattacaaattacttatccattatcttgtttttgacatttggattgtttctagtttgaggctrttatgaataggactgctatggacatttttgcacagatctgtttgtgaatatgatgttctttgacttatgatggggttatgtcccaagaagcccatcataagtcagaaatatcgttatgttgaaaatgcatttaatatcccaataatttgtgattaaccgtaaattttccagtgtctccttggtttactctcttttttctgagaaatataaagtagaaatagaaatttgagtgttttgaaaattgtcaggcttgaagtactaraaaaactcagtgtgaggtttgaatgtcccatgtatgataatgactttagataatgatctttatatcacaagtgattttatagcattattcactgtctttcagcaaggacttcagttccagggaggcagaacatatgatttstgttctttatcctcacctttgcagtgagaggatgatggcaaattatgaaactctcctaataatattatgtattgcatacagtgattcaatactgtaaatcagtatttaaataaagtctttaatatcataygtgcatactatatctgtcatcatagatgtatacatacacacaactatagaaagagagattgatgtaagtatagatatataaaacatcctcatcacctttattaagataatgtkctaacacaacctagagcttaggaaagctctaacactatttcctttgattagtgtttattgacccatattgtgctaggcgctggatatacagtggtgagcaaacgtccaggtacctgacctccgggagcttactgtstgaggggagagttaatcaagtaaacaaacgtacagtttttgattttgtgagattttctgcagggaagcaacagagtgctataaagacaggaacaggggcctgcctgtgcaggtggcatctaatcacagacttggatcaagggggatccagccatgtaaccagtggagaagagcactctgtgcaggaaaagcagcaaagatgaaatccttaggcaggtaaaagccacgtgttctaggccaaggtaacaggagaggagagaaacgggtagagtgaggtaggaaagaggcggtggtgagcatgctggtyatgctcaggggtgatagcaaggcagactgctctgcctttcagcagcttataagccaagccacactccttacaaaagaagcatgaggtgtatatagccataataagccaaaattaatgcttttgtttagagtgcccaaaaagtaacttacatttataagtggtgactgatagcccatggctgggatgagcagggtcagaattctcaagacaggaggtctgtagaatagtgagacagaaagggggatgctcaccaagtgggtttgaatttaggatccacatcaggtacatgtgcatgcatatactgaagaagtttgtagaaggccacgtgtcacaagattrggctgaagcaaagtcttgaaattatatccaggacttagattgagaccttgcgagggacccaaatctcacagacaccatcaatctgaggcaggtaatatggaytgcagagaaacaagaagcagagaattctactaaaaagggttttaaagaattcatagaaatgatgcagagtgataaaggaaaagaaggcctgaaaccatgtgtggaatcctctaccctttggtcagcctagtctattggagtatagragcccctacrtaaccctctctgtgacttttgaatttttcaagccattatttcctgctattaggaagtatgtacacatatgctagcacgtatccctccacacagagtcgccaggagaggcaggggtctgtgtgactggatgctcccaacaagactgggggcaggcagatggatgagctgggtgcagagttcaaagtcagtgtcccctccttgattccacgccctacactggccaggcagcatttgctttcctcttctcaggtcccttcccctcacactctccgaaggatgcgtagtgcctgcacacacacacacacacacacacacacacacacacaamtgcctctctggtgatcatttaaacttcggaaaataaaaagtatgtttctttacactgaaaaattggagaaatgtgccaggatgtctaatcatggggcatgaaattccaggccgttgagcttgcagcacagccagaatgcaccagctacaagaatatcttagcagaaaactctaggaattttaatacttcttttttgagctttgggatcacattagatatctgcaaatgaccataactaaaacctagttttaggaagaggctcaaatggaaacragtattcatgaagtaaatcattaacttcataggtggagtcaaaagactaaaaatgtagaaatgaatgagtaaggaatgcagggcagagtccttggtgacccccactaaggattgataaagaaataagcaaaaaagagacaatagaaaagagagagaccctaaaagaatgacaaaaactgggaaagcaaaaaaagaagagtatcacagaaataaaggtcaagaaaatgtctagaatgtgttgtgaatagtgtttactacaattgagaaatctaccagatgtaaaccagaaaaattcccccttttctgggggaatgtgtacacagaaaatatttttcaatcaatcactgttcaatttaaatgttttttttcaggaggtggactttatttcttatataaatcctccagtttttgattcgctgctttcaaaatcyagaagtaaatctgtagttaagcttggctgttttctaatggagcagtttgaggggctcttacaatataaaatatatgtttgttgagttagttgcaaaaacattcgttttaacagatctgtaattcttttttttttttttttttttttttttttttttttttttttgagacagagtctcgctctgtcgcccaggctggagtgcagkggsgggatctcggctcactgcaagctccgcctcccgggttcacgccattctcctgcctcagcctcagatctgtaattctttaaaaggttttccattcattgtattagatattttttcatacctcctgaggctaaattcagctagttgatatcaacatggaattggaacataggagcatakaactaatttactcatttgacttttaaattagttttgtgtgtgtgtgtgttaactaaaattgaaatgtttcgattatgagtaatgccaagatgaactggtacactccattgactttaatgaagtgcacatgttcttgtaggcttgtgaatgagggcctggttgcagagttcttgaatcttgttatttaatatttgttgcactcacatattttatttatgataataccacaatcatagctttttaatttcattaatacaattgaacttaaattttatttaccaacttttccaaaggkttgatgttaccaaaggtgtgcccaacctacttttacataaaagaaagagttggcaatcaatttattaaattcaaattagtttacattttctacattaatattatttgaaaggcactgtgtcaagacattaattttcaagaaataaatgatcatctaggaaattctaggtaattagaactttaaaatgaaatttttgattttctgtgacataacaaaatgtgtataataagttaaatacaaaacaacacctgctgctaatatatgcaaaagagagaagcaactagggaaattctcaataatgatattaattgcacagtaccttgagtaaggctctttgctaatttttttaagtcaaggagycctttcttgaattaaatctttagaagttgttagaagagtaaaatatgctcagatactcataagtgtatttgaatttcatgtcatggatcagggcctcgggctcaagctttggctttcttgtttgtttaattatttttcctaattttttcatgccaaatgatcaatcaaattataaaagaatatttaaattaacaactgttcactcaatagtagaaaggtaaataacataataattcatgaatctgccaatgttgtgcgtaaagggctctgaaatggacagtatattcagcgcgtgtaacatgctctgaaaactagctattgctattacatgcacagacttggcaaatattatgcaccacacaagttcatggaatgagaaactatggataccacttcacttgttgctattggatacactgcatgtgtcatgaaagtcattactagttgaatcatataatcctttatttcataaatgacagagtttgagtggccctacccaagctcatacagtaatgaaagaattagatctggaaggcaggactccactgcaccagtttgacagaggtatatgacagaggtgacactgtacrctacaggggtagcctaacattttgcacactgttaggccacagtatgtaaaattagatcctatgtacagtgtattaaattagatataatttaatatccagtttcatagttyacatttgttgacagatggccactagmtataatttttagccgcatgtccaaaactattgaraattaaattgacttataattactgtaccttttgttttattttggactctgaacttggaaatatatcacctggagtagagttmtaagttcactacatcctgtctgtgtgatttgggaaaacttgttctaccttgctgaactgcaggcatttgtcttttttgtttgtttgtttakagtttccatttccatgccaaagtgctctgtaaactgtaaggaactacagttaaccctgggaacaacatgggtttaaactgtatggatccaattatatgtgaattttcctctgcctcgtccacccctgagatagcaagaccaactccttctcttcctctcctcctctacctattcaatgtgaagacaaggatgaagatctttatgagatccacttccacttaatgaatagtgaacatattttctctttcttatgattttcttaaaaatattttcttttctctagcttactttattgcaaaaayacagtatataacatatataacattaaaatatatgttaatcgactacattatcagtaaggcttttagtctacgataggctatcagtagttaaattttgggggagtcaaaagttatactcagatttttgatggcacaggggggttggctcccccctaaaccctrtattgttcaagggtcaacagtacataaattataattaacaaataggaatgtacttatgtatttgtcagtttatggacttgggagcatactagtggcatcagagtctgggcagatgcaygcctcccctttccccagtatcatgtagaaaggcttgcatggaccaaagcacaactagatacatgtgggcctgtgcaccaaaagaggaggagcttgcttccatgttgcaaagggcaaaggcaamggtggtcttgacagtagaaggcaagcaatctaaacttcggatccagtgtgcagggaattgtcaggaatcaccagtggccagcacctgctggccttgtgggaactctcctgaagaggagaaactgggaagcagaagccgtgagtctagctcattgcctggcactctagagagaagcccagctcactcactggtatattccagtctccttgagactgagagtttggaaccttgttaagtaaaataaatagatacaatagacagctgagcaattcaagttcaaaggctccctgaacttatttctatggtcttctcttaaaagatctccccttttcaatttccacccrttctgggtagccactctagtttcctggtgggatttcctcattctagcagccttcattctgctaaccctgacttggcccctcaacaagtgatttactgcatggtgctgctcttgtctgtttttttccccagcctgagaatggctcaaagttttcttcatggggccctggctcttctattctgcctgggcggcatcccttaccttccrctcacggccctgcactcagggcattggtgtgcctgattctatgaactgtttgaagcttgtctgtttacaccaatgagcactctstgctstgttaaaataattcctgcmttcaccaagagaaaatgaaagccacttcagtggtgttttattatakraatttaaataaattaatgcrtatgattataggcttgctattttgtcattcttttttgactttattactacattgtccaggccagacttccatgtcactaattacccaaaaagacccagagataaatcttcctgtggcttcaagtcctccttattgttaatctccatgccagggcttctcaagcttggctgcatatcagaaatcaccaggagcctttacaatatctgaatacctggccccaccccaagagccctggcctcagcagacctgtcactcctcagccactgcctaccagaggctggtggtctgctgagtgtattcaccgccctctctttcctttccccacccatctgcccttgagacagctcatggccataattcctgcaagtgactatagcttctgcagctggtgtcctgagccccttagaaacagtcccgatcaggaaattcccaatcagatatcaagatggggcttcccatcatcccttgagacatttctgctgatgccaaaatacacagtaatgataggtactaattcttgagtacgatgagagatgggaactctctctcgttcaatcctcagatcaactctatatcaatgacattattatcttcatgttgtatatgagaaacccaaggttcagagcagtttcgttcctcatccacagccccacaggaagtagaggaggagttaggatacaagttcgaggctgtagggcagcagacctcacactcctcccattgcacttgccctgtctctgtcctggtggaacatcagatcacttgagttgactgtaagacaacaactgtcttgatttcaccctgacaattacttcaagtcatgtaatattcatgtgtggccaatgacttacagtagacaagaacacagggagaggaggctgtttttttcatatgtcactaaaattgtaatagtctaaaagaaggaagtcraagtgagaaaaaaacatagmccatgagagtgacctcccttaagtccccagggctaaaagttaagaatatgagatctccctttcagctgtcaagtatcattttgtgatcttaaataaatttacttcatatgaaaaaaatacgtatcttcagacatgttataaaggagaatgattctgagtatgatacaattatatttaagtaaagaacctagtagaattagaaatattgcagtctaagacttataagccttcacagaaaactgaggttagagggttagatataagtgaaaacaataaaacaaaagtattacctttttacttttgctggtttaatttagaaactatgccttstggttttacctccaaggctcatgaagtgtgtatttctgatgcaaccccaaataatttaccatggatatgattctaccaaaggtaaaagcagaagaaaagaaagtcataaagtggatgagaggaaggcttcttcacagttcaataatgccaaagaactcagaagctttgtttcagaagatatgttttttatttaaagtgtttgatggtacccttttcaacagagccacagaataataaaagcttatttaatttaattttccacttcattactgcccaaagtacaggaccaagtgaaggaatgccctcacagattgcatgccatgtgtcagaaatgtattaccatacttactggcattacttcacccacctatctataatattttaattctgaactgaaagaagggaaattatactaagacccagatcttagcctgatgatgacttggcaaattccattagtccaaagatctgtgcttattttttttagtaaaggatcatgaacaacgaattcaaattatccagcattcattaagcaataatgagtgcagaacaccattctagaaaaatgagcatgtaaatgcctggcctcctcctaggaaagagttctttgtcatgttcataaaaactctaaggtcattattttacagaatgggctcctcaggacacacacttaaccattgtaggttttgtcatccataaaatagagtgtagtccaggctggaggggagatgaaactgtctctacgatccttttcaacattaaagacttgagattccatgactgaatccgagttacagattgttacaaattgcaacaaaatatttaagcagaatcaacaggaccccctttcctctttaagtccttgatatacagtgcaaaaaccctacctgaactatmgaggtatatttctatatgtgtgagagagaagagcacaggacgagagtgagagcactcgcaagtgattcctttggttttcaattctgagtttcagtatttttgacaaaggaaaggaaaaaaaaaaaacagaacagaacagaaccaaaaaaacaagaacctgctkcaatcctgtctcaagattgaagggccactgaagattcaactctcctgatgatggcrgaagaatggaatgccagtattccagaatacttcytgtgagcccagcactgtggcaggtgctaaaggaataagaaagcaaccgagataggtagggaaaagagatagatacaagaggacagggggagcagttgaatgaacgactgcctcctakcctcgcaaggaactcatttaacactttatgcaatttatttttcctttttccaattaaggattgtcaacttaaagaaacatctgctcaatacacactgtttcaaagccaaaagatatattaagtggtggagaactacaaactagagaaagaactacatttaaattgattggttttaatatagcatgcttaggagggaccaagtataagaggggagataatgcttttcagatttatatgtgatatgctatcatttctaactacttgattgttgttattaatacaaatgcttaaaagtactgcttgaccatgctgaaattacttctttagttaggtcagttctctgaagtaaccattccatatctcccctagtttgaaatttaatctcccaaccccatcttcttctcctcttcagtggatgactttcatgttccagagaagttaatagaaggcacctgctgagatctatctctgatatcttcaccagatctgtatacaccaatatgctttgctctcattgtcttctccttctctcctgttacaagggaggagtggacccacctcctatcagtggtgagtcgtccctcctatgctgtgggtcctgtctctccgtgtcctcccatgaacctccctgatgagwgactcactttctcttctggatctttaacctcttctctactggatgctttctgtcagcatttgcaatgctctgtattctcccccaccaaaaaataaatcagtcagtaaatgatcttcctgaatcctgtatccttttccagatacagctcttttccttagccatgcatttcaraagagttatctataccctttcctgtccccccagaccctattttctccatgttcaccccagtctggctctgtcccagccactccactgatttgcacttgcgaatggttgatctccatgctgttaaattcagaggacactttattgtccatctgacatgacctgtcctaatcttattatcctctccttctagaaaaataggattcccccttccctttctgactgttccttttccatccctttgagttttgttcttctattggaattttactcactggattattcttggcttggccttttgctttttaatctatcctctttccctcctacagtgattrtatctgctcttgtaagccaatgtctcttcttcacttgcttatcttcagaacatgagagccacgtaaccacctgcctattgatatgccattagtgctacctgcctcacccctggccctcttccaaaatcyctcagttcagtaagtgtcacctccttgctactgctggaaacttaggactggacactttccctcttctttagtctgcattttcaattaagggctatctatcaattttacctccaaaacatatattgtgctgtctgtgtctttctctctcagccaccatctctcactgactatggaaacaggagacagccattttattaaatagttgtaattgaaagggatacttaagcasaaaatgtcataaagaggtagcattgtcaactattcatattttagtgaatccacacttcagtgggtttctccaccatggagackttgataccagagtggggattgcgcctgttgaatgtggaattttaggagcttgaagtaagctccacggaatgcccacacacgcatatacacgcacacmcacatgcacgtacacatgctcacatacacacaagggggactggaatacggaaagcataatatgtgctctctcctgctttcatgctgtgtttgatattgccatgacaggatcaccatctctgcccattcaccagtgtctagtttacctgcaccaaggctgttcaaatgacccggctttgctggctttgactcaatctatctcagggagattggacttttctctgcagtttttatgtgacaggttgaaccgaaataacrtctaaaaattgcagcaatcccagaaagactgagaagcaatcacataaatcatttgaatctggaatggtggaggaggcaagcaaatgtagtacaaaaagagctgcaactgcagacgggaaatgggctttagaaacaaacgattgttccagctatctaggacactatgaggataaacaactaatgatctctgacatctcaaccacacttgaaatcaagtgaatggaaattaaataattaaacaggccaaacagcattataataaaaatttatatggcagggaaaactattatakattcagttcatgacccacacattgctggaggttttcagaacaatcaaagtacttatttgtatcaagttcattggaattggtggacttctttctatgaatatagcataccctctccacacccagtgtataaattttagagagctctgaaaatagattcatcattgggcacttgatgctgaccaaataaataaataaataaaattaataaagcctagagcagtggacctcctctcttagggcacagactgagatctatttttctgattacatcagagagaaaattccagtggcataccgatcgttttaacttcatgctaatcagttttccttttaactagctctgtaaaaaggtgatggaagtaagactatggtggtacagggagtgcaagtgagaaaaaacacaaatatttgaagctaaaaattctgaataaagaattagaagtgagtctccttatgcagctatgggaatataaatataatagacctagattctcattcaaaatcagttactagcccagtagtacctaactttgtttccatcccagaagtggctaagaaattcaacatgcttacatcaatattagtggctcagggactgcaagggcagaactgttcaaatcttaagcttctcctgcccctagtggaagaagaaggttcgtagctaggaagagcttccccctcacctccagcagatgttgatgcctcccctggagacttgccccttcccccatggaaaccaattgatataacccctctgtgcctcagtttcctcatcaataaaatgaggaaaatatattccaggatcttttaatgtgtaaaacaatatacaaagagaagttataatatctcctatttgcatgtttaaattcatagacaatttgctaaatatggtacaccagaactggatttgttgaatgttctagttaagctcttgagtactcaggatctaaagagaatctaaaaatagcatcgatttgaagtaaatatcatccccactctatttaaaggtcattgtgactctgcttcaaagtattaagatcggttccaccaaattttaaagagagaagaaaagacccaaggttggcctctataaattattgggctgagcattttaataactatcatttattaagtcctaaatatatgcagagatgctgctaaaagcttgacatgtaatatctcatttaatccctacaataatctttttattattagtagtagtattcccattttacagacataaaactgaggctcaaagaaattacataatatgcccatatcacacgagtcgctaaatcagtatttaagccttaacatttattcttgcagtgtctatgtttcatgctagaattataggaatatcagaagtgatcaggagaaatcataactggaaaagtatagcctgtcattcttcatgtctgtgctgctattttgttgtttcacaaactgaattaaaagaaacgatgtcaggaatctgagtcttcatataacttaacagaggagaagggaatgtgactactcacagtccaaatagtttattttgttaatagtgtaatttggagaggcctgattttattctaagggactgtgaatttttccaattataaattaattcataaagaaaaacagtaatttattatggtgtcctagacstgctcaagaaaccctcctttctgcctaattaaaataaattgatcgaaagttggattgtttgtccctacgacagccacatttgtactacgaaaagggaaaccgttagaacaaaattactgtgaaagagattttgaaattggaccttgtcactagggggcacttagggatataaaatcagcattgccaaaagtactttctgaaataaaacaattagtagcatatgtctttccaagagagggaaaaaatacatttatcgacataaggattcagcacctctcttgatggattattgttaggtgccaaatgggttagagaaaaaggaccattaaaagtgggcacaattttgaagtgagaaatcttatcttttctctgcctctgccttttaccactggaagcacaaatgtgttgttaaggaaagaaatataataataaaaaaaaaaagacagaaaagaaaagcctagcaaaasgcccccgccctgcttgattcttttcaktgctttcktgtggcctctttctctstggccttttccctccttaatcctcgcctgaggaaattctccttccctctgttgctcgcrgtaatttgctcttcctttttacaagcctatctttcattskgttcttcctcccattatgcctggttgtgttcttccactttactgttcttctctgctttcattaggtgtgagactgagttctggttttggtttttatctctgttttgtgagtactttttttttttccagacactcatattcctatttccataagaaatcaataaaatgtgtttccaggctctgttttacctaaacgtgatggtaatagataacatgttatctgaggctagaggagaatagtttctcacactgatcaagtaaatggggagaaaaattggagcaaataacacattcttacattacagtcttttataggaaacaatcaagcagaaaaacatatttcatggtgtatatacaagactaagcccrtagattgaaaagtgaaaagtatagsaaaaaaactcccaaaagcttgttttkgtccatgtgatacccaaaaaccaatttaattcattttcttttccaaatccaccatttcttttggctgtcatgtgcaggtgttgtaaagtacaaaaaaatcaccaagtgctatatgtgaggaatatcagatgtctcagcaacaccttataggagaaatggaagaccttcaattgccctactccttagtgtgagggggaaaaaatctttctatattatacaccctatctgcggaaattaccctgcagttataattaagaaaataattgcaagtacaatttaccaggtccatgcccattatttcatcctgtaaattgaaacaaagaaaacttcgctgcacttcacccagcgacctagtttgtgagctttgggctaacctcccatgagtggtagatctaggtcttcttgaataatgaaatggtggtctgggactgggaatcatgaatatgattccttgttcccctgactcgccatgtggtcatgggaaagtctacacatcatcagtttttctggtaggaaaatgattaggataattattatgcagattactctagagctttgatttcaataagccactcttagcacctcactctgccytcaacctttaaataaacttttcattcacgcaaacaacaaatgttatttccaatgccagttttcacacaattattattttaaaattattttcaggatactgttaacttttttaaatttatgtagygctaggtcaaattataagatttctatctagttagccaacccatgtggttgagttacaatgtacagataaattaattttaatttcagttttttaacttagtaaaagattttcatcttttcacatttctgccattaacatttcctcccacttgaaactactctgctgacctaacttcacaatttatgtgtttattcacacagtcattactttaacattgcataatttcttaacatttttcctaggaagatagaatatttgcttttctgtgaactgtaatccacagatgctcctcatcttattatagggttacatttcattaaactcatcataaattgaggacatcataaattgaaaatgcatttaatacacctaacctacctaacatcatagcttagcctagcctacaaaacacttacattagcctacagttaggcaaaatcatctaacacaaagcctatttcacaattacgtgttgaatatctcatgtaattttttgaataatttactgaagtgaaaaacagaatggttacatgagtactcaaaagtacaatttctgctgaatggatatagcttttgcaccactgtaaaactgaaaaatcataagctgatccatcataagtcaaggacataggtctgtattgcatttctatattgcatttacttcctggtttctaggaatatcaagatgatccatgttggcaaagagctcagtttttgttgcaggaggctacataatgcaataaaggaaatagcaaggctattgtagccttccaagtgagcaatgaattaaaaaaaaaaaaattaaggatggtgcaggcctccaggtaggattctgcagtttgtgcactgcagggtgaatgggggctgaaagctcacttacattgtttctcaagctgtgggtcctggcccastactgaattagcctaaaggaaggagtgactctttctcattcatccacccaaaggatgtgcctttttttttttactttgtcaatcttgagtgggcatttctttaaaaaattgtctttctgcaggggcagcattttgaaattcacaaaatgttctgtatatgcttggccctgagtttagaggttaggttgttatctcataattccactgttccctctgcctttcccccatcttcctggtaaatgtcttctgttccgtgggtgtttctgattctatgccattcctcacctgagtgtgccaatccacaacccatgtttgtgttgacattttacccagtccaaacttctgtcataagtagtcttatctgaaatgagatcctcaataactaagttctgtcctatccctcctgccctcccaccctcccaccatgcattctgaggtctctgaggaagggtgtgcccagcaaacagaatcaggagggcatagtctttttttaataatgcctttactccaagccccatgaagtctctgcaagacaaagttagaggcaggccaactagcctccaacctagttaagccatgaaccttcttttctctcttaactagttccacatccaaatctcagcttgtcttaagagtctaaaagtaaaagcacttctaggaaagcagtaaaaaattgtttgcaaaacaaacttctttatacttttgctaatgcttcacccaaatacattcttggactagatgcagcatctcagccctccttgggcatggaatgtgagcagccgagggtcatgcctcttttccaagggaatagaattatttctcttcctcctcttaatctaccaagtttaatgtccagtcctagagtcagtctggctttttattattcccttagagaagatcagtgcataatctacttatatgcacacacatcatcacctcctacattatgttttgtatcctcctcatttttcaaagaccctgtttataaatctactctccctgtaaagtttttccaattcccctagggagttagttgcttctatctctgtgccttctgatggtaatctgttcacatgctttataacctttgggggcactgatctccaatgtgggttgctcatatcccaaggggtatgcaagatcatctactagggagaaatgattagaacttccrtttgttctaagagcaaagtagatgtgattagacaattcagagatgggggggtgaatcttgagagcatggttagctatatacacaactttggaaacccacatgggtatctgtaatgtgatccctccagggatgtggtaggagggagttggagatgtcatttgtgtgtattctttatctttttaaatctctattttaggggaaaggtaaattttatgagatcaaaatattctaccatggtggtatatgataaaggatggttggatagatagaataatagatagatagakagatagatagatagatagatagatagatagatagatrcmaaacaaataaatgatggagagaaagtgctgtacaatgaaaaaggctttaagactgtttctgtaggctgtggactgctaggctagggcttcatcttatgtttccacgtcacatatcacttgcccgacaaattaattttgaaagaatagatatattattttagattctctacatttgagttagctgaaagcaaggcatacctggactaaaattttgataagtcccttcgtaagtgaacacctttgccacttaactcatcttgttattcttgaaagactattctatgtctatagttttttcttgctgaagttgctaaagccctcaaacgtccaacaaatctagagttctgtatgtggaaactaagagcaaagcagatgtggttagacaattcagaggtctggggtgaatctaggagcatggttagctatctgcacaactttgaaaaccggggtggatatctgtaatgtgatcctaccagggatggggtaagaggtagttggagatatcatttagaatctgttccccaaaatgaaaaaagacagcmtaggtctctgtatttacaagcatgttactgagttgaatgtgcacatcatcaagctgcttttctgttgcatttttattacgtggttctcttgtatttaaggggtttcccctcctattttaagaaatgtgctttataaccagctactaaatagttggctttgcatcattacacactgtcccacttaacrtctaagtacccaactaaactgattgtatgtatttgttgtttttatttttattttatccatagacttcccttaatatttagataataataactttactactaccaactctgttatattttatacattacaatacttaaaaatccctgaaaggtaggtaatttggacctcatttgttagaatttagaaagttaaagagaaaaatataactttctcaggatatacaaaattatataatatagtgaaattctttttctttcaccaatttttttatataaacttttaaatgtttgttctatttaaatttaaaattaaatattgagtttcatcttacaaaacatgtaattacttttggaaatgcattttatgagacctagtaaagtcaatatcaatgatatggactaaaaatcattatcatgcttggaacacaagtttttagarcacactgcatcagtgatgctatgtactttgaaaaatgaattatagcattatggactacatccttccagaattgattttgaaaatccaaagttgagtattttagaagctatagtttaataggaattgaacagcaaatagtatttttatttttaaaaagtaataaaaatgatttcagaaagttgtcacagtcatatttattacctgctccatggctctgaaccataaatcgacagccatatctgaagtgtaagcaaatactgtttcatataaatgtagtataagcattttcaaagcttgttgcacaatctcattattgtgatctgttattgcttttcttcccaagagaaaggctgtccatcctaatttagtactgaataagtgatttttattatgttctcccaagtgaaaagtagctccaattctttcaactgaaatgataaccagaatgacttaaaaggaaatggggctggggaattgtggaaccycctgctacccagagaaaaacccatcggtgccatggacaacgcacctcactgtcccctgagggaaagagcgtggcctcaaaggtccttcccggatgctgccacatgatagccagagactgccagcattgacaggaaattctttcccatttggtatgaatgaaaaagaacagtaagacataatagtctatctggatttctttttttctttctttcttttttttttttttttgttgttgttgttktgttttgttttgagacagagtctcactgtgtcacccaggctggtgcaatttcagctcactgcagcttccgcctcccaggttcaagtgattctcctgcctcagcctcccaagtagctgggattacaagcacacaccaccacrcccagctaatttttgtatctctagcagagacagggtttcgccatgttggccaggctgctctcgaactcttgacctcaagtgatcctcccacctcagcctcccaaagtgctgggattataggcatgagccatcrcacccagcccaatctggatatgtttatactctcattaatacttttatttctttatttcatctttcatattatttattctccttgtccattcattgattatcaaaaatttttaaatatctgtttagtgtctatctcagtatcagatcctgggattgcagaggcatgggatttgttccctcaaaggggatacaggagtgcaaaccagtgagtgagatccagcgatataggtgccacaataaaatacgagcagggtgccaggagggcacaacggagagagcyaagtcagactgtggggagtgtggaagagctccatgcccatcaccctgtgctgtgtctcaaaagatgagaagctgttcttcagctgggatttggtgttgggcccttcagcaacagctggctaggactgttgacactgctcctcctgttgattacagaacaaaaaaagatgcaaaattactagctatgcagaatgggaattcaaaataaaaataacgcttcttcatagttccacatcatatgctgtggtttagaactgtgtgctttgtggcaaaaattaatggcagagagtatatgtaaatggccctatgcaggccctgactagaggcctgtggcagaaatttatattaggcccgaaaaatcatggttcagccttattcccaggccttgaagacagtgatattacccaaaatgtcttgttaggtagtatagtaaagtggttatgtgctattataaagggaaagtgattcgcagttggagattaattttgagtgctattctagggtgatgtcgtggaatggccaccaagctacaagatcacatttatcttaaccctttccttatcaaaagtttccaactccatttgcagaactctttcccatggcattattgtctaagatgcatgtcaagacataccttttacatgaagcttagctagaaatcttgcattgtgcagataaatctcatcactacatagtggtttctcctctaattccatgccatgagatcctcttcaatgagattatgtaagaagaagtaaccaaacccccacagatggcttagaaagatggattacattatactaattgtgtttataatggataatatagatattactggagcattttattttatagctcaggattatactactaataataacactttctctacttagaattttgtttgcagttatatgcyggagaattacttattttaagaaagttgttccacctttctgcatgatcaccaacatttattgattaatagctgtgtgtggatcctaagcactctatagccctgtcagtaacatctgctgttattcccttttaaagatgcaaaggtggaattcacagaatgaaacaacatayctacgtagctagcaagtggtaaagcaaaattggaactcaggaggtcagaattccagacccatgctatgactcattgtgctaagatgtttaaaatactaacaaaaaatactgcatatttttctgatagttgtgggacatgtgtttaaaatacaaaggattattgctgacgatagaggaaatatggcccaaatcaaattttctactgcttttctctgacaagcagcatakagtcaaattaagagattaggcatagtttaggtacctgtatatacacatagatatagcatctgatgttagattacacacatacatgcacacagccatgcatttcacatacatgcacactgtggagggacaagagagtattttggacagtaatccaaggcagtactttaactagagtctgtatcctcaggcctgtctgaaaattatgaaactgcccattctctaacatcctttggggcaggtatccgccttcctgccttgcagcctctccagccaatggagtttggttttgtcctatatagaagcactgctaccctaactgttaaccaatgattataaaagcacggaagaagaggcctttcctctccctcatatcctgcatgtaccacacacttttaaacaaccagatctctgaagaactcactcactatcatgaggacagcaccgagccattcatgagggatccgctcccatgacccaaacacctcctaccaggycccacctccaacgttgagggttacctttcaacgtgggatttggaggggacaaaacatccaaactatatcagtgtgtctaaagccttccaattaaaaaaaatgttgctgacttagaatcatgtttacagggtataagttgtaagagcagaagtacaaagaatgagagtgtaagaatggtgcatgacggactaccctgggtatcacccaggcctgcccacatcatcttggatggacagggcaggtgcctgagcaccatgagaaacaaatcatgatggactcagatattggaccagacccattcctggcttataagacatgtaagcaacgagtaaagaatctggctctatcatccagacgggcatttcatattaactatataatttcttattgctgacactattaattttgtaattcttgaacttttagctctctcttaagagggaaactaaaattgcagctgatttattttcaaaattcagcctaaactaaattattatagaacgaaaatgtaaatcaattacattaagatacacaataagcaattttgctttaataatagacaaagcaaagcagtctttcttttcaggtttgttattgtgttgaaaactttcatcctaggtttttcatctcaatttataagtgttaatgaaagttttctgaaactgatttttgaaaacacttgcttatttttcatgtatcccaagctacagcttgaaaaggaaaatttggactgacatttgcaggctaagcttgtattagttatcaactgctgcataacaaattatgtcaacatttagcagctgaaaacagcagcagtctattattccacggtttctgtgggtcgggaatccagccagcttagctagaaagttttaccttggggttttcctcaaggctgcagtaatcttttttttttttttttttttgagacrgagtctcgctctgtcacccgggttgcagtgtagtggcgcgatcttggctcactgcaagctccgcctcccgggttcatgccattctcstgcatcagcctcccgagtaactgagactacaggcgcccaccaccacgcccagctaattttttgcattttttttttttttttttttagtagagatggggtttcaccgtgttagccaggattgtcttgatctcctgacctcgtgatccacccaccttggactcccaaagtgctgggattacaggcgtgagccactgggctgcagtcatcttaagggttgctacttgcaggctcattcatgtggctgttggcaggtctcacaagctctgcttccatctcagtcacatgggaccctccgcagggttgcccaagacacgtccaccggctttccccagaagtgagcactcaaagagagaggcacccaagatggaagccacagtcttttcacaacctaatattagagctgatgtcctgtcactctgctatatactacttgttaggaaagaatcaataaatccaggccaggcacaatggctcacgcctgtaatcccagcactttgggaggctgagatgggtgaatcacttgaagccaggagtttgataccagcctgggcaacgtggtgaaaccccatctctactaaaaatacaaaaattagctgggtgcggtgatacacacctgtaatcccaggtactcaggaggctgaggcaaagaatcacttgaacccaggaggcagaggttgcagtgagccaaggttgcaccactgcacttcagcctgagcaatagagcaaaaccctgtscaccccccagccccgcaaaaaaagaatcaataaatccagcccacactcaagtggatacacaagggcatgaagaacaggaggtgcagaccactgagagccatttgggaggctgcctaacaaacgtgttatcagaaatcaaaagagaaaaagtattgagaaaaggtactgagaaaatcgctctttctggctctgtctccctgtgtctctttgtctttctctctgtcacacacacacacaacacagagtaagcatttggctgatcataactgttatgtattaggtcactttagccctcagaaaaattataagagaaaagaaaatgaaaaacacatttctagcattatcttttaaatatatacattgatgtgtaaaatcttttcggaaacctagtgttaggaactgagttgtgtgccctcaaaatgtatatgttgaattcctaaccccttgtacctcagaatgtgattgtattttgagataaggcctataaagagataattatgttaaaatgaggcctttagagtgggccttcatccattctgacagtcattcttataagaggcaatttgaacacaaagagagacatcaaatctgtaagggcagagaggaaagaccatgtgragacaaggtgagaagagaaagagggccatcccccagccgaggagagaggccccagaatgaaacgtgccctgccggcaccttgcccttggacttctaacctccagaaccacgaggagtacatctttgtttaagcccgcagtctgcagcattttgttatgacagccctagcaaactaatacaacttgttattttatgatcagaatctctctgtgcaatctcagttcacagtttccaaatggccatatttagaacaaagtaagtgttctgttttgcttttactttcctccagacatagttctaactcttttatttttaagattgtgtttaattttctaaaaacaattaaatcgaatatagtctttctggttttctttctttagttgtctttctttttactcatttattatattgtttcctcatttatcttaagataatattaaactgcctttacagtgtcttagtagcaatacttgtggcttgacagaaatcttggctctatgttggtagtataaaaagtcacagataaagaacttttcttggattctttggttattctttatgagacagtcatcaacattagtttactaataccattttaaaaccaccttcatttctggacctaaaagttctgatttttccccagataataaaatttaaggtttcaattctctttaatttctgtgattcttcctattttaaaaaaaagctcatggtacctaagtgtttttactatgaagtggaagtattctgggttgggacagatttaacacctgccatgctaagcaagattaaccatggagagctctgtgtggatagtctgagatttgaatcctctagaatttacgagagactggttaaaccataacgtgtccctcccactccttcctattggttgtcatcaacagcaacatggggagaggagagtggtgattatcatgcctagtagacaaatgttcttaatgagtagtttgaagttatgagatgtgtttaagtatttgagctgcatttagggtgtctgcctgcagattataaggaaatgaaaacttcaactaaacaaaagagcctgcaaatgaatacttacagaaacttgactcacagtggatttacagggtatataggtaaaaatgcccactttaaactcaagcataattatttctcttcttgttctttttatttaaaactattatagtggcttaatgccatcgcattgctcaagaaaaaaatgctattgtttttcatttttctgtcccgttcttctccttttccagtgttaacgcatcatgtgaaatgttaaacaggccatttagtcaataccaaatataaggtctgatatcaaggcacacaaaatcacattcctttaaaaaaaaaaaagaaagaatttcaaagcaatcataacttcagttctgtccctttaagtctgattaaggtctgctaaacaagggatagtgattgaagtatacctttgaagtgaattttttcacactctaatctgtcaaccaaccaactaagtaaaactagtctgtattcatttatttattcatcacaaatttaataaacttctgcttggtatcaggaactgcgctaggctcaggagcttcagtggtaaataagagacagtcaatccccaccctcagtgattataaantcctttaaaggaaaacataacacttttctttttctcaaactttctgtgtctgaaggctcactagcatctgtttccagcatagatgtggtgtgatttgttcttcatgtcactcgcttctaattcagagtgaggggctgaggcatctggtagtagagcttcttgttcctgtgccccatctttgtggattctgggaaagtgagaatctaggatgtgtgggctcaacctcaaagttgggatccccaaacataggaacagggtgggatatgaacaagaacataagtgacagawaacaacatcaatttttccttttttcgctggatcattccttcaccacacaaacatgccgttcttcctcccatcctcaatattctcttctaaccctactttccctcacaacaactgcccactgctctgcctcttgcagcaatgctcttcaaaggagttcttcttgtccattccttctcaaagcccttccacagggactttcacttccatcactttacaaaactgctctgggccatcaatgaacaccctattactagatccagtggtcaggtcttagtcctcgtcttcatcagacctgtcagaaacatttgacacagttgatcactccctcctcctcagaaaactgtctttgcttggcatctaagtcaccatcgtctcctgctttcactggcaggtgcttcttagtttccttgctgcttcctcctgtttccctagttttctaacattgaggtagctcaatgctgttttgtcctcttcccttcttacaccgtggtaataacctcagctagtctcatgctgttaatcatcaaattcatatccaaccacatctctctctggatcccagctttatatatccaactgcatatttggcatttatcattaaaagtctaagaagcataatatgtccaaactaaacatgtttttcagttttcttcccatgagtctacagtcttccacatgtccattgatggcatcttcattcttacttacagttgtttgggcaataaaacttggaatcatctttgattcttttctttctctcacatcccatatctaatccrttagagaattaagaggattccactttcaaatgtcaagcaccacttgtccccattgtcgctgctactgccctggtctaagcccccatcatctcttgtttggaatatgccatagcctcttaagaagtgaccctgctttctttccctcttatcctatactcaccaccgtctaatctcaacagatatgtttaagtgattattttaatatgtaagtgggttcagagactgcataggtcccccatttcacacaaccttacaaatccctatccccatgctgccagatctcagccccaagtttctctctgaccttattaccttctcttccttccttttctcactccattccagccacgctggggaggcagcaagcatgttgaagaaaaataagataggcctgaagagcagaaggaggaagggaagggaagaataaaagaaaactgtggaaaggtaacaaggcaaggaacatgggattgcaatggactagaactttcttttcctcaacaaatttgtgttcatttattaaacacaatattcaaccagtgataatgagcaagacaggagacagattctgcagggtgcmtgaggaatgagacacaaaggaatgaggcacacatagtcttgcagggaagacacagcaaacacctaaattactacagcatgctagagaaaatgatgcatgacatgaaacataaaatgctaaggccattaattaattgatggagagttttaaggctcactaccaaaaagccattggctacagattatttttggaagtgaaacacatataacttttaaagcaaaatagtttttggagcataacatacttataaaaaagtgaatcctaacaacccaatacattttcattcatgtaaccagcatgcagatcaagaaacagttacttgcaccccagaatccctccagcctccttccaatcactaacactcagctctatgccattagctttttaaaatagctttattgaagtataattaatatacaacaaattgcacatatttaaagaaagagtttccttgtgtcccttttgacccttccctaccaccccaatcactgtcacaataggtcattttatattttctagagttttacataaatggaatcatatggtatgtactcatttccacctggcttctttaactctacatagttatcatgagaatcatcaagattgaggcatgtatcaatagttcactctttttttgtggctgagtagttttccattgtgttggatataccacaatgtgtttatccattctcctgttgatgaacttttttctttatttttaaattttatttatttttttacttattttttcagacagagtctcactctgtctcccaggctagagtgcagtggcatgatcttggctcactgcaatctctgcctcccaggttcaagccattcttgtgcctcagcctcctgagtagccrggattacaggcacctgccaccatgcctaaataattattgtattgttagtagagatggggtttttccatgttggccagactggtctcaaactyctggcctcaagcaatccaaaagygctgggattacaggcatgagccaccaggcgcagcctcgatgaatatttgagttgctgccagtttctggctggtacaaataatgccactatgaacatttgtttacaagtgtttgtatgsacattcttttatttctcttgggaaaaatgcctaggaaggttggatcaagggtagttatatgtttaattttttaagaagctgccaagctattttccagaatggttgcmccatttcatgttaccatcaagaatgtatgatatttgtaatccttttacatcaatgacaatgcaggtatggtcagtctttctcattttagccattctaaataggtatgtaggggtatatcatggtgctttaatttatattcctgtgataactaatgatgttgagcatcttttcatatgcttatttgccatccctatatcttccttggtgaagtgcctgttcaaatcttttgttcatttctttattctacggtttgtttttaaattaagttttctttatgtattctgatataattcttttatcagtgatatgctttgcatatatttatcttggtctattctttgtcttttcattctctttatttcctttcttctgcttaatttgggttcaatttgctctcatttttcatgtctcttaaaatagaagttgaggtcattaacttgagacttttctttttttcttatataggtgttaagcactataaaattcctcctgggtactgttttagggacatttttaaaattctgatatgtcatgctttcattttcattcatttcaaaattcatttcattttttctttgacctttgtgttatttagattttctagagattttcacattattgatttctaatttaattccattatggccagaaaacatatgttacatgacttgaatacttttaaatttattgagagttgttttatggaccasacttatgttctattttgttaaatattgcatgtgcacttgaaaagtgtgtattatcctattgttggatagagtctttcttaataatcaagccagtttgattaatgatgtttttcaagtctattatagccttgatgagtatctgtctattctattctttattggaagagaggtattgagttctctgacagcaattatggatttgactatttttcaatggtgccctatcagtttttgtgtcatgtattttgaatctccatttttagggacataaacacttagcattgttttgtccttgtgacttattgtccttttattattatgatatgaccttctttatacctggtaatattctttgctttgaatattactttgcctggctcaatatagaaactctagctttcttttgactggttttacaatggtatatcttttttcaaacttttatttctgtctttatatttgaagtgcccttttaaaggcagaatattgttgtgctatgcttctttatccaataaacataaatatcttttaattgacatgtttacaccatttatatttaatgtgattattgatatggttaatttaaatactatctccttgctatttgctttctatttgtctcttgtcttctttgttccctttttccctttgtcagccatcttttggattaatcgattttttaattattcaattttatttcttttgttaggttattttttttggtcattcttttagggtagatatgcatcattaactttagcagtctacttttcagttattttattttagtccattgtggctactataacaaaatgtcataaattgggtatcttatacacaatagaatttatttctcacagttctagaggctgggaaatccagtatcaggttgagcatggtcagattccagtgaagggccttatccaagttgcagactgccaatttctcttcgggtcctcacatggtggaaagggcaaggaagctctctgaagtctcttttataagggcactaatccactcatcagggctctgctctcataacctaatcatctcccaaaagaccccacttcccagtgccattacctttggggttaggtttcaacatatgagtttgcaggagatggggggacacattcagatcagggcagacattgtaccacttggtgtataatataaaagctttataatacttccattttccccaccctgttgttgtcatatattttatttttatataccataaatcccacaatacattattattatttttgcttagtcaaktgtcttttaaaaggtttaaacaacttttttcggttttttatgtttaktgttttagtcaattktgtgttgccataacagaatatctgagactgggtcatttataaagaaaaaatgtttatttggcatatgattccacaggctagggagttaaagcacatgacactggcttctgacaagggcttttgtgctgcaaagcatggcagagaggtcaaagaggaagcagacaygtgcaaagagagccaaaacctaagggatgtsttggttatataactactctccctakaactaatccattccctcaagaactaattcaaccttactggagctagaactgacttattgtcatgagaatagcaccaagccattcatgaaggatcggcccccatgacccagacacctcccactctgccccatctcccaacactgccccatcggggatcaaatgtcaatatgaattttggtggggaaaagcaaatcatatccaaaccacagcatttactcacatggctaataatcctgttgctttttatacctttgtataaacacaggttttcattcagtatcaatttccttctgcctaaagaaatcctttttatttttctataaattatttcaatttttatatgtacacaaacatctttatttaacctttatttttgaaagacatttttgctggatataaaactctagattgacaggttgttttctttcagtactatagagttgttactcaaagatcttttacatgcattgtttccaacaagaaatcctgtcatctttaattttgttcttcagtataaaacatgtcttttgttcctctggctgtttttaagattttccttttagtgtcaattttgaggaatttgattgtgatgtgcattgatgtggttttcttcagattttctgtggttgaggtttcttgagcttcctagatctctgaacttaaagttttcaccaaaaatatgaaattttcagctattatttttcagatttttaaatcttcctctcctcttttcaggtagtccaattacaaaatattaggctgcttaaagttgtctgatagctcactaattctcttttctttttttatatcttttctctgtgtttttgtttttgataatttctattgctgtggcttaaatttcactaatctttgtctaatctgatattaatcatatcccgtataattcttttgtcccaaatattctagtttttatctctaacagtttaatttaggtcttttttgtattttccatgtctttacttaactttttggccatacasaatatagttataactctttaaaatatccttgcctgctaattctcatctctgagtaatttctgtktaagttaaatwgatttatwtatttttctgattattgatcttactttcctgcttttttacataccttgtaatctttgattgaataccagactttgttaattttatcctgtkttatattggatgtttttgtattcctagaaattttctcaggctttataccaggatacagttaaattacttggagagagtttgatcactttggttcttgtttttatgatttagatggatctaaaacagtgaccagtctaaaactaattaacactgaggcaggaccttctcgaacattgggaagatttttgcatctactcaatgccctaaaaattgtaactttttccagtatatttggtaggaataggcactgttcccacccttgtgtaagtgtcaggcactatcccctctaatcctttctaacccaggttctttccctgccttgggtcattatgacatatgcatgtactcatcagaaattgctgaatacccaatgggaagcctcagcagatgttcagcattctctctttgaactgcatgcacctttctggttctttgtcttgagaactctakacaccttgttcatggattctcatatttgtcccttaaactcaaagagtcttctgggctctattgtagttttctctccttgtgttacaacctgggaactcaagttggtaaactgggacaatcacatggcttgccttgcttgtttactatctctcagaaattactgtcctccttttcctgctgttcagtgtcatgcaaaccgtagttaattctattttgtcttaatttgtttggttggttggttttggcaagagaataaatttggtcccagttattccatcttgatcagaagcaaaagtctcttctcaacatagattcattttgactggtttagaacactgcataaattgaatagtgtctgtcttcttttgcttaatcatatgcttatgaaattcatccatgttgttgcatgtagtagtagttcattcattcttgttgctctgtggttttctcttatgttgatgtaccacatatatttatctattttactctagctagacctttgggttgtttccattttggatctgttataaacagtattacaataaatatcttttggtgaacatgtgcatgcatctctttctggtaggtgtacaactagaagtggaatttctgggtgatgggacaggcatatgctttgctttggttgatactgattgctgaagagttttccaaaatagttatacaaattacattcctccatcagtgtatgagagtttcttttcatctataccctcactaacacttggcattgttcactttttcatcttagctatactgatgagtgtgtacaatatagacttttttattttcctcatgactaatgaaggattgagtagcttttcaatttcttttttttttttttktgtcttttggtaatcctcttttatgaagattctcttcaaattctktgtcatttttctgagagattgacttyaccttattgatttatgggagttatttatatatgcttttgtcagatacatgtattgcaatatcttcctattaktgataaattytccttttattctgttaatggkgtctttggataataaaaaaattcttaattttaatgtagttgactttaccasattttccccttaktgctagttcttttatatcctgtktgagaaactgttgcctactccaagtttatgaagatattaccctatgttttcttctaaaagctttatcatttaccaatctccagtacttctacaatctatccaaaatcagtttttgtttgtgaagtgggagtcaggatagaaataactaactggtccagcataattaattgaaaagactatctcttttgagttagaactttttgagcattgattatgcttcaggcactaggcaagttgatatttcattttatcttcacaaaatccctataaatgtttccccattttatatattggaaaagttacaattaagtgagttaaattaatttccatagctcatggmtagtcaggtgtaaatttgggttttgagcttaggtcttgactccaaacttgcctaaggttatcttaagtcaatgtcagcaaaaaggacacttttatatttttgtagtgaaaaaccaagctggtaaaggggttgaaaaccactgggaatgtgggagtgaagaggggttgaccctakaaaagaacagggtcttgaatagtgtcttttgtatatcaagactcagtaacagtttactgaattgcaaaagttatccacttttaaataactgcaaagctttgttatctacactcatgaggcacttataacttttatatataaaacttagtgatttcttccttgtctaattgcctatggcagtggttttcaaagtgtggttcttcagatcaataatatcagcactacctaaaacttgttagaaatgcaaattcttgtccccttccaaagacttactaaatcagaaattctgaagatgggactatattaggccattcttgcattgctataaagaaatacttgaggtgggctaatttataaacaaaagagatttaatcgacccatggctctgcaggctatacacgaagctggcatctgctcggcttctggggaggcctcagtgagctgtttttcatggcaaaaggcaaagagggagcaggcatgtcacatgggagragcaggaacaagagagtgagttgggggcgaaataccacacacttaaacaaccagatctcatgagaactcactgtggcaaggacagcaccaagccatgaggggatccacccctctgacccaaattcctctcaacaggtcccatctcccacattgggaattacattttaacatgagatttggtggggacatatattcaaactatcagggacccagaaaactactttaataagttctgcaggtcattctgatgtccactaaatttgaaacacactggtctaggrcctatactttctccaaacatactctctacagaggattcccctaacctaccatgcttggttataccaccagtgattgcttattgacagtgcctcttcctggactcccgctgtgattcttagcccggctaatatttacacagaggtcagatcctccctctccttacacagatggtcacacacttagaggtctatattcagttcctcagtccttcttcttgtcacatcactttgtaattgtctatctgcttgtcaatatctgccacaaaactgtgaggagcttaaggcaagggccgttgaattcccagagtgtggcatataattttttgagtatatgaattttattccattttatcgttgaagaactatcacgtggaaaagaaatgacttaatatttgaataaatgaataagtacttgaaggaccatcatgtggaatcatggaacaaggtacagtaaatggagacttcaaggaggttaggaacacagagatacctgttgcatgagatgttgaagaaaagactggaaaacctttactgtataacccctcatccccatcccttctaaactgtgagctccttgaagccagcaacagtatcccattcactgtgtgtcccccgtccccagtaaggtctggaacggtgtctgacacacaatgaatttactctaagtgaatggctgaatgaaccaaaaggttccttagtgacatatgttgagttttgttgctactgttttgtttgcttgactgtttttgctagagaaacagctcagttctagatcacccaactggcaaagtttgagtattcttaggggcacttgcaaagcagagggcaaaaaaaaaaaaaaaggtaaaaggagtttagctttgataaatttatccacaattttgtaatcagaactgttttaagaaactattttaactacaacatacatatgtgtttcatgtkttatagtttcttcccttcttaattacatgtggatgaagagacgaggaagtagaaagtggatcactgtaatcttttcagtgttgagggactcagaattcagcctctgggcagagactacatcatgggtcttttttactctgcggaggattttgtactttatcttaaaggcagctgtaagccattgaatgatgttaaggagggaaaataacataatagatttgcttttctaaaggtcattctgactgctgtgtggaggatttactggraagtggraargggaggatgggagactggaatacagaagactggttagaagaaatattgcagctgatcgagagagctgataagaacttcaactagggcaatgacggcatggaggaaaatggactggattcaaattagcagttgactcaacccactaaatttgctgacaaagataggggacttgtcagaaatgattacagttagctttcaatttaatagtaataattaaattgtcaggcctccgcttctactggatgtgcaagtttatgtaatggaagtctttgttaactacaaagcactgtacacatgcaaagtgggataattacccacagaaatcatacctccaaattccatgtgccagaggcaagccctgagggttggaaaatgagttcgtgtttatgggccatcaacagcaggattgcacatgtattcctgaacaacgaacttactgttcattctcaagtgctcattacaatggaaattagtaacacttgaatgatagatgcggctctgttctgaatatgccacttagcaaatacttgctgcagctaagtgtcaagaattcacacattgatggatcctagacatgagtggctactttttgtgaatggaatgaaggtggatacctcaccctgaagagtaagcatcatgtctacatgggttaggagcaagatttttttataacttggtatttaggtgtggaggactttgtctggttatgcatatttatgcttttggccttgtaaaaagaaacccttggctctttcttaccaatatctttttaagtcaaaagcctttaacatgtaaaattcagcstgtaaccaattmtaatttcccaatctacttcttaacttgagaaactagaaaaaatgcaataatccaactctgctattagagaatgtgaatataagaaaaagggagcctcctgtggctccatcaacatcacagaactctccttacatatttaatgatcatttctatatagaggatattgatcagcatgttgaagaaaaactgaacaagtgaaaaaagcacatatattctttaagatcacttcatttttacatattctttctgcactgggatttaggacatagcatatttaggcttcgttttggccgatgggttgctaggaaataatcccatagcctctttcatacctctttgctcattttctgcccttggtaaaatattcattatgaactcttataaattatamaaccttttttttccccaagaaaagtgtggactttttttaaacagatttagcactgataggactgcttgccttagrcagcactaccagtaattaaatctgcatgctgaagtggtaaaccctaagaatttttagaggaaggaaacctgacatataaaatggagtaaaggcaggctgatggagaagggaaaattcagtgttgggcaacttcctgactccagtgtgtgaactgttgaataatcgaacattatagcatgtactgaacattaattctgtcaaagtttccagagtaaagaataaatcggtagtctcctcatctctctcatcctccaatttatgtttggtacataatcattgccattattatcttcattcatgggtcattttttttatatagttggattaagcactggtttcttacagtcaataagaatgtattgtgaatctgttacacttctakgcgctagggattgtaataatttattacatttgcctcttcctttaaaggagctcataktcttctttggaagaaagacragtaaatatataaccataacaaaacatcctaactctatagtgaagggttatatakaagcacagaggagacacacctaagcttaacasgtagagtgggtagggaaacasaggtggcttcctggaggaaagagtatccatcctgtcttaatgtagtcttgatgaactctgggatatagcttgaaagtgatgaaagtagatccaagttctttaaaagcaattggaaaatacatgtcaaaattcattaaaaaatattgagacctagaatttctcatttatgaatcttaagtttaaaaacaatctgaaacacagaaaaaatacgtttaaaatgttaattgtagtgtagtaacaatatggaaaccagcaattgaggaatttttaaggaaattatagtttatcaactcaatggtmtagagggcagacacacatgatttttgctaagaatttatcataggaattggtagtctattccacaaatatttcttgagcagtttatgccaagcactgatctgatctctgtgtacaaaaagacaaatagacgtggctcctacttgaaggagctcttggtaaaatgacaaatatakacamttaaattaactcttakaagaagaaragagatggattctagtggcagaaacatgtcattagaatgcagatgaggccttgtaaatcaaatcagcaaaacatggggagctaccaaaggaagatgaggaagaacatgagttttgaatgataagagggcagaaaaaaatggaaataraggaaatttcttattttaccttatgtgggaaacaaaagcagactataacattggatatgcagtttgtccataactatataaaaccaaatatagtttttttccatatatgcatagaaaaaaagaaagtgaagaaataaactaatgttaacagtgattgtcttatgggtgatgtttttctcacttctcctttttggcctcccccaaatattctattataagcattattatttgtaaaacgaaagaaagatgcaaggggttgccagcaagaagataaaaggcacaaagtgttcacattttagaagagagctatttatggtcaaactctcacaacaaaataggatgggcatatttccaaaaggcaatagcacagggtaacatgctcaaggataaaagacccttctgtgccccgacatacctgccacaatctttaaaaaaaataaaataaaataaaataaataaaaaaaacggaaacaacaaaaaccacaaaaaccacagataggccttgtcacatgagtcacctakaaaattcttattggctaaggtcttgactctcccttgggttcgtccctttgtagggaacccactctgttcagctctgagccaggcatcaagtctgccatttactcagtgcattagtgccttgaatttgcataacactttgaaatttatgaggcattttcataatgtktactttcattttattttctccacagccctgtgaggtagraaggaccgatattattttttctcattttacagttgaagaaactaagacttagatgaartttcttccctctggttacgaggctggtaagtgttagaagcaacactggaagtcagatgtttttctgaacatgtgtttatmcctctgcatcacaaaactcacatgatagacacttytgtyttcgctaacaaaaacagacgagtgtttgtgagaacagagaggtgtcttatttttcatctaagtgggttcaggtggctaggaaagttctagcacacgagagatgctmtayacatttgtgaggggtggcaataaatgaaaagattattaatacttaataaacttaataaatgaaaggatttaaaaataaatatacaagtcctaaataragtatctaaatagatattgtcattgtccttagcaatctactctgaagagcagcacacacacacacacacatacacacactcacacacacacatcagaaaaagagaaaagaaacgggttagttgggaagagtaaaaagaaaaattttgagacaaagagatttctaattaaataaaatagaacaatttgttatgaatttctgttttattgcaaaaaaaaatctattttccactttgaacaaaattttacattgggagaaaaaaaaaaaccacaggaaaagagcagatgtctttgagaatcatcaaagcatgtcttatttcttacacatgcacatgcctgctctctttctgcstgcatctacaaaggggactcatttagcattcactgatgaacataagagtatttctatactcctgctgagcctgtgaatttttttttttaagttattaaggtggtgcacgcatcatgccctagtgactttggctatatatgccctttgaaaatctctaatgacatgttggacaccctgcatataaatgtcaccacttggaatgagagtcagacttttgctcatgggaatgttctctgcctggcctcagtgtaatatccctgacctaatgaaagcaaatggttctcagtaactccctcctaagtgtaataatgcatattctttttcggatgcttataatatggtgttggtaaatagcttagcaatgcacataggaacaattctactaatggatagggaaagaaaattaaattgctatctgtatagccctakaccttttagattattttcaaaactcatcactgcagcaatgatttctcccatagtattttaactagcatggcagccttggctttctacatgtatgaaaggtatctttaaatccatattactttttttcttttcattttttttttttttttttacaagtgacctttggaaatgatttccaataactgcagccaactttaagctcaaggcttggtagtgaaaggtcactctacatttagactaaatgtggatagatgtatactccctgcagcaggctattgctttaggactkgctattgtatttgacccaatcttctttctaacccaagcatttagacagcttccatctgggttttgtttaaacttttttttttaagcatcrgtacaaattaaaaggctttatatattggcaagtaactttttttctttagagatgcacatttttcttagaaatctaagaccatagaaaagagtaggcatgctgaacttctcataagaatgactccatgaattttgcatgaaggatgctcccattccataaaagggcctggcaaagtacatgagactgctcagatcccttatctctcactcatgtttttcctgcaaataacatctttctttataaaagaggaagaaacaaaatgaaaaaaccttggactaggcagctatacataagcactgcataagactgcctgaagaagaatgcaaggagatggatttttttccttctactaaactctgaggaccttcagatcacaattgtcactgtgatagccttctcaggagcaaagcagccccctgtccccagcttcctttcctcactgtggcctgatggcttcctgtattcatgtgactttgtcacatcatgcagtctttacaaatgagtctcaggaatgctttccttcccatccacggtagagaaggacttgaaaagcattcaagagacttagtctctctccatgtctgagtgggcttcaaaaatgctgaagatcagagtcaaagaagggaatgtctccctcacttcttccctcctggatccctgtctggcccagctagaaagcaaaatcgcttcctaatgctgggcaggcagggactggaaaggactctggactgagtgtccggagacctgacttcattcagcttctgtcaattaccagttatgtggcctggggctaaatcacttgtctgctaggcttgatcttttatctgaacagaattagttaaaagaattaattctgtaaattcagtgaaacaatatccagctttggccacaactcctttttctaaatgactgtcttcatatcagattcctcagggagagagtcagattactgcaagtgtgtctgattctgatttcaaagaaggttctggaatgattccatttgtcctaagaatgcaccagaataaaattatttcttatattcaggcagcgtttttaaaattctaagtagcttttgcttatcccacttatttagtcctcctgttgagcgtagatttggagtacattgttggagcccctctaatgtgctttgctgctaacaggctggcactcccacccatgagaagattgctcgggctcactgggtcctccttgttctcctggttcctccctgtggtgggggacacctcctgctgactggccaataacasaagtatgtgggaatacaaaaggccaactcctttgccccaaggtgaataaattctgagatgtaatttatgctctgcagtgcccctccctcaaaaatcaggttgaactatagcaaaaatgtagaatcaacccaagtgtccatcaatgaataagataaagaaaatgttatatatatatatatatatatatatatatatacacacacacacacayatatatacacatatatatacacacacatatatacatatatttatatatatatatatatatatacacacatacattggaatactgttcagccattaaaaagaataagatcatgtcctttgaagcaatgtggatgaaactgaatgccattattttaagtgaaataagtcagacatakaaagacaaatactgcatgttctcacttataagtgggagctaaataatgtgtgcacatggacttagagtgtgtaatgatggacaatggagactcggagtggkgggggcagtgggaggggccagacaatgaggtattatgtaaggagtacactgtacattatttgggtgatgtataccctaaaatccctgacatcactactgcacaatttctgcatgtaacaaaattatacttgtrtgccatacatttatacaagtaaaaaggaaagtcaggctgagtgtgggctccttcctgttccctatgtstcttccccccaccctcactggcttctcctggaagcaattgatcactacatcacttgcaactgaaatcttggctcaggagaaccttatctaataaaacagtagatttaaacaacaaagtaaggttagcasgacacastaggtgtgttatcaaaagacccatgcttgcagctctgccgcgtaacagctctctggcctggagcaaggtgcctakagccccaagcctctctttcctcatttgtgaaatgaaaataagtacgcctgggctgggcgcagtggctcatgcctgtaatcccaacactttggaagtccgaggcaggtggatcatttgaggtcagagttcaagaccagcctggccaacatggtgaaaccccatccctactaaaaatacaaaaaatttagccgggcgtggtggcacacgcctgtaatcccagctcctcgggaggctgaggcaggagaatcgtctcagcttgggatgcagaggttgcggtgagccgagatcgggccactgcactccaatctgggtgacagartgagaccctgtctcaaaaaaaaaaaaggaaaaaaaaaagaaagaaaataagtatgcctgctctgcctactatatgcttgttgggaggaccggatgagatcatggatgatggaagwatctgaaagctgccaggcaccatgcaaatataaggaaactaatttttaaattggaaacaaaattataacctaaagctaaagtcactgatagggtttcagaagaaatcaattcaacagcagttataaaatacagaaaacatacttcatatcttattcttctcttccctcttcctttcccacatttttcatacttccaccatccaaaatgtttgctgttcttttcaggattccacctgtgttggaacactgatagtgactagagaaagtgttgcattcacctcttttggttactcgcagtttttcacctagttaaccatctttgccatgcctgcctgtgtccactgtccactcctgaagactgcttttcatcttattagtcccttatttctttcatttcaagttgcattggatcttaaaacttcaggaaggaaataggcatctccctgagttgttataggtcatagttcaaatgccatacttcagattgtgtgaggctgccatgaattgatggaacacaataaaatggagtcaccaaaatgtatggcccagatggtggcttgattaaaaacatctcagtgtgtccaaaatatcatggcaggcatgcacaatttttttgtccatgaaggccctacaagattcatgataagattttatttttaatgaggatctaattagagagctcagcatgagagtctgaacacaagagcagtcagtatagtttggtgcaataaaatattccttgagcccgtaggcaccaaggttaaaaggaagaatagcacatagcccctggtgggggaaacagatacaaaaaccaggtcattagaatataagggcccagcatgctcagagtgacggcacccacttttgggttcaaaaaacactttcccatttaaaggggtgtccagtcttttgacttccttggaccacattggaagaaaaagtattatcttgagccacacgtaaaatacactaacaatagcagatacgcttttaaaaattgcaaaaaaacataatgtcatgttttaagaaagtttacaaatttgtgttcggccacattcaacgccattctgggcckcatgccgcctgcaggccgcaggttggataagcttgatctaaagcaacaccttctccagcttttatgagactacttgaacccggggccttctacgcactgttccgcaccttcgcctccttgatgccttctcatcccatgggactcttgactcattcatttttttcatgcacacacttgttgtgtgcctaattctgccaggtaccactctagacactggaatttccacacagaacaagacacagccaatcccagctgtctgattatggagcttacgttctagcagtaagaaatagaccattgaaaaggaattaggtaaactataggactgcagactgcagtaaccaccatgaaggaartacasggagtggtgagaccaacgataaacaggagaggcctccttgaggtcagggaaagcstctccaacgggagacatttgagctaagacatgaaaaaggagagaacatgttctaggtaaagggaatgtccgcgaggctggaagaatttgttgtaatcaagtgaccaaaaggaggccagtgtagctggcttcrgtaaacgaggagcggggtgccagggggtgaagccagagggtgaagctcggccgtcttctgggtcgtgggaagaaactggatttcattcttagtgccacgcagtgttggaagccaaaactgcattttaaaacacacacttgaaaggaaatctggtatcagagcccrtggcaaggaaaagcgccatccccgggtgagccgcctcagctctcatctggatcactgtcttgctcgccgccgccccctgcctccatctttaccctcccagagtccattcccaacacagatcctttatcaagttagtgaaatcgggttatttttctgcctccaattctgacacggctccttgtaccattcgcaggaaaaggtggaatccccaaggcctcatgccccaaactctgtcggtccccatctgctccaccacactggcttccttgctgcctaaacacacggccatgctctctctccctttagggcttttgcgctcctgctccctctgtcyagaaccctttctcccaggatagctgcatgactgactctgtcacctccttcaattccttgctcaatgtcaccatctattttttcttcctttttttttttttttttttttttgggagttggagtcttgctctgtcacctgggctggagtgcagtggtgcgatctcggctcactacaacctccgcctcccaggttcaagtgattctcttgcctcaccctcccgagtagctgggactacaggcccgtgctatcacgcctggataatttttgtgtttttagtggagatggggtttcgccatgttggccaggctggtctggaactcctgacctcaagtgatccgcccgcctcggcctcccaaagtgctgggattgcagacgtgagccacggcgtctggcccaatgtaaccatcttaatgaaaaccccattyycctccacacccctgccacacctccatcacaacctcctcaccaaactctgctttttttccgccataatacttgtcatcttctaacatgttctaccatttacttacctatcgtgtctattacttattgtctgtgttcccttgagagactggaataagctccaccaggcagaaatctttgtctgtggggagtcgtgggagctatccatagccatgggcgctctgtccttccaggtctagtggaggagtggatttccctgcccgccccccgagctgggcgtggctgtgtgacttgctttggccaatagaaagtgagcagaagggatgcgtgctgctgctgcgggcagagctctttgcagccagcacatctgccacgtccattcctccctctgacacagcatctgcacctttctagatggaagctgctccactgggcttgctccctgagtgattaattcgaacattattcccctggcagccatcaaaggacatagagtatgataaatgaataarcctttccttttaagccactgtgacttggcaattgtttgttattrcaacacaacctagtctattctgactatgtctcacatgttcaggaatgcctcctgagtactgacaacaatgccaggtgcacagcatatgctccataagtgtttgttgagtgaatttctctgtctttattctgaaatttttacacagcatactttaaatttaaatgtgctaaagttgtcaccaatatctagacaccagctttattccattgagtgagtgttctatgactgacatggtcaacaatcaacattaagtacctactatgcaagttaggtctttcttagggccccagaggaataagccactgtgtctaccttaaggtagtttgcaatctagttgcagaaacagaagatgtgctcagaatcatctgctccactgtgtagtagtgggtgatacatcctaaaactgtcctgagagttcaggggtggaagccactaatgaggatgaggctggtgagagaargggataggaggctacctgagctgggccttgaggacatagacaagcaaaaatagagctgagaaaagatttctgccagaaggaacaacattcaatcacacacaagcaggaatagatcttgaaacattagaaggtaacatatatcaccatgggtagaggccagatttctttgattgcagtgatggatgtctatgtgctggctccacgactttagatgagtcagttaacttccccatgcttcagtttccttatttatgaggtggcaattatgatgataccttcctcagccaggcgcattggctcacgcctataatcccagcactttgggaggcygagacaggaggatcacctgggcccagaagctcaagwccygcctgggcaacatggtgaaaccccatctctacaaaaaatacaaaattagccaggtgtggtggcatgtgactgtagtcccagctacttgggaggctgaggagggagaatcgctttagccccagagtcagaggttgcagtgagccgagactgtgccactgcactctagcctggctgacagagtgagaccctgtctcaaaaataataataataataatagtacrtacctcaaagggctgttgtgtagtttaaatgaatcaatacatacagcatttagaattgtacctggcagataggaagcattcatttggaaagaagagttgagagttgagcagatctcagattttgcaagatcttgaatctgaaataaagcagtctaatgtcattctataagcaaaaatactttccatttgcagctcaaagattttgatcagaaatctgtattttagaagcttaacatcacagcagggtgagtctgggttgaaagtgggagacactggaggcagagacactggtttagaggcagacatgataatctcactgtgggcaattttargcacccaaccatggtaatggccaaggaagaaacatgctggagacgccctggagaaggtgctctggacctaccaatgggtcatgtgggaaaggaaacaaagaagtaaatggccccaaaatttcagggtctggatgaccaagaaatrtaatgataacactgaccaaaatggtgaagatcagaggggaacagattttaagggaaatataacaaattctattttagacactaaagtatcaagrtcaaactatttagaaagaaattagatacgataaactgaagcttaacttaaggctacgctcaaatgtcactcagaaaatcttccccaaataacttatctaaaatacctccctcctccctcactctctagctcatcaccctaatttatcttcttcrtttcacttcatggcacaataagaccgtatacatttgcttatttgctaattgtttgtatgctcctccccaactctctaatgtaagctcagcaagaacaggaaccttttcttccttattcattgctgtgtgcgcagagcccaggagagtgcctagcccggtcggttttcaagaactattttgtggaataaactcatctttatctgggagcttaattgccaaatatatactcacaacccaaggtcaccttcaacctgtatagagacttctatccttttattattagggcttaacacacacacacacacacacacacacacagagagagagagagagaatcaaaaaaggaagactagctagtaaagagtattaaaatataaractgcataaattcgtggccaggcgcggtggctcacgcctgtaatcctagcactttgggaagctgaggcgggtggatcacaaggtcaggagatcgagaccaacctggctaatacggtgaaaccccgtctccactaaaagtacaaaaaataaattagccaggcacggtggcgggcgcctgtagtcccaactacttgggaggctgaggcaggagaatggcgtgaacccgggaggcggagcttgcagtgagccgagatcgcaccactgcactccagcctgggtgacagagcgagactccatctcaaaaaaaaaaaaaaaagactgcataaattcaaatgagaatggtcaatggaacagagtgagtgtagatagacttgaacccatgtgaggattttgtgtaagtgaagtggtaatcagtagaagaaagatagatgtttcaatcaacattttgagcaaaactgaccagccacctggaagaaaaacatatctggatcctttcctcaaacattaaaccaaaataaatttcaamtgtgycaaatttttaaccataaggtaagaaatcatcaaaataattgtaaaagtcatagaagaaaatagctcatttttaaaaaacagctgtggattgagaaaagcctttctaaaaatggtatgaaatgcatgcaccattgtagaatatttaatgaatatatacatattaaagacatccacacacatgcaaacaaattttcatgacttcaaaagacagcagacttaaaacttatttagaatttggcacacaggtatctaatttctttaaagtgcaacaaaactattataaataaaaagtagatgtgtggaaaatggacaagctgtagaaaaataaacaccaatggttagtaaacataaaagcaccgacctcactcatgatttttttaaacgttggttaaaaacatgagatagcaatgccaacagtttcaaagtctgacaatgctaaagcctagaggatgtgggtgaaataacaaactctcataaattgttggtgggagtgtaaatatatattacttatataatatatmttttttggtcatgtagcaataacaaccaaaaatttcaatttccatactgtattagtcagggttctctggagggatagaacaaatgggatagatgcatatacgaaggaaagtttattagaagaattgagtcacaggaccacaaggtgaagtcccacaataggccgtctgcaaggtgaggagccaggaagccagatccaaagtccccaaagctcgaaagcagggaagccaatagtgcagccttcagtctgcggccgaaggcctgagagcccctggcaaatcactgatgtaagtccaagagtccaaagctgaagaacttggagtctgatgttcgagggcaggaagcatccagtatgggagaaagatggaggccagaaaacttagccagtctagtctttccaccttcttctgcctgcttttattctggccgcactggcagctgattagattgtgtccacccagattgagggtgggtctacccttcccagtccactgattcaaatgttaatctcctttggcaacacctcacagacacacccaggaacaacaatactttgcatccttcaatccaatcaagttgacacamtattaaccatcacacacaccttttggccacataattccacttctaagaatttaaccgatagaatatacttgcrtgagtacacaaagattacaagaagtttcattgacaaattgcttgtrataagaaatttctaaacacatacaatagttatctgcccacaaaattataggacttctattcagtagaatacaatgcagttattgaaaacaatgaggtagatctatagggaccaacaaaaaggtgtttacaatatacaggtrtattgtaatatacaaaagcaaaaaacaagtagctgaagagcatctacaccatggccctactacacgtgtraaaagcaaaaagacaaatataaatatccctgtraatgcaacataaactttcagaatgttagataagcagtccsttatataagcagcttcctacatagcattcagaaagctttcattgcatatacaaggatttttgtatttgtcttcttgcttttaaagacatagggggtgtgactaarggtgaagtgacccttttgatttttgccttacactctctcagtattggaaacgtctttcatgatgaatatgattagtgttagaattcacaaaaggaagaataaagccctcartgtttcagtcacactctccttttgacccatcccccaaaaagcgtatctgtagtgtctgcctgagactgaaatgacaagtccccaggccaacccgagatatctaccaactggracattaggaaatcatgtcaatttccagaatcttctgaaactctgcaagagctttttttttttttttttttaaagaaagtartaattaagtmttgttttcttatctccagtaatcatcaaaaacttagccagggacaaccagaaatcctaaaataattcatgtgccttaaaatamccaactttccttcacttgttcagttgataacaacttgggatcttctccaccactgccaggggagctaggaagctgaaagaatgactggcaaggctgtgtcatgayagaaaggtctgtggccaatccatctgaaggtccaaccattctaaacagctatgtcacaggtacacatacaagtgcacacatgaacgtgtgtgtagtaagagagagagattccaagccagtatcatcatttcatcaaagacgtttaaatccagaagtactatatgtattatttatattcatgccttgtttcaaaatcatttaaggcaaagagatgaaatttttaaaatccccaaagatctagattattattcttgcaacttaaaatgagtgtatatttctgctttggggtctaagacaccaataacatatttttaaggctttaactcgcttttgctgtgcctgatcttttctaagaatttaaaagagatttctttagaaaaatgaaagaatattttcaattatactttgtacttgattttttaaaagagctgtcatataaagcatagttttatagtgtcccacctttttaatacatcagaaaaatcattaaaagttgtcaagattggattttcctaacttaccctttctacactaaatgatcaattgagtctatcaattgggattgccagacactttagaaagaaataaaaacaattagttgggaaaattaaaagcagcattatgaataaactatttactttttgccaaactgtgcaacattaggcataggaactgaggcatggatcatattatgtctattctgttttaattgtcaatcttgtctcactggatggtagtcagggttccaaagggtttttttgtttcctcaatgtctacttctttgacaccctttcttgtcctcctatgagatgttttcttcctgagtccctcactaggcctaccagttgaccatgaggctctgatctctgtgagtttattcagcatctgatgctactagtataagatcttcttacccttaactcgacagatgatttttgctgttgctgcaggagtgaagaggagagtgaacatgtgttaagctcttctagatacatggcacacattattcatttagtcttcatagcaataccatgcagtaaattttattgttatcacatctctctgatttgcaatcagtggcttagagatgttaaataagttgcccagtgttgctcagctaatggtggtagcgctcagacttgaacttaggtctgtgaattccaaaacccatgctacaggccaggtcaaactaaagggcaagccagatggcctgcttcccaggggttctaatctataaaaagcacasgacattactggagtaaatcartaatgtgttgtcagttcactgaggttctcatacacaaatcttcacatagttataaactgatggcactgctatggagctacactgctcctgcaagtggaaataacactgccaccagcacaagtacttgctacctcagttgagtatttttatgaaacacattgcaggccgcacagtgcagcttcgggccatgacccaccagccaggggacactcacatgagtctcataatccattcacagtcggctcaaattctaaacccaaaaaatgctggtccaatgcttgtaattgggaatgcattcagttgtaaatagttttcataatagcttcccaagaatttcatcactttggacaactacaaataatgaaggaaagaaataaatcacgattctggacattaaagcagaggaaaccctcttattttctagtctaaggctcctgccatcgccatctgaccttccttctgaccactaggcagaaagacctcccatcttcgctcctttccctgtgcatttgtccctcatgtcacctcttcctcatcctgtttgcttcatgctctcttcttctgctgtactctgaaacacagggtcaatcctgcacatttcctttagtcttgttctggaagggcacagctcaaagctcctccttctccaagaaagtgttttccatcctttcccacatcacagcacacatggaagaagrtggtatttgtgtagcacacacagtggacaagactgctctgctggaggtgggaaggcaatgagcttagagatttgggctggcccaggccctgactggtagacccagaagccagggggcaaatacagwggcatacctgtttacggcccacagtctgctgcctgagaagctctgccctgaagaacactagaacttccataactgtaagctgggcctagatctgattttctcacttattgtaaatacatcaagaaaaataaagcagcagatataagtaacatgcactaaatgggaaataggaatttgaagtcctatttgtttgaagtccagaaaaatatttgtttctggagagaaataataaaacaggtgggmggttgagaatgaacatacatttcatgtaaccaataccttgttaaggtcgtcaactgaaaattataagagctgcctctgaaaacatccataaagtattgcactaatttcttagtggctaagttagatatgagcaataaaataaaggaaattatatggatttctatttggtctccaatttttataaagcattagaacrttaataaatgttgtccaacttgtgttagccacatcagcgttctgcttctattttttattttaaatgtctgtggttttcctttaaattaatcaaaaatgctcttcttatgaaactataagaagaactatttgcttccctggctacaaatatttagattacataatcactttttctttccttcttaaggttgtgttaagtgaaagagataatgcatataacagtagtgactatatttattgagcacttactatgtgacctgcactactctaagtatgaaacgtgcatgatatcgtttagtcctcatgaaaacctcaagaggtagggattgtctctgataatctccattttagaaggctaaatcaaggtttacggatgctaaggaaattgaattgcctgaagtcacatggctactaaaatgaagaattagtcctggaacccagtctcactgacacccaagtttgtgatcttactcactacattctacttttacaaaatattctttgagttgaaatagatgttttcatttgtagagacactgaaataattgtttccttttttttttttttttaatactccttaaaaacagaagctggaatctgcgctgcccagcaccctagggctctgtgaagtttttccatttgaacagatgggggagcttgtaggcagctaatcttttcattctttgtgttcttaaaaatagacccaacggctcagtaataagcaccaacattaatgtttgtttagtcctggtgatgacttaccaggacacagagtttargagtttggagatcctgccaagcttagcggaaagtgcacatctagaagaaaaggtgcaaaagcagcccatggttccakgaaatggcagaggagygagtccttcatgtcaagttttggaaaaatgagatttatcaaatgtttaatagaagrcagtttgagacagtggaaagaactctatgttgagaggcagactgacttgggttcacatatgrccccatgagtgtttttgtttgtttcattcactctatgcccaatacagtgcccggtacataatatgccctcagtattttctgaacgaatgactaaatgggtgaattaataacttactgaaccctcaattttctcatcgaagtaatgggtgttcctcagaaaatgtcagctttaaagtttcaaatacacaaaaaaacttttacaaaactgtttctctggcttcatcccatctcacgaatgatttctagaggtcttgagtttgttccacctgactcataaacacaccatctaccatctatcacctaccacctgccagttttctccccatttataccagacacctgcggagatactgcctgaagcggccttggatctcaatacccaggtgataagcaaactaccccaggcgatggtgatgccaccagcctttactctaccagctcccagcagctgcacctgtccccaggtgaaaggcaccaactatcagtaaatgtcccaaaggaaacagaggccacattcagattgagataagttaaaaaaagattatatagaaagagactacaatgctgagcgcagtggctcacacctgtaatcccagcaccttgggaagctgaggtgggtggatcactttagggcaggagttcaagaccagcctggccagcaggacaaaactccatctctactaaaaatacaaaaactagccgggcatggtggcagatgcctgtagtcctagttacttaggaggctgaggcaggagaatcacttgaacccaggaggcagaggttgcagtgtgctgagatcgcgccactgcaccccagcctgggcgacagagccagacttggtctcaaaaaaaaaaaaaaaaggagactataatttgggataggagtagagggagcagcagaccacggaagatagtatagtaaccccaggttagtaacaggagagtcattmacaccccaggctgraagagtcagtgggtgtgmacagttatgggaactagaaagggaaaattstgtaagctgtgtctcagtttaaaagctggagccttttggcagtttttcctgacacccccaggccaactttggccctyttcatctgaatggagactggactttgccttattcctatggcaactctcactccgaatctgtcctgtgtgtctccctgccagactgagaggagggactgattataccctttcgcctttgtatttccagtagccagcccaagaccaacacaaactagactttcaaaccaggtatgaatggttgaacaagtggatgaatgaaggaacgcctgtcctaatgtgcaaaaaagaaaagcatattcaaagcctcacccatgtttcttatccaaaacagaaacattgttctctttaaattgatgcagtaccttttcctaataaaaaagttttgaaaagcaaaagcaggtcaggcccagtggctttcacctgcaattccaacactttgggaggccaaggcaagaggatcgattgagcccaggagtttgggaacagcctgaacaataaagcaagaccttcatctctacacattaaaaaaattaactgggtgcagtgacgcatgcctctagtcccagctacttggaggctgaattggagggattgtctgagcccaagagttcgaggctgcagtgagctatgattgcaccattgcactccagcctgggcaatggagccagttgctgtcacaagggcaaaraaaaaaaaggaaacagatgtgcttaaattaaaagtaactcttactcctttcccacccggccttaacgtgtaacaaagtgctaaagtatatctcctctgacttctttacatataatcatatgtactttaaaaaacatattagttatacacattgttctaaaaatacaatggaggtattgttctctagccttacatacagatatgaccttattatttttaattgctgcacggagttgtgcctttccaagctggacactgaaagcagaaaccagaaaggaaatgatgtaggctcagaagtgaggcttgagttcatcacctcccagctgcaattccaggcacgttagtatctgtatgcctcattcttcatcatctgcaatagccttatcccacagaagtgctgggagaactgagtgaagaatgtatcgatgttgctggtatgttgtaagcgcttactgaatactagccattgctataatattcttttattccctaaacattgtamacaagtaaaggtgagtgacaaattaggacaaatattcataaaacatatgatgggcaaaaattattattactagaaggaagagaatactccattagaagaaagaagtcctggcatagtggttcatgcctgtaatcccagctactcgaaaggatatggcagaattgctgaagcccaggagtcagagtttagagtgagccctgatcgcaccactaactcctgcctgggctctgcccttaacccatttatgctggaggttgcaattttttgaatttttgcaatcagaccttggcaatgaccttgagcagtaggatataaataactcccatatgcttagcgttccaataatggaatgctaggcataaacaattctgttgttctccgataaattctaaacattccttagcctcagcttaataaataaggaaatcagcctaattttcttctgctaaaacttgcaattgtcttttaactccacaaccagtgagaacttaagctcttacaccaaacttcaaatttgctagttcctgagaataaatccttgtggtagcttagagaaggagtctcttcttattcactatggatgatgtaaaatttgcattccactatctaagttgaataatttgaaacatcaaattattcaaatataaataaaatacamccattttccaaagttcaaatcttgatatttatttcccttcaactcgagagtcttctacgctctcttctccccatcatctctctgcagaagactgcctggtattttcctgatatctatttctgcctcctgtgggatgtkttactggtattttaaaccaaataaatgctaaaccgagcttatcatcccacctcctctgttgctcaccaaacttacttctttaaattggacctatttccttatttttacctttgcattaatagcatcttctcccaagtaaccaagcttaaaatcttgctcctcttttattccttttttccccatcctaacccctcatctgaatcttcaaatccattttactcatacaatgtgccctacattcatctacacttttccatctctttgccaggatcccccatcctcaaggttaatcttcctagggtaccatttggatcaatctttgrctcaaaattattcaaggactccctcaacaaatattatgtcaaaaaatatttctttaagtatctagagtcctccgtgatactggcccatcatacaatttttgctttgtctcttattactttgccaatatacagaccacctttaagttcagtgcaaccatttactgttccttagacattccctgatgtgcttttgctcatgcttttccttccaggtaaaatactgttcccctaatctgcttctgttaatgtcctatccagatcaaacgctgtctcttccatgaagtcttcccaggttcccacaccaaacatgaatcctttctttctgtttttaatatgatttcaacttttattttagattcaggggatacatgtgcaggtttgttacctgggtatcttgtgtgatgctgaagtttgggataccattgatcccatcacccagatactgagcacagtacccaatagttagtttttcaacccttccccacctccatcactcctccctctagtggtcktcagtgtcgattgtttccatctttatgttcatgtgtacccaatgtttagctcccacttataagtgagaacatgtagaatttggtttatgttcctggatattaatttgcttaggataatggcctctagctgcatctgtgttcctacaaaggacatggtttcattttttcatggctgcatagtagtccatggkgtatatgtaccacattttctttatccaatccactattgatgggcacctaggttgatttcatgtcttgctattgtgaatagtgctgcaatgaacatatgagtgcatatgtctttttggtagaacaatttctttcttttgtatatataccctgtaatgggattgctgggttgaatggaacttccrttttaagttttttgagaaatcttcaaactgctttccacagtggctgaactaatttacattcccaccaacagtgtataagcattccctttcctccatggcctcgccagcatgtgctgtttcgacttttagtaatagccattctaactggcatgagatgctatctcattgtggttttgatatgcatttctctgataattaktaacgttgagcattttttcwtgtgtttgctgacagcttcctttgagaagtgtctgttcacatcttttgtccattttttaatgaggttgtttgtttttgcttgttcaattgtttaagttccttatagattctggatattaacccttttgaatgcacagtttgcaaatattttctcctgttctgtaggtcatctgcttactttgttgatggtttcttgaagctctttagtttaactaggtcccacttgtcaatttttctttttgttttttttttttgcagttacttttgagggcttagtcattaattccttcccagagctgatgtctagaatcgtgtttcctaggcttcctttcttttttatctgtgccaatcctatgggaattttcattactcctcattcttttaagagtcaaagaacgtaaacaactataagcaaatttagtatttatatccctgttatgcaataaagacaaaacaaaagccagggaagtgaagtaatttgccaaatatcatatagcctggcaaagtcaagactagaaatgtctgagaatcaggcgcagtggctcacgcctgtaatcccagcactttgggaggccaaggtaggtggatcacctgaggtcgggagttcaagaccagcctgactgacatggagaaaccccatctctactaaaaatacaaaattaggccgggcgcggtggctcacgcctgtaatcccagcactttgggaggccgaggcgggcggatcacgaggtcaggagatcgagaccatcccggctaaaaacggtgaaaccccgtctctactaaaaatacaaaaaattagccgggcgtagtggcgggcgcctgtagtcccagctactcgggaggctgaggcaggagaatggcgtgaacccgggaggcggagcttgcagtgagccgagatcccgccactgcactccagcctgggcgacagagcgagactccgtctcaaaaaaaaaaaataaaaaaaaaaaaaatacaaaattagccaggtgtggtggtgcatgcctgtaatcccagctactcaggaggctgaggcaggagaattgcttgaacccaggaggcggaggttgtagtgagtggagatcgtgccactgcactacagcctggatgacaaagagtgaccccatctaaaaaaagaaaacaaaaacaacaaaaaagaaagaaagaaataagtagaatgtaatttttcatgtcataaacataaaatgtacctaggcacttttctacctttcttttgcacaggtgtgagtatatgcatacatacctgcctgttcacccaacataacccacacatacacacacaatctactcacaccacagctatctttgcaaaataggtaactacaactccagaagaagattctctgatagtggtgaaaattgtcatttattatgacgatgatgattgtgattgctattgtcgttattaaagtccagatctgatgcttggctatttttttttttttttgcagtgtagttataaacaatgaatacagggttttaaaacaaaggatcaaggtagtagctaagtatgacagctaaaaattcctatttctaaatagctctcagtaggggataaaaagcaattgatagctctctttgggacaaacgtactgagatagcatgtctacactatctatattagtacctggtcctcttagccatctgtcaaagaaacagactgacttcaaccaacagtttccataaaactcattttctagacaaagaaactgaggtttgacagagaatgaagtataggcttggtgagagagcattctgagctccgtaattcacttagcctctgggctcctgcacccctcatcctttttattctcagtgtttcagggcattgttccttcagtttgcactgggttggttggaggtaggcaccacaggtttgattgatacagcaatttgcatctcaaggcatcgctcgataaatacagtgcaatgaaaggctactctctcaccagccaatttcccccgctgggctgactttagaagctcattgatgtcacttccttcctcagtcagcaagtgaattttctttaattctcaagaccagctgtccatgctgtcaacagaaagttattaaaattcctttaaagtgaataaaaatagcctaaaagcaaatgtacttggaaacaggaaagaatcagtatgcaaagtccacaaacctctgagcaaaataatgttgatccaaccagagwtttcaaacattgtatattcaagttgctagaaaaaaataattaaaagatgctaagccacatacttcttaatcttttattagcaaaggcttatatagttaaaacatatccccctaaatttcattccgccttttcaagtatgatttgaataaatttgagaatgacttaagttttcgttaagygggattccctcctcttttcttgcataggccagagaatattgtcatctccaccaggctaaggctatccataagcaagagacaaacattatcattagcagaatcataaccactaggaccacaaaaataatataattgtgtgtgtgtatatatataaaaaattgtatattatatatataattgtatatatgtacacaattatattatttttgtggtcctagtgattatataattgtgtatatatatatwgatataattatatatgatatatgtatatttgtatatatgawataattgtgygtgtatatatatatatatatatattttttttttttttgagacagagtctcactctgtcgcccaggctggagttcagtggcgcaatctcagctcactgtaacctctgcctcttggattcaagcaattctccttcctcagcctcctgagtagctgggactacaggtgtgcgccaccacacccagctaatttttagtagagacagggtttagtattttcagtagagacagggttttaccatgttggccaggctggkcttaaactcctggscttgtgatccaccygcctcagcctcccaaagtgctgggagtatakgcgtgaatcactgcacctggcgctmtaattatatattttaatttattggaattttactagctcaagggaagaggkrattttttctcatatttaaatggctataactcacagaaatgaactatgtggctcctgagtccccctgatcctcaactgactgcgtgacctcagtcactggaagattgccctgttaccttctgaatcagcccttgctttacccttcaggcccccrgcagctgagctcctgccttctttcctgagttgtacatgacctggtacccaagtccctccaaagcatggatatgttccttaccaccagtaatcacctgcctcttccttatttggacagatgtcatgaatgctggactccctctgaccttttgccaaggaaacttgtatccagcctctcttgtcatccccagacacaccccaagcttgtgtcttgggttcttctccagtgcctgggctctcaatttcagcctgcacttgtgctgtccagcctacccaaggcttccttgctacacacactgcacaaagtaattaaaagaaagtgcatatatttaccacagctgtgccccmaaaaaactatttgagtaaatagtttagtggaaaaatggtagaaatttgggtaaattcaaactaaaaggacaagtataatgtggttaatcatcaggaaaattgcmaatcatgatcttgtaagttatstagaattaactctcagtccttcccctcaattcccataatttggagcacactgtattcctaatacagaactatgatggtatagatgtgtaaaatacaaaaaaaaaaaaaacagaattctggtgtaattcctgttattgaggtgcttaaacattttggaaaatcagttgggaacgaatatgaaaagggctgctatcacaaacaaagcatttgatatggcccagaattcatcagcagtcaaactcaggccctaatatcatccatctaaagatttttaacccatgtaccytttctttcatgagcaaaccagggccaggagcagctgccctcaatatgttggaggctagtgcaaggcttcacccactgagatcaatatatatattgaacactctaggtgttcaatacatatatttatggaataattgatagtggtctcagtatcactgagctgggtccttaggatacaataaacaaaatgaatgtagtccctggcctcaaggagcttacattatagaataggaaacaagcaaaaaagtaaccagacctgcaaataaaataattgcaagtttgtggtaagtgctatgaaagaaacaataggctgagatcaagaatcacaagaagagatggggtgaccagggaagaactcctgasrtcttaatattaaagtgagacttgaaaaatatgaaagaaccagacctgcaaaattggagagagaagataacagcatgtgcaaaagacaagaggccaaaaaggaccagaaatgaacataagaccagagtagatggagggtagaaaggaagggaaacagacagcaaggcaaggttgtagaggtggtaggaaagaagcagatggtgcaaggcctacaagatgaagaaaggaacttggagagagccagagtggcaactgggagaccccagaaggctaacagcatagtccaggggagacatgttgatgggctcaacaaattggggactgtggttagacagcatgcattgtagatatattctgaagacactgacacactgtcctgctacccatggacttctttgagtccctgttccccaccctgtcattggccccttgagctatttcctcgtcctgtgccttttcataagcaatagcttcctctctatgcttctttgagaggtaaggacagggccccagtctgctgaatgaccaaatctgccctgtttcagatcaccatattggccctctttcccagattctcagattccttattaaaatacaatttgatggtgaaaagagggggatgtgatactccagaactccacagttctggaatatgaaattactctacatgtgcagatctataatgggcgtatttgcaccccaggaaagaggaatagattcataatctcatcttcttttccttgccccatttcaagacttcacatgtggcaccttcaaaacagttcaagcacccctacagaagtggtcatgctaaatgtaggtgatagtacagaaagagacaatgtcatgraaaaggggagaacagagccaaccagttctttgggagaaaggagcaggctaattgggagcaatggtcttgttcacagttgggtctccagaactttgtacccatccatacatgacacctgacagctgatcaaacagtatttgttggaataaatgaatgaataaagtcaggtacaactccttctaatctttattccctgtattcatttgttaccaatttctttcaaacatttcttcaacaggctgtctttgattttcttcattttccttctcatttcyacctccctagtctaggccccaacccatcacttactttgtgcaacccaccaatgcctcmtagatattctccaatttctccccctactctgagcaatttatttaccagtttaatgttcctttataacccacctctgctgaaaaaaccataattgccccccaaattgtctatcgctttaaacataaagcaattgacccagacctgcctgggcaatgctgtttctctctaaaccctctcccstagttagggtagtcatcaccattattctccccaacttccayccatttttgaagacmtaattcaaattccaccttctaattattctgattcctgtyacaaagacaggtcctatctctgaacttatttttaagttcttaaactcaccatatctmtagaatttgctcasacatgcaaaagagatatccaatagatagtacaatacagatacttagatatccatattcaagagatattcttgaactccaagaagtgaaaggctaataataaatcaattaaaatcatggtccctggttgttcaagacatattcctgcatgagttaaaagggagtatagcagtgattaatgacagcatacctctgggaaacctacttgtttcccaagaccaatcatattggttttccccatctgtgtgcccacagcttgctaaccataactctatgaaaacacttctcaggaggcactgcagtttatcttcacttatttctctctgccacctgaccctgacctccttgagggcaagcaccctgctgtatcatctttgcatgcccagcacttaggaggtatctgacacagtgaaggtattatattttttggaatgaatatactatactgtaagatattaaacttacatttttagttcttaagttagagaaaatgactacacagctaatgagtctgtagttctgagggactagtaacttacccagagaagcctacatccaagaaattatttcacacgttagagcctatggttcaaaataaactttcacaaggtggtaaaagatacacccaggtaccaagtgctgctggatggactggtcctccagggtttataccaattgtcagagccccaaatgactgttcattgcaggaaataagatttccctccggtaaaaactatggtgcaaaggcagtctctatgtacaaaatccccaccacagacaattgttratgtcccaattgcccaggagtcctacctgcctgaggacatakttggtggagttgagatccacamtggggattgtraaataaaggtttccaacaccctgaaaagccgactggatctcaggccagcagatgatgccagaagtccggggagccttgtttggtccaaatgccaacagcttttgggaggtgaagtccatccctagccctcctgctatgatgtggaagcttctgatatttgaagaaacaagaatgtctaagtggcttcctctttgctgttcgagtattgctctgtctttttcagtggatgcccctctgtcactaatgtsyttgcctaattgctaacaatgggagagagtgtcatgtaatatgatcaggaacccacctctagtttatctcaaagtagcacagctccagttggttctgcagcattakgtgatgggagcasatggtggctgcatgcacttyaccaagatcttcctctggctcccagcaacctagtctagaggtgatgtgtatggtgttctctgccctgaagtctctgctcttgagatttaagacacaggtggcacattattccttccagcagtagtagcttcactgttactgtktgggcctagaaattttcctcatctataaatgtgatctaaaatctaagccatgaatgtgctttatttattaaaacaaaagatttatgtkgatttaattgtaactytttatgtaaggcactacaaatttatggtttgagagagtaaagttcctactgagatacctagaaaagaagtattttccaaatcccttkgaccaaaaaaaacaaaaagactttgagcaacagatagattcttscagatctatgcatggctgaagaaggtctattagcctcctgccattttcccttttttcctgtgtgttggcatttttctgaaatgcagaatcataactgctcttagattctcaaaggggcctgttacctgaaagaggtttagaaccactgctttaaactgtttaggcagcaaaataactttccctakaattttaatcagttcggggtgattaatcaagcaacttacaatgagaagaattagtgagtctcactgcaaagtttggagaatttgaggcagttgtcctggaattataaatcttagagaaataggtccttccccacccatgttgatgatagtgggttrgggctgtttctacaaattttattcctgaagctcatgaatgcacagaagtgtctcaacaccaccttcatcataagatgagccaacagtgtgcgcaacctgcctctgcagtttattctgctttgttttgtgaagacataatgagattaaaatttaagaaatctgggatgactctccacttaatctgccggtcagacaactttgtcaatttttttattttttccctctttaatcctctaaccaaaagctggagggataagacccaaatatgagacaaaaaagactagttttatcctgaaagttagctttaaaaaawttttgtttcaataatttttgcagaacaggtggttcttgattacatggataagttcttcagtggtgattctgagattttggtgcactcatcgcmtaagcagtgtgcacggtaccccatatgttgtcttttctccctcaccctccctcaacccttccctctgagtccctcaagtccattacatcatttctacacctttgcatcctcatagcttagctcccacttataaatgagaacatgtgatatttggttttctgttcctaacttacttcacttaggataayggcctctagctccatccaagttgttgcaaatgccattgtttcattccattttatggctgagtagtattccacggtgtatatataccacattttctttatccacttactggttgatgggcatttaggttggttctacatttttgcaactgcgaattgtgctgctaaaaacctgcatgttcatatgtcttttttatataatgaaagtttgcttttmtatgtcttaagagtagctatgttgttccttagaatgctggctgtcctttcacccatagaccatgaaaatttggacaagtttctgcatgtatttgagccctggtcacataatctttaaaaacataggaggaataatctctacttttcaggacataatgtctgtgaggtatgtcgcctakgcccaggrcacagcagttactcagcagcagtgtgctttcctccccgtaccttgaggaacagctgagaaaaagcataagaacttgtttgaattcatttccttttgctgctgtaacaaatcaccaaaaactytgtggcttaaaacaacacaaatgtatgcatcttacaattctaaaggtcagagttcagatgggcctcaccagactaaaatcagggtatcagcaaggctgcgttcctttgcagggctctaggagtcatctatgtccttcccttttccagtttccagaggttgcccacagtacttggctcacagccctcttcagcaatggcattactccgacccctgctgctactgccacctcgccttctctctgctgtaaactctcctgcccctttattataaggactcttatgattacactggctgtgtccagataagcttcccatccacagatccttaactgaatcacatctgcaaagtccctttgtcatgaaaggtcccgtattcayaggctgattakgatgtggacatgttgggggccattattcaatctgccrtaattgtcatgtcagcttctgtaacctacaggtatcttcctctttattacaggcacaagcctcacttattaacttcctcttcattttttttccttctcccattgtatctttttgtttgtttgtktgtttattttcagacagggtctcactatgtttctaggactgtcttgaattcaagggctcaagcaatcctcccacctcagtctcttgagtagctgggactacaggcacatgcaaccacacccagctaattaaaaaaaaaagtagagatgagrtcttgctgtattctcattgtatctttaataatgctatcatctgccagattccctaataaaaacctgagtgttgtccktgcttcttgctcctgtatttcccacattcaatcaatctccagaacctrcytcagaaataccacctgctcctggcgtccctcccttcccattctcactgcctgggctcaagcccgcaccccttctgcctggacacagcacatgctcattgctgtcttcaccacccacctctactaccccttcaacccgtctccacaccaccactcaattcatctttctcaagaactgctttggccacctcatcctcatctgaaagacttttgctggcctccttctgcctgcaaagcctccaatatcaccccaagtcacaatctccaaaggctgggccccttccctcttcccacattccatccccacacctgctaaagtgtatgcgtgtattacataagccrctcagaacttctcacgattcacccacacacaccctacacttacctgcctcttagatttctttacttgtcctgccccaactccctggagtgcccctctcttatcctttacctgcaaaattcgttcttatttcattcaatcctcacaaatttgggaaagggtggatattgttaaccctttgttatagataggcaaacaagccagagcattaaagtaactagccccagttcaaacamctagtaattgtcagagctgctattagataccatgctgtcctttagtccattttctagagttcagtaggctgctgcattattagggtgtgaatattttattgtttggctcttatttgtctcttcaatttctgcagatttctcttagtcccaaaggaaacaaaactaaggttttgtagtgctgctgccacccctgacaccctgaggagtcagtgtttcagttgccaaccagagttgagtggtcttttaaaaatgcaaatctgtgtatgatattttttttttaactttaagttctgggatgcatgtgcagaacacacaggtttgttacataggtataatgtgccatggtggtttgctgcacccatcaacccatcatctacattagatatttctcctaatgctatcactcccctggtcccccactccctgaaaggcctcagtgtgtgatgttcccctccctgtgcccatgtgttctcattgttcagctcccacttatgagtgagaacatgaggtgtttggttttctgttcctgtgttagtttgctgagaatgatggtttccagcttcatccatgtccctgcaaaggacatgaactcatccttttttatgactgcatagtattccatggkgtatatgtgccacattttctttatcctgtctgtcattgatgggcatttaggttggttccaagtctttgctattgtgaacagtgctgcaataaacatacgttcgcatgtgtctttatagtagaatgatttataatcctttgggtatatatccagtaatggggttgctggcttaaatggtatttctggttctaggtccttgaggagtcgccacattgtcttccacaatggttgaactaatttacagtcccaccaacagtgtaaaaggattcctatttctccacattatctccagcacctgttgttcctgactttttaatgatcgctattctaactggtgtgagatgttatctcattgtggttttcatttgcatttctctaatgaccagtgatgatgagcttttttcatatgtttgttggctgcataaatgtcttcaagaagtgtstgttcatatcctttgcccactttttgatggggtttgtttttttcttataaatttacttaagttctttgtagattmtagatattagccctttgtcaaatggatagattgcaaacattttctcmtattctgtaggttgcctgttcactctgatgaaagtttcttttgctgtgcagaagctctttggtttaattagatcccatttgtcaattttggctttttttgccattgcttttggtgttttagtcatgaattcacaagcatccctatacatcaataatagacaaacagagagccaaatcatgagtgaactcccattcacaacagctacaaagagaataaaatacctaggcatacaacttacaagggatgtgaaggaccttttcaaggagaactacaaaccactgctcaaggaagtatgagaggacacaaacaaatggaaaaacattccatgcccatggataggaagaatcaatatcgtgaaaatggccacactgcccaaagtaatgtatagatttaatgctatccccatcaagctaccattgactttcttcacagaattagaaaaaaactactttaaatttcatatggaaccaaaaaagagcacrtatagccaagacaaccctaagcaaaaagaacaaagctggaggcatcataccacccgacttcaaactgtactacaaggctacagtaaccaaaacaggatggtactggtaccaaaacagatatatagaccaacagaacagaacagaggcctcagaaataacaccacacatctacaaccatctgatcttgacaaacctgacaaaagcaagcaatggggaaaggatttcctatttaataaatggtgttgggaaaactggctagccatatgcagaaaacagaaactggaccccttccttacaccttatacaaaaattaactcaagatggattaaagacttaaacgtaagacctaaaaccataaaaaccctagaagaaaacctaggcaataccattcaggacataggctktgcatgctattctgatgtcactacctgtgcacttgcctgaatccccttaatggtcagtttcccactgttcttgagaggatcttaaatttcccaaaaatggtctacctgacttctttgcagggtttcctgcmtatstgtgtagcctctctcacamtatgccstgctcacctctccacacctgccatgctggcctcctttctatccttggatccactatgctccctcctatcacatggcccktgtcatgttcttccttctrcctgaaagttctcccccctcttcttggtcaagttaactcctttatcatctttcaggttttgactcaaatgtcacttctttggggagcccacatttaaacaccagtgatstgtaatttaaaaggccaaccttttcccacaagccatgttgtctcttctttaaacactccgcatataaactgacaaaagaaatctaaaacatatcaagagtatctgattgagattgcccttaaaaaaatgaagaaaattgattcttattatctggcgagtctgagastggccccaggcatcaggcatttcctaacaatgacaccatgaaatagcccactctgaacatcaccattcaatttcccctatacgccttacacttctactgtatctcatatgacatggagcttggtactgaatacttaacaaaatttttaagtatacttattattggktgactaattgrccagtaagtttcacttgggacatctttttttgaaaacagtttggcagtttctcaaacaattaagcctacaactattatataacccagcaatgtcacttctggacatttatcccagagaaatgaagatttatgttcacataataacctgtacaaaaatgtktatagcagctttattcatgatagtcaaaacttakaaactaccaagatatccttcaacgagtaaatggctaaacaaactttggcacatccataccacagaatatatcaaraataaaaagaaaccaaccacaytgacacacacagcaacctggaagaatctccasagaagtatgccsaggaaaaaagccaatccttaaaggctctatgctttatgattcatttgtataacattcctgaaatgacaaaacgacagaaatggaaaacagactaktggttgccasggtttakggaaagcatggaggtggaggggagtgatgtagtgtagtgsacaaaaggggagatacttgtggtaaggaamacactctttctatcaatattaayaccttggttgtaataktgtactatagcttttcaagatgttaccattaggggaactgggtaaaaagtacaagagatctctctgcattatttcttacaactacatgtgactcaacagttatttcaattaaaattaaagtttgtttttttaaaagggacacatttaataaaatgtttgtaacacactaagrtgttcacaaacacataataactgtgatgccactaaatgtcttctctcttttcttttctcatggtttgttttttatttattactactaaggattttattttcctctacttaagacatacataacgttgatcactttcaggctattttcacaatgacagagaaatatattatattagaawccttattttttatgtcccttggttgcctgtcatacattactctgcatgtttttcatcctgatcaagatacaatttatagaactgttggtttgtacttcaatctctggcagtaccataacaacaaagtataatattgcctttatcacttcccacgtaagaaatgtttttgaagtagcactgctgccatctgccacctcaaatctccttgtccagttctcagggttccctgagctcagtattagtattatacttcaataggttgtcattgtttggaaaactttgttttgactggctgttgttcaaatttttcttcggtccttttcatctcttcatcatttatctgtgaaagtttaatacattctgctggtatcacccttatwggatttccactccattttctgttatctttgcctaacacagtttatttaggttttggctttttttccccagttattgaagtggttgtaaacatccacattgtgatagaaatccttgctcagagagtccatgaccactttgraagtgtttactgtaaacagagcagcatcagtaccgcattttattcattttcatgctttaatgtaaaaattctttttgctttctctttcagtgagtacagaaaaaatccaggaacatatcaccaaccaggtattctctcatttctcgtaaactctaatatagaattttgtttcaatgttaataaacatgtgtaaatataaaaaaggcagggggtaatgttagctgttagttatgagcaatatatatgttattggttctggggaaaaaaacatatttggtcatatgtagatgaccatgcrctttctttgtctcctcccaagccaagtccttcccwaccacatcctatccaaacaggaaacagtagactaatgagactctgccagttctaacttgcaagtatctctgtgaccttattgtgacctctgtattgatactatcatggcagcaaatagatacttccatctacttttcccttaactaaggtgactctccgtgattttctcaggttttcgttcaatcagctaaaagtcactgcctcccaaacagctaagaactggccccctatataccacaagttgatcttccattctsgtcttttgtttctactcacagttggccagcatcttcctgtctgcatcatggttttcttatcccatcttcttactgatctatttttgtatttctaggtagatggtgtccttctayagaactgttttaggagcttgagacctgcagccacacaaacaaagagaggccttccccaaaagcatatcttgccccacccacctaatttttccccaggccagcttagctacagtttctccaaaccctgcctgtgccactagagtcagagaatgcagacattgacctgtggraaaatatgcttgggtttcacccataggtacacatttccatatcttcyttcttttttcctttcaatggcataaattacagcttacccttaccaaagagaagggtggtaaatctacacttataccagtcaaaggtgcatttttcaaccttctaagtgcactccaaaagaaattccaattctagttcctattgtcagtccatcccaataaagttctagttttacccaatctgtgccagatgccctgtaactcatcaagctttcaaaatagtcaacccatttggctaatatactatttttcaaattcagtagccaaaatttaatcaggtgccattttgtttttaaatactgttgtacatgttgacttgtagtagcaactctcttaatacttgaaaatgccatcattgtgaaatagcaaaatcatttggccatttcaaatagttcatttgccttttaaacttagtttctttcttttttttttagacggagtctcgctctgtcaccaggctggagtgcagtgacacaatcttggctcactgcaacctccgcctcccaggttcaagcaattctcctgcctcagcctcccaagtagctgagactacaggcgtgtgccaccatgcccaactaacttttgtatttttagtagagaccaggtttcaccatgttggccaggatggtcttgatctcttgacctcatgatctgcctgcctcagcctcccaaagtgctgggattacagctatgagccaccacgccggcccttagtttctttattacttcatttaaaattatttgtatgtgctcaagtggtttggtgaggctcagcaatggttagccagtaaagtttaytgctgctatttttatttatttaaatcatataggaatacttttccttataaaaagccctgttttccttataaatgtaacaacctacctgtttcccttattaacttaacaacctaaagcaattggtcaaaaaatatactaaggtcacttctcatgggtagatttccatttcctattttagcttctttttacgtttagcaaaactaacaaaatatgtagacaccaaaatagaatgccaaatatttactcataatcttaaatattgatctgatgccatataaaattataatggttttcagtctcaataagagagtgaaattctttaggatttaactgaagagggaaaggtcttaatattttaattttacagtcattctcagaacagatcgtcgtctccttcaatcattgcttatatttctaatcctacagtgaaatttctattcattcttctcccaagtaaagaagtgctccccactctcaagaatgatacactggcaatacaattcaaaaaggtatcttatacctctaatttatataaactctggcagagagtcaagaaataaagtcaccttctttttcaaatcactatgccaccaaaataatttggctcttgaaaaacatttttgaaaacccactttagataatccatacagtattttttatcaaaaaaaaaagrcaaaatggagcgcygctgagcattaatcttgccgctaaatccttcccattaggcactatggattgtgtaattaaattgaaattgaaaatcgagtcttttctcccccccayatcaggcaggctatgagtttctcaccaacgtgagaaatcaggagtggaggggaagctctagcctgctggccaatatccagcctgtgcttttagcccacggctattttaccacacctgagctctgagaacaaacaactatttgagtcctctggagggaacgctggattctttcctgtgcaattcactggggaaattagtatgctttttaaaagtaacttgttaacgcagcttgtttacgagaacaggacaaaaatgagcagtgaactgcttggcagcctctgttctagaatgggatgaatgcatgacccattttttttttcagctgtctctttggcagttcaatgctgcaatcatttcctatctgaaaaatgttacttgtagagatgaaatcttctataggttttctaaataatttttatgatactagatgaaagataatactttaaaatattaccaaaaatgctttcgaaatcaaattaaaatatggtcagcatgagaatgggaaaactaaatgtaaaaatcctaatttaatttttggaaactgccttattatataaaagacaattaaaaccttttatgtttatgcctttttatatagcagataattgaaacccttagtgaattaataccttgtgtttgtgcagctagataacaaagaggaacaccgaatatgaggctctgtttctggtgcagaggatgtctatgctgtggagaacattcatagacaggtgctgtctacgagaaacgcttgccctcactgatgacccagtgcagagagaggcaacaccagtgcaggccattacagctctgtattcggtccctagggctgccaaaacaaagtaccatgaacaggtgccttaaaacaacagaaatgtattgtctcacatacaaaatacggggtcagcagggccatagtctctctgaaacctgtagggaaggatccttccttgctctttttagcttctagtgcttgccagcaatccttgacattccttggcttacagccacatcactccactctctgcccctgtggacacatggctgccctccctttgtgtccctccccttcttataaggatcccagccatcttggcttagggctttccctcaatgaccttctcttaacttaattgcagttgcaaagaccctattatcaaacaaggtygtattcttaggtactaggagttaggacttcaacatatctgtttgggggacataatatgacccataacaagccggaaacctcagagtcatcctcgactccatcactccctctgagcactgggcacttctgatgggatctcctgttgacctctcccaaccagcttctcacctccacccataacccctgcttcatccaggcccttgtctcatttgctcggtgatttcctgaggctctcctgttagcctcaccacctttctattcatcttccattctcctgcagtktgctttttaaaatatcatcttgctgagaaataaaaactaagtagaaaaacctcccctattgttaacagtgattttaaccctgactgggcattatagtcacccctgaaacttgttaacacagatcctgagaccccatstccaatcctaaccccaagacattctgggtcagtagctctagacttgggttaagacacagcacaaccctcagacragaccaagaaaggtcacaggctttaggagtctccaagcatcacaaacacagtcatgcaaaracaggtttttttttctgagtctcatgttttaaagtttcatgaccaattgagagcacacaaaacatggaaaggaacatagcagctgaactgggtcatctgggcaaatgggatagaccaaaaaaagagtgaaatccccttattgagagaggtcaggctgtgtgggccctgtgaaatcaaagaaagaagggatgctttagtttctggatagccacccagtagcccctgaagtgggaggatatataggcagactgtgttccccaggtaactgtacttctaccttcccctctgcttggggagggggtatggagtgggtgagtatagtttcacctggtgcttagaacctcctggtaatctggaatcagaaaagtaaaacatgaggtaggagaaccttttccttcagtaaccagaagacctggactgagtcatttccatccttgatgggggcagatgcaggccctgcccacgagtccccaggctaagtccagggtccgtcctgtttcccccgtgaagttccaagcaatgaatcaggcctctagtgcaggatggccttgaggsacagcagggcttcttaagcctcctagtcccaaagcagtcccttggatgggaacaaggaccaggtcttgggtgcagcttcctttaacactttgaaatagttcgacatatagtatgtggacctccattcatgctcttgctctaggccccacaaatgttgggaatgatcctgctcagacatttgcaatttcaaaaactcaatatgtgattctgatggaaagccatacaatacgtttctaaccttggagtatgaaatacaaagccttgggatcttgtactcctttggagaggattctccccaccttcctagacttatttcccattctactcctttatataaaactgttggttctttataaaactatttcatcaacgtactaatccccttctcttcatgtacaaaatttactcatataagacctaactcaaatactaccttctccmtgaagctttcctttatcacatagccaagaataatctcactctcttccatgaccccattttattttctctgcccttttgctatagatattttctaccctatattctaatcatttatatcccaacatgatttttgaaactacctagtattgccctaaagggaagagattgtgtttggttcatttccatgtccaacgttgggccttgcatatcataagaactcgatcaactgctggcagaatgtaaattcttcagatcactaaattcttattctagtagctagaggggctgctaaatttagagtctactccctatacaccggaatgttcaaacctgctgtgtcattgattcttataaggcaggaacaaggtatccttccttcccctcccaggtaaggattctaaaccaaaaacagaaggaacaagccaagactgcacatggtcattatgaataatggtcacacastcaggaaatgaaagaattgaagggcagggagatccagatcttctttttacctgtatgtccatatccatattgcctgcagaacattaaatggtttgcctggttcaagacttgagtacctgattctttcctctaatgtaagcatggcagtgccactcactgatgacttttcagtgtagtgtgaactttagaacttctaaatttaaagtgggattgcattaccttgcactattcttatcaaaatggccacgcactcaaggagacaattttgacttaaagatagtttctctttgcaagtttggcactaatggagctagtaaagatcccacatgtccctaattcccttttaagattaccttcagaattgagagagttgcacttttagaaaagctatccaatttacgagtctttttcaaaatcctgaaagaaggactgaaaggatcgaaaagtggtgacactawtggtggttaacaaagaagaatttataaaagatgtcttttttaaaggtcagatggcttctacctakaaaatacttaagtgtaaatgtcgaagtgctgggctttgcctctttaattggaagccaagaaagttaaaatgtgaagggtacctgtggaaaggtrtctakattgacaagacamagcaaagctgagaatatggccttcagatgttttaaaagcatgaccaccaagaagaaaatagtggttggaataaacactgtgagaactattcacaatcaaatatacagacagctctcattcaagcactcaatgcttctgaataattgccatcaataattgtgctaatcactcagtgctccatatctcatgttttgttacaacaaccctgtgaggaccaggattttaatctccactttatacaggtggaaactcaggcttgaaatcagatttagtaatttttcaggtcctgccacattkagcacgacattagtaataataatggtcggtattattattaaatgcttgacaagctttttgtgtgtaggcattatgmtaaatttyacattaaattatctctcttaaacctcacaacagtgaccctgcgaagtaggaacaaatcaaaagattcatcttagtgaggcraattagttcgtctaaaatcatgcatgcataagtggtcatgccaggattaaataaggcaatccaatgctatctacagtgtgagcaacagccactattctgggatgctttaaatatctttccttaatggcactccgctgatgagtggcagccctcaaatgtgaatccaggtgtatctcattctgaattcctttctctccacaattatactacactcccacctcttctggaagctgttctattaattaaatgatctcacttatgaccaccctaattaatcccccaattctgacaccaatactgaagcagtctgttctgagaccctggaatacagatttttatgatgtggtatgtcttttttcaaagtgttttaaccatgaagatgagcatacatatactccagggtccctgttgagcggtaaattacttttttaattaagtaagtgaaaaataaagtgaatctggtctaagagaaaactatttgtcacctgaaaagagattaaaaactcagaggggaaaaaagtatacattggcataatccgttgcccactgccagttttccttggcagagcccaggcagaaatatcatggaaataaaaagagaatttgaagtaaaaaccttcattttcactcaytataaaatgttttctttgtgtttcttagaaaagcatgttacttctaaaaactctcttacaagttctttattgttagtaataacagtgtcattgtgtatgtacccatgtgagaaaatatggaatactgaaactccgtactgaaaatgtaccatttatgaaaaataaaaatagttaatttaccatttaatgtaaattagcattaaccacaccacctaagatgctaacacccaataggctggtgaaatatattccatgaataattttctagtcaatctttttctcatctttttcctcctttctgttgagtttttcaaatcatawccttctctgcttgctagcatctgtaccagaagatgaactgagtaactgaaatgtttcagcttagcatattttattagcaaaatggttagcatcatcatttgagatttttctctcaacacatagcaacgaaaggcagtagccaagttctaatagccaaaagcacaatttagtagagccgttcagtattgagtaactcatcacctccgtatagaaagacactcacttcataggttaaagctattgtcaatatgagccacagagcccacttgtcatcatgtttgaatatgcattctaaaatacagtattttttggaatatgtttgaatatgcattctaaaatacaatgttttgttttttttttggctacctttaaaccattttatccatgctattctttcttcttgtgataaagaacttgaattaaggactcaaatgaaaacttgatattttctggcgatatgcaaaagaagtattcgagtartcatcatctcagataaaagttgcttggtaacataaaagagttatgttttaagaaacagtgatcgtgaataccaggctaattctgtggaattcgtgttgtatatatggtctacatcccctaaggcagatccctcagatatctatctacggacttctcttaaatttgatgcatccttttgcgtatgtctgcattttgcagaggtaatgttccttggtgctcaccagaacctctggagtgaataaagtcaccctggagagttttctacctcccactagagatagaaagtcactaggcattccttttattatgcataaattgaaaccaattttatttaagctttatttgacaaagtagcacttgtttttcscagaaaacaaatttccgggaaggagaaraaatgcggacaaatagtgaaaattcagagtaccagtaaggatccagtgaaaactaccttgtccttattatccttaatgttgaaaaaattcttatacacasaagtgttatgttatattctgtggtcgatcatcaaacaaggatggaataaacaagattcttccctgtttcatcactggtatatgccttgctcaaaatgtattaaaaggaatatttttatcattactggataatgcaattaggccagtgttctgtggatgtggaataatgtaatttactatgttgaatgattagccaatcagaattctctcattttctaaagcagtggattgattaaaatgtgaccataaacaaaatagattttattaggcataatctactttgtaaacaaatgaaattaattctttgcctgacctaaagctttgaaaatgaaaaaccaaaattgaacacatgcttccaattttggttctgttactaagatgacacttaatataaaagttacaatttaacttcccctcaagtattccatacttgagactaaatgactcttagaaatatgttcatcaacagatgggagccacttatggcctcataaactctaaagcaagtgaaattatctcagcaaaatagaaggagattacaataaagcctcatctggttatcttcagtgatgattaatgcattgtacattggttcaatgatgcaatgaatattgacagataatcacccttcttcatacaagagaaatactgaagatacaaatgccagtgatatatgcttttaatcaatcaataagcaatttccacatgtgccctgtgtacagaactttgctaagtgctatgcaggatgtgaaagaaagtgccagccgagttcctactctaaagggattttctatcttgaaagagaaaactaaaaacctgaaacactgcacagaatagcagagggtgtgttattccttgcttgcttattaatgatacagtatggatcatatgggagtttgaaacagccaaccatcagtgaaaactacagtgttcagggaaggatcgtggaaggctttaaaaaccgaagtgatgtagacttgattcagcaggaaacacaatgtggtgrcactgaaaatgttcgagttcagaaattacctcaggaaattggtatgaaatttttcctgaaattgtatcctgtattttcctttttgctccctctccactggtaccagccaccagtctctctccaggmtcttcgggtttcctcctgcttccactcttaagaggcccaagtctgtttgccacttggctggcagagtacgctttagaaaatgtaaactacggccgggcgcggtggctcacgcctgtaatcccagcactttgggaggcgggggcgggcggatcacaaggtcaggaaatcgagaccatcctgactaacatggtgaaaccccatctctactaaaaatacaaaaaattagccgggcgtggttgcgggcgcctgtagtcccagctactcgggaggctgaggcaggagaatggcgtgaacccgggaggcggagcttgcagtgagccgagatcgcgccgctgcactccagcctgggggacagagcaagactccgtttcaaaaaaaaaaaaaaagaaagaaagaaaatgtaaattacttstgtacctgtctaaaactccccatggcttatactgcacccctgtaaaatccaaagccctgaccatgatctgatattcmtatacggtgtggtcccgacctcctctttcatcccatcttgggccgttcgcactcacagggcaaccacaacagccttgccctctgtccttccacctggccaggcccattcacgtgtgatggcctttgcacccactggccatgttcaaaacgctctgcttccagcccttgggttccttgttgtcattaagatctcagccmtagtagcttctcctcagagagatcttccttggacatctatttaacgtaaccttcccactctccctctgacatcttctattgcattactgttttagtgtttgcatcatacttggcaccacctaaattttttgtctgtccaattttttccttgtttgttatctatcttcatccatataaatgtgagtaccttgagaacagagacttgtcagagtcgtttgccccctagccccaacaccagaaaataatgcacatagtaggtgctcagtaaatacttcttgggtgaacgtgttgcttattaattcttccagctgaggtaataatstggacatgaaaacaaaatgtgtttaagcaaaatcttgatcatgggaatgaacatttcaaggggaaaatgaatggagtttggtgtctaaatataggaaaggaatgagcaatctaagacaagcttagcgcgaggttctcacggttgctgcagaaaggtgatactcggcaaaaatataaaggttgtggttaaaagccacattcagtgagtatacactacatgtcaggcattacatatttttcagaaccccattgggtgggcatcattatctcttacagataagagattgattcagtgaccccaagtttttcagctgggtatcctattcaagtgattgaggttgacttggttaaaagtactaatttaagatcaacttacagttgcaagcatggatgggggtaaaaatgtactaagtctggtcttcagagctacctctcccccatttcccaagttactgggctgaactggatgtgggatatgcatctcacaacctacgttggctcacaggttcttttgcaaattggtctatgcacgtgtagattcctccaggtgtcctcctcattctgaaacagttcagggcgggcaactggaaataccttgaagaagacgctgaagagaaaagtgcctggataaaggtaggggaaccagattaatagagcagaatgacacctgttattttggagacaaccacctgaagggtgataaaaccccagagaaaataactgaaatgcaatacatgaatgctttgcttccatcgttttgaacatccatctgataagttactacctagaatatggaaacttgactttgctaaaaaagagttctataagagaagcccagagaagacaatgctactgatggatctggggagttgaagatactgcaactgaacactcaggtggtctcttactggtggcaggaaataaatgttcttcttcaatgtagaaatcmccatggagatggcattatagagctagcatctcagtgataaaaagccatggggaccaggttccttggtccctgggagtttatcaggggttgaaaggtacttcagcttgccccccttcacccctgatccagmtaacacacacagctccacaagtgctggcttgttctcccagattttttgcagctgtggaagtgccaagatttaaaataaattttcttgaaaaaaaacaacattgatggagtgaagatattattactccatamccaccaagtctcagtatatgtgtttctaacagtagtgtggaggcagaagtgaagataaagatcccatgaagataaggagatttgttgcaaggctgacataaaagctgagcagatgatcacaatctctgtgtggtttatgctacctgaggagagacccaaagtccaggcagtgctgacttatatcattgttgtccaggagcaagagcctagtactttggtcattccaacaatgatgttcagtagagcttcttggtacccaacatatattattttaaactggagagctgaagcaaccaaaggtgggatgatgtcctcattcattctaactagagttgactccggcacatttggctacctcaaggtaactcggtacaaaggattgtattcatttggatctgatagcaaggaaacactcctatagttacagatgtgatgtcaccgagaggaaagcatgggttaggtagtgagagacataccattttggagctggacaagactggattttaatcccacctccagcaattaattgcccattataaaatgctgagtaagtttaataaaaatatgatctcaaccacctgtcagagccagagtgaggattaaattcaattattttgtgcagcatctggtgcatgtgaagccctcagtccatactcattcaaagctcactcttaccacacagcctctccctccagccttgcttcaggaggtctcctgtaactgaaggagagtggagccctggcaggagtggagacaaacaaatggactttccttgcccgttgaaataaagacaaccctctttgctcaggaggaagcaggctccagggacttggggatctcaaaatatggtcatgagtcacaggtgagacaagagggtcttcccacaggtctgtgaattaatccagaagggcaagtcttttctttggtttttacagatgaatggtacccaaatccatacactttcaacttgctacagtactggctataggtgagttactattggcctaaaatgatggaaggccctaggaaaattccttgtgtggcacttgagacttccttaccccttcagtggacagtcgttatcccttgtgtggggagtagatggagttaataagctgtgatactatttctgggcaaggtgcaataagacgtgtttgttcctcccaaggtgcagattacagaattgtagtgagggaagggggtaatgatacagcatctaaggaatgtgtagagagttatacttgcctgctttatgatatgtgtatctctagagaagactaggtagaagcctgtccatcaacatctcaatgtaaaagagcattgcagttggatgcatcaacaatccccttccaggtccctgcagctattgtggttagcattgctgttcccatggctcaagtggctttggactastaggtaatgggtgggggcagaaacagctcccctcwcctcccccaccccaccccaccccaccccatgtatattctgcttcctgagacttgggctatgcctacaggaagtaacasaaagggttggygtgcccccagctccctcccctctgccaactgcacattgcacttactgaggctgggctgctggtggcaggygcccctctgygatcctcccatggccagaggaactcattctacaccagctcttgggagtaaagttgtacasatactgaagacttccatcctcaggccaaaaggtcaggatcagtgcaacctatacttgccctcacaaagaaagggaacaaaaggagaggctgtggccatggctgcctccagtacccatttaattgatatcttgaatcaagtacaactgtktttaggagaggtracccattttggaaaccccaaaaagctgcaaaacttagagttaatgaaataatattctaaaaaataaagatgataaaatgtrtctgaatgcatgcatacatakaccttgcaaatatccatttgatgctcgcttagttttgttagtgctctattcactctgacctcatcatatgacaacccacttgactcctgtcttcccttctgtccttctgctttgctgctagtgtaattctatattcttcctttgcattctttctcagaatgaaatcctgaaaagaaaccccactcagcatggactcagaatccccatggcatgatctgataccacaggcaatctctcttcctaactyagggcccaggtaacacatggtagcaccagagtgtgagctgcctgctctccagtgagggttagascaggctttggggagctgtcttaagtatagctgagttgtcaaatatgcaagtgacataagycagaggggcgtgtgtttcactcaaaggtgctgacacaggccaatctgatctgggaccagtagatrcttaatccagtgagacgaatggagtgcattcctgccagtgcccctactactctcgcacatggcaatgctgctcccaggactcaggtggctttggactagtaggcattggcatgttgggcagggttgggggcaggtatatgctgcttcctggaaaaggagtgtcacttacgtcatagcccccagcttcaccttatcttgactcagatgccctctcagactcctattctgctacttttgtgcctcctcttctctcttcatctctctctctctctcctcctaccccgtaataactggccactctccatattttccagtctacagcccaaaagrgagatggacacattgatttagctagttactctctacccacttggacagtgtcttttgctccaggtcccctcattggttgctcactggcctatggatactattaattgaattagcatccacctctgtcaactgcttatgcacacagggactgttcccatggtcatcttaatctgaagttgggaaagcagcgttatakatgatatgcccggtatttaaagaaaatcagagaaraaaggcrtakagacasgatgcattcacattttggagaaacctactatatggcagacactatatgtcaggtactgtactaggtactttataactgcatttatctagttaattctctaaaagacttaccttttcccagtatcagagtttgagaatcagagggctgatattttggcatggctcttggttaaagggtccaaagagacctcctgcccaaagttaggattgccttctctgagcaacagaattcccacagatctatatagycttagctgaacaggattagggttccatctagttgtagggtgttccttttctcagccttgtttgtgtgcatagacacaaacatacaccatggacacttccaaaggaagagtgwgtataggaagacagaattgagacctcttactatggtaagacasagtgtktggggtsctggatcccagccaaygccttcacttacatttcaacgtttccaaaatagttcttggaattcccactttaaaaatgaggaaacagactcaggaatgttaatggactctctgtaagagtgctagctgtgccttcccatatttattcatctcttaacattcttttgcactccagccagacttycaaccaactacccacacctgtgactctgcctgagtgagtccaccctgcccgcctgtagagcagactggaattgccagaactcgccctgcagaaacctttaaccacagctgataggattgtgtggaataactctggggagatatgctctacatttgttctgagggctcctcagtagaattcagctcctattcccactgtgctaacttgctcaataatccaccctatattctgtgcctttcctttctcagttccctactctcctgccagtgtttcctggaatcaacwctaaattaataacttgytctcaacccttgacttaaggtctgattctaggagccacaaatgatgacattgtcctaaaatcacccaattaataggtggaagacctaggcratctgacgcaaaagcttcatactttgaagatctatccagccaccatgctcctgacctcacaacaactttcttctytcttgtacttccagtctccatctcaggggagcattccaactcccgtcaccagggatgacccatgtctctggccccctggtgcactcaagccaatccccttttccagtgtcatcttatggactcatcccccttgcctgtgtgtggggaaaagaaagagaagtcagactgttactgtgtctatgtagaaagaagtagacataagagactccattttgytctgtactaagaaaaattcttctgccttgagatgctgtttatctgtaaccctacccccaaccctgtgctccccgaaacaagtgctgtgtcgactcaacgtttaatggatttagggctatgcaggatgtgctttgttaaacaaatgcttgaaggcagygtgcttgttaaaagtcatcaccactccctaatstcaagtacccagggaaataaaacaccacggaaggcsgcagggacctctgcctaggaaagccaggtattgtcygaggtttctccccatgtgatagtctgaaatgtggccttgtgggaagggaaagacctgaycgtcccccagcctgacacccataaatggtctgtgctgaggaggattagtaaaagaggaaggcctctttgcagttgagataagaggaaggcatctgtctcctgctcatccctgtcatcgrcaatggaatgtctcggtgtaaaaccctatggtatattccatctactgagacaggagaaaaccaccttaggactggagttgagacatgctggtggcaatactgctctttaatgcattgagatgtttatgtatatgcacatcaaagcacagcacctttttctttaccttgtttatgatacagagacatttgttcacatgttttcctgctgaccctctccccactgttaccctattgtcctgccacatccccctctcagagatggtagagataataatcaataaatactgagggaactcagagaccatatgctgagcgcggatcccctgggcccacttttctttctctatactttgtctstgtatctctttcttttctcagtctctcgtacccccgccccccgacgagaaacgcccacaggtgtggaggggaagacctccccttcacctgtgaaaatctttttcttgccaatccatggccataacacacacacataaaaagaaaacttgacattttgaaattgcaacacaagacagctggttccttyctcttcaccacattccagagaacaagaagaagaactctgtctagcaactgtrtactttakaacaaggtgtcagagtcagggtgcacccctccattgctcctccaaaccctsttggacacacacattgttgttggcattaacctgaaatgcaaggggaggggaggctggctgaccaatactaatttcagacaactaaatacacggaaatattaaagagccatatcccaaatccattagatatctaaaatccaatgaaatgtttaaatcctaatagtgaaaacaccaacttattctacttctttcctgccaaatataatttattgggttttgctgttcccatccacatttaatatgtacagacacamacctaagaaataaaatagggccamacattttgaatgtatttcatttatcaagttgcagctcctcattaaggctttgagtttctttaaaaaaacaagwtattctgctaactaatgtktactgggttagaattagagaactggactacattcctgacttctccattcattttmtagagtgaccttgtgcaagttattacacaagtctgtcttgatttatttatctgtaaayttgcaaacaaaagagtcatctcatttttcctacaaaacttggaaggaagatagaatgataaatctataaaagcatattgaaccccttggggagtagccttatctacttatatacattaaggttatgtcagttttcmgcttctgatggtcttgtcaaaccagagcactgtttccaatagaaacttctccttgacattcacattatgttaygtcctcagtcctcatattttaagcttgtttggcttcaagcagaaaaaaaataggaattaaatccaaaaatggaaagaactggcaaataaaaccatagtttcaatccttgaatccaagaggaccatagaaattagctttttggatcaacttgaatagcctcacaacagaaacagctgktttgtgttgaagcagtttaaatattttaaagctcatagcttggagaagactgtaattcagtagtttctctctttacccactctcttcaagtgttcactgttcctccctgttacccataattgtgatttcttttcttctgttttctttctttgcctttgcctccacttaattttatcttttctctttcccatttctgtctctcaaktgtcttatccttctctttttttctcactcatttttattgccattgaacatttaactttgctacatgttgtgagagagaaggaagaggagaaagagawgaaaaaagcagaataaaaaacaaatacttacctaaaaactgcttatcatatagaaattgctcaaaaatattcagcgcctaaatcaataaaaawatctaatatttatggagaacatatttacattaaggaatctctacaggcatttcctataatccaacaaggtagatgttgttattatcttcattttccagataaggaaactgaagctcagaaaaacaaaataagataaccgaggtcayccagagagaaaacgayagaagaagacacataaccagttctgtctgactcaaaaatccatgttcttaacgaccatactctcttgtaacaggcatatgcctggtgctttcctgacatcagttcatttaatggacattaaacaagaaatagattgcttgatatatgatgcagctgaaaaaagccagrcatgactaagacagagatttgagacacyagctccagcaatagctgtgttaacttggcacattatttaaattctctgagctcaggttcttaatctgtaaaatgagcttatctgyatctactcttctgtttgaygcagtgattaaaccagcttgctccatgccctagtctattaattaactaggcraacaaaatggagaagaatattcaagagagaggaaataagtcacagagacaggaaatggaaatgattctgcctggctcatagtttctcccagataycctccctcacctgcgagccaggattcctctttcatgttttcctgtgccaawtttttttttgtcctttaatgcaccaagttttttctccatctcattacctcccataagtataactttggttttcttatttgtatctccctaccccaccctgaccacaaggatgctccgtaagatcagggaccaagtctgtcttgctagctataccaccaacrcacagcccagtrcctggagcrcagwttgtgctcagaaaacamgtgtttaatgaataactgaaggtggaagggcaaagggtgaggatggagagcgagatggggcagatggcactggataktaggactccgtactcacattcttcccaattgtcctcagggtctgttggaaatgyagtcrcagtcttcacccctctcataactatgccatyagcttctgaagccctkgaatcaagatttaagaggagtagctgtggcacagagggacccaggagagacacactgayctgtgtccccagaaaagactgacttttgagcaccccaccctctcccatcatttatcttatcaatgactggagacaattaggtctccttgatggtgtgaagaaatataactgcacktctmtctagattcaaggtraatcacaaaagatacrttattaagagtaatattataaattactccctgggcagtgccwtcaaggcccatgaatccagctgcacctccaccagccaacaactcctgaatctatacccagcttttcagtcctgctatctacctccagctctctaaggcaccttaaactcaagaggtctgaaatcgaagatagtgaatgcccacacccaccccagggcccccataaaaactgctacttctatttcttctctcagagaggaaatggggagccattctttacacttctgtcacccttatgcttcgaatctgagcagtttcctaagtttgtctcaactccctttttcttcattcttaccccattgtcttagttcctctcctaaggattcctgatggacaatcataatcatcttccagaagatccctctgcccccaggcacacctccccactgccccagaatgttttaaatcgtgaatcttgtcacgaccttattgaaaatccccatcatatatatggtaaagtctgactgtttatatcagcccaggccctcctggaatgacacccaacccctcctgcctctccctgtcatctgagtctggcccccaagcagactckatgtcaggatgtacagcccttgccatctctggcttgtccacctggtagctcctcagtcatcttcccaggctcatctcaggcatcacctcccttgtgaaatttgcccccaaaaatctctccasaaaaattaarcacttttttctttgttttccaaatacctgacctatccttttattatagcaattgtcacattttttcataaactgcttattttcatcagatcaattaaactttggtttccttgaagggccacaaattttatctatctcatccttatttatataatgcttaaaacaacatacagtagtaattccatatatgtgcattgatgaaagaatgatcaaagtctcaagttttatagtttccataggatccacaatagtatataaggtcctacaaatgtacaacacttatcaacagtataaaaccaatgtgaatttgttgcctgaataaggagcagtgcaggaatgatattctttgcttcaatcaaattcaaacatatgttattaatgcaagatagtgttcttgatgctagtgggggttatatagatttaaaagagtgcacactgacatttaatgaaattaaaatagagagatcattacctaaacaattaaccctaacaactacctakaataaaataaaacacartaaacagaggacttaacactcaaactgggccagtcttttctttgtatcctggacccccatttctgctctcccagcttccaatagtatcttgctggagcctttgccactatggtaatagattaattaattgtgcagttatttgcttaatatacttttccctatgagaataccaactgtrtatgaataaagtccgcacttgtcttataaaccccaccatctctggcatccagcacagaacctgatgtataggaggtgctcaacaactttgacggggagaaagaaagtataattcatatcagtgttgaggatcgataagaattcacagaggagatatgcttgatacasaaacccttaaaaataacaagaattggccaggcgcaggggctcatgcctgtaatcccagcagtttgggaggccgaggcggctggatcacctgaggtcaggagcttgagaccagcctggccaacatggtgagaccccgtctctactaaaaatacaaaaattagccgggtgtggtggcatgcgcctgtaatcccagctacccaggaggctgaggcagaagaattgctggaacccaggaggcagaggctgcagtaagccaagatcatgccattgcactccagcctgggcaacagaacaagattccatctcaaaataaataaataaataaataaaaaaataacaagaattaggctttcaagtttattgcagacttaatgaacattccacacatttttccatattttttttagatactcatttttttaaatctgtagttacatgtctttcagctaactctgcaatatctactctttaaggatatttatggaaaactatagctttcctccatagcttacaatttagctgcagttaaaagagtttttccaacaaaacaatcaaataactgtggaagctggaataaaattactttcctcacaggaagtacagactaagtgctatagtcatttcaaagggagtagaatcactcactggagacctgggtggttgtcatggagaaagtaggatttttacatcaaactagaagattttgaacgtcccaagaaaggaggagaccatgagttggggctgccaagagcccagataaaagcaagtggaggacagggcatgtgttaagagagaagcaaaaaaagcaaaaggagaagaggctcagcagcaccaggctgcaaatgccagcaaaggaatggggacgttcactgatactagaggatccagttcaaaatgttaagaaataaaaaacaaaatgtttggggaagaataatttagtaataattgcagggacactaattaggaggataatgaatatccaattgggggtaattaatttagaaagatacaaaaaaagaagtattatgagatgtaaaatagccaatttactttcccattgttaaagcatctctcagattttgtgagtgggtgacaggaaagtaataggaccttttcaaaaacggaaaataacacagggggagccactcttgaaggcaacaggataattttggctttatatacatgtttgcctcagggacaatcagaataaagtgtcccaaggaaaatggagatgtaagattttactcttttattattgttgtgaagatgatgatgatgatgatgatgatgggactttgttggtatgagctttaaatttgaaatgtcattagctatgattttagtaatgcaaaccccttagtcatggagtctttgctgtgattggaagaaaatggagttagatgggggctgggagggatgtcatcaaacccgaataacagcttttataaggtggatgacattgagatgaggagttccaggagaaggtctggtggccacccttgtgggttgctggtgccattactttagagaattaacccttttcccatatctcaatttggttagactagaggaaacttactagcactcaataaaacaggaggacactaatttatattgagtggtgaacctttccctcatgaggttatctccccagctaaactagtctttagaaagttgcttggagatccaagacttccagcaacgagaaatggataaacaagaaagacattgcatctagtctgcatgagggctcatgtgacattcctactctacatccaagttatttctcttcttactgaaatattcaagtccactacatttgatgtctttctcccccagataggatgaaaggaacttttcaaggcttgtgcctttttttatactttcctttcttatattctagttcagtagtccccaaatgmtatgactgccactggagtacctggggatcttgttgaaattaaagtcaggggccttacactcagacattctgattcaggatgtctgcagtaaggcctggaaatcckgattgctggcakgccctcgacaggtttggagacagcgttgagtgactttgaactgatctgatttggcaggcaggttaaacacgaagcctccacatctactttactgcaagcagattcccatgtgcttattttatktgttttctcttttgccaaaggtttatttaaacacagattctcatcaccttaacaagaattggtcaattgtttattcaagtttaacttsaccttttggtcaatgttgtttttcttcaacaaggtcataaaacagttgtttagaagaccrctattaaattagaagcacatttacttattcaagaattatttccttaacatcttctatgcgccaggcagtgtgcttagtaccacasagagcaagaaagataagacctctctgcagttatattmtagtgcaatggaggtagagtggggtgaaaaagacaacasagaaggarataaataaaatcatttctcagtgtgattagtgctatgagaaaaataakcagggttctgcaggaaatattttgaaagggagggaaataacctakacagggtgaatagggaaagcctttctacagaggtgactttccaactgagagctgaagaatgaagagccagtcatgctggctgttaagacctgggtaacagtgaaaagtggtcaaagaattgcaaaccaggaaataacactgaactggaaggtgagacaagagtggtcagaaagatggtgggaatagtaaaggctctggtgatraccaagtttgatgtgaagtggagagctcctctgttaaaaacaaagtggtcaaggaactgagagttgattggatgtcagagtcactaaatgtaatgacaggagctgagttagaagctggagtgtgtaaagtggacasatcagtgataaaggtagatgacaacaagaggagggggaaagggagacttaaggagaacacattgatttcacagaagcagagggctttgctgggtgatgtcctggaagcagccgtgggctgcagggaaatcactccctatcttctggctggagagacaagtagttcaaggaagtcaagtttcacctacttgagaaagtgcaagagacacagagtgttgggagtcagccaagtttcatttacagagagtcttggaaacaaacattccagaaacccctggagattaaaggggaatttgatggccacaaagcagaaagtccagaggccacaggggaaggtggattttgtttttatttctgattgtcaagcagagaagagacctggtgagggcatatgtagggacacacaaattatagtctgaataataatggacaaatggggaggctttaaattcaccaggtccctgggattaaagtactataactactactactgctgctgctgctaaaacaacaataatagtagttattatttatagcagtgtaatagtataaatatcatggcagttttatatttggcctgtgctaagtactttccatgcatgtgcacccataaccctatggtctgtcaaaccacagtcaaattttatattttcagtgacaactttatgtactacaaatcactgatcagagtaaagaagyacaaagggctttgaagtaatcctggcagtctctggagaagacagcagacaaatggttttagagttaaaactccaaatagacggtccaatggtatggaagatttggagtggccgtttcagggggtgatatggtttggctgtgtcccaacccaaatctcatcttgaattgtagctcctataatccccacgtgtcatgggagggaccaggtgggaggtaattgaatcatgggggtgggtttttcccatgctgtcctcgtgatagtgaataagtctcacaagatttgatggttttataaagggcmgttcccctgcacactctccctcttgcctgccaccatataagacaggcctttgctcttcctttaccttctgccatgattgtgaggcctccccagccatgtggaactgtgagttcattaaacatctttttctttataaattacccagtctcgggtgtgtctttattakcagcatgagaacagactaatacacggggctatacacggggctrtacacgttggcatatggtattcagggggttattcacacagtcctcttgcactakaaaaaaaagcagtgcccttcaacctcagctggtggaatgaccatgatgtctggaggtggctccatgaacggtgcttcattcctctgttctattgcttaatttgctagaaaattactaattatccttgaagacctaattccattcattcattcacttgttcattccacaaatatttgagagaaattattataggctgtagaccattctakacactattggggatacaatggttaaaaattgtgtatacacacacacacatatatatgtactatatatatatatawgcaatcatgtgtatcatgtatatatatatttgcaatcatgtktatattccctaggaaactttccccaccactccctccacctctaggctgatgacaccatgcattatgtccacagcacagaatttattcatttacttttccaataacatgctgacaaccctatatgtatatatccagtccattcctctccacaccatccttttcaagtctaagtgagatcatgttacttttctacccagagccctacaaaagttccctagtttacccagagtaaaagccaaggtscttaaaattttcatccctaccagaggatgccaccttgtaaatcccgtcttccatgtcttcttttactgtgagagttgtaggaaggatgtggcaagatgaacagtatgtggtaaatggactcattcatcctactgaaaagataactacatttttgctctaccttgatacagttttatagagcaggacgtcaagtagacttttctggattccttagtcattcttcacttgggaaagagggaaggtctcatatgtgaatgagattgtatactatgatcataataaattcttaaattattgtgataaatgctttagaaaaataaaacattttcccaggaaaaaaaaaatacatgatttttgcaagcacttagaaaactgaagtggtcatcgagatttataattagccttgccaaaattttaagttgtaatttatgattttgaactattctgtgcattacagagtgctccctaaaaacaataaaagtttcaatctcaaaacatctccattttgtatctacattcaggtgcacaaactaaaacagtacttgaagatgacatacttattaatatcccaaaagtcatagatgctcagaatggttgagttacatcctattgcattacaggcaaagccaggacaaaaatccagggctctttcctccctatcctgtagatgccrtttctcattgctacattttstgtgaagaagctcactacaaaatgtatgttcagcatgccttgctaaaktgttstggcagcttatatgaaatatgctctccttgatactattttaaaacaaatatgtgaagttccttatccagtatacccacactcgtgastgtgctttcaacatttctcyttctttattttaacagaaccccaagtttcacatgcctgaggatgtacgagaaaaaaaggaaaatcttctactcaattctgagagatctactaggctcttaacaaagmccagtcattcacaaggaggggatcaagctttaartaagtccacagggtcaccaacagagaagttgattgaaaaacgtcaaggagctaagactgtttttaacaagttcagcaacatgaattggccagtggacattcaccctttaaacaaaagtttagtcaaagataataaatggaagaaaactgaggagacccaagagaaacgaaggtctttccttcaggagttttgcaagaaatacggtggggtgagtcatcatcagtcacatctttttcatacagtatccagaatctatgtagaagataaacacamaatcttatattgtgaggtacctaaggctggctgttccaattggaaaagaattctgatggtactaaatggattggcttcctctgcatacaacatctcccacaatgctgtccactacgggaagcatttgaagaagctagatagctttgacctaaaagggatatatacccgcttaaatacttacaccaaagctgtgtttgttcgtgatcccatggaaagattagtatcagcctttagggacaaatttgaacaccccaatagttattaccatccagtattcggaaaggcaattatcaagaaatatcgaccaaatgcctgtgaagaagcattaattaatggatctggagtcaagttcaaagagtttatccactacttgctggattcccaccgtccagtaggaatggacattcactgggaaaaggtcagcaaactctgctatccgtgtttgatcaactatgattttgtagggaaatttgagactttggaagaagatgccaattactttttacagatgatcggtgctccaaaggagctgaaatttcccaactttaaggataggcactcttccgatgaaagaaccaatgctcaagtcgtgagacagtatttaaaggatctgactagaactgagagacaattaatctatgacttttattacttggactatttaatgtttaattatacaactccatttttgtagtttgcattcattttctaaaaccctgtatatacttaatgatgataagttcaaatcagctgtaatttttctataattctctgtatgacagaaatttaaccaagtgcagttgtcttgatttaatgtagatttttaccaaatagtatgacaccaattggcacaaagttataggaaaatcacctacaggagatgtaaacaacttgagttgctctaaaatgtttggaaaagagctgcttttgcattatgaattatattgttgaagcaataacctagccagctgttgcattagctaaagcagcctcttgcaatggtaggaaaaaaggatctcaaatagcatgagtgtatgtctatatcctgaaatttattgtctaaaatgcatgaatatatttttagcagtctgtggcatattaatcaaactgttgaattgttttcttacaccctggaaatctttctatcaactataatgataaatccattttgaagtgatattttggacttaggcattttactttagattggaaggcattatgtgatttacaatatgagaatatagcagaaaaaccagatgaggctgtggctttttatattcaacagccaataaaaaatgcacaacatgctaagatcaaagcaacaaaascaaccttcttcttccagaaaaacttaagggaattgattctgttttcttttgagccttccacaaagagacaaaatgaacacaagcactaaaggtctacatttctgaagcaggcagttgagaagcttaagtctcatcagatataaatgtgctcctaattctggtttaattgagcaggggggaaattgtttcaggatggaataatcatcaaaaacaaaagttgccattctgaatatggaactcaaacaataacaaagttttataagtatattatttgaatcaaagcatcatgtgcatagctttatatgtggaatacaccctaagaatagcttttgttttcagtttaattattcagcttaggaatgactttttaaaaactaatataccacttcaaagataggttatgttctakagaataaacataaaaagagcccctagaaatgtgtktaataggcttatgcataagtaaattaaggtattttctttttaagtttaaatattctatactaacaaagtcagataccattgcattcaaatattaaatcaaagtccttagaaaaataggtccatgtgtcacccttatgaatagttgtaatgcattttggaatttttttccaagggatcctaaattagatcccttggggaaaaaaaaagggatcattttggatgggaaacatttggatgggaaacctactttaattggtcgacttttaccccgagttaagaaaatcacaagtctttcaaaccctgcttaaatgcttttcctgaacatcttcctcttcctaagctatcatttttttcttatcagtaaatattcagtaatggctttcaaagaacagtaggtattaatagttgaatgttaatagaccaagatagttgcagtcatacttatttcattttgattttctatttcatggctgagtattcatgaattgcttcgctccttacacacacctgccgtgtcccatstgtgtctcctaaggagtaagtaaactgcaatgggctgagagatcaaaagtattaaaccttctaatccaaccttttactacttttccatgccattaactcttgcctctagaccatacacttaagstgtgctctcagtttttaagacgttttactctggagtaatctaaattacataatttaaaattttgstgcaccatgtagagtagattcctagtaatttagggaaattgaaattatctttttatggagagagaaaataaaaaatattccagaagcctraaattttattcctaagaaacacaaaacttgctttatatgaaatccactataaagaataaaggcaatttcctcaaaagtattcctaaaactatataaggaacagacaaagaactttcaatagctttagaaggaaaaaaatggaaacaacagtcctacctctcttattggcatttgtaatgcattgggcagggtggaatgcatacctatataaatgtttggctttgatggtggagaggagggatgagtggaagaaaatgatacccagtgttctctacggaaagctgtattgtaccttttgctgtatatgttcctttcctgaccctttccaacgagcccgtgtcaccatgggtcattcttttcctaaatgggctctatgatgccaagtgacaccctgtgtagttgcaagttccaaaagccatgcatgtctttgccaagtaagaacaaactttttatgtacctgctcttcattttagatggcttattttcatgttaggaccaaagaagccagtcatcatcctggattacttgtgagtttaaagccaaactccatttttctctcctgacttatttggccttgcagaccagctcacattcacctttgtcatttctgcctgtgcataaatccaggtgggaacaccactgttctttaggaccatcacaatttcatgaatttaattcctaaaggcaagtgaccaaatccagactcatcttccagatgtccaaagttcccattttaacattaggtgcaattataagtcctccaattaaaccctaaggatcctatttgtttttataggcagcagtaacacaatgggcagaccccttcgctctgttattcccctgtctggaattactatcagggtaacaagttggcaattaaatccaaaaccacagttatgtaacctgtaaactatctatakatgtgcaatattgatgtgattgtgcccagaaactgccataaacttcaatggaaatgtatgtacaggacatccagttttcggattttctcaaacgtttggaaatatccattaattcaatggaaatgtgatgccacttgctagatgtctataaaacattctgtaacagaaaataataatattattatcattagggaattagtagttctaattcaagaactacttgtatgtcatttttaattagaaagaggaaaaatacttttacattttattgatgtattattattcttatctcctaaaatgtatagtgtttagcagaaggtatatataagaagatgcagagaattttgaatattagagtgccctttgaaaagatcacttgctgaattaatagaacttgggattaggctaggactacagtaaacgtctccctcctgtgcattctcatgtggcctctcagggcatcccagcctctaggccttcatggggcgtggtraagcagatgttttgcccagggctaaccctcccaagatgctctgatacttgaaaaaggattggccaaaggcgtttaattatagctcaactacctgagaaccttaggccaaggctaattcaatttagtcctacatttaggctcataccttctcaatctcaatcatgatcattatacagtaatcgtatgcatgatcctagctaacatttattcaatacttactgggtgtcaggcactcttcaagtagtttacatgcattaatttaatctccatagccagtctaacataggtactattatgtagccctctccctttccatctatcataaaggaaagtaaagcagactatagctgagtaacttgcctaaggagacagagatgataagtaggtcagaagccaggatgaagccaagcagcaaataccactaccaaactctttgcttagaatattacaaaccaatatttacttttgctttccgttacctctattcaggataggtagaggcaaaaacaatatattggaatcctgaaattttttccatacaaatatgggtgtctgtgtgtgtgtgtgtgtgtgtgtgtgtgtgtgtgtgtgttttagctagttagttatcacatttcaaatcagcttatttctttattcctgctgagttaaactgacaggttcaaagactttggaagaaattaggtttcctccccacaacttttttgtaatccttagttaatcatggaaacaatgtttttaagaagaaaaaatagtccctggaacaaatttagccttgtgaaaacaaaatatcatttctttgacaagaaattccagacagctacaagaccggtcaaggataagcagaatctaagaggaagaaagttcaggcgaactttccacacataggcccctgacagccactgcagatggtcacggttcagcaagctagtcacacacagtgagaaccactcctgctagaaacagagcaactgtgcattatccccttcttcctgagtctccttccctagtactagtttgtagtcagattaccctgagcctacacgggaagactgcagaaaagaatagaggagcaagctgacttaaaccgactgaaaaacaccatgaaaccaggtgaaaataaataagctcttgctagaagatggcagacatttcccaggcctgtgatcattacctgaggaaggccaggtctggggagttcaacagaacattgcctcatatcatttcattctcagaatttcctagtcagtcacatcttagtttttcaccaggatcatatgcttccaggcaaaagtatttaaatccatttaagcagtcatctttttccatccctaaacctctcctcaagtctcacactatatttggaatgctcccctctctatatatctggacattcatttcttgttaactcaccaaggaatctcttgagattattcaatttcaaaatctcatctctttatgagctccctgataggcagaaaaagacagcagagttttcccctggtgtaacatgcatcagattattctcttaccaataaatgcaggcattcctttcctcgattttttttgtcagggaggttcgttaatttatttgttcatgtgctatttatctcactttatatgaatataaaatatctgttgttgtcattggaatgtcttaggtcttccaagaggaaaggaactgtgtctgttgaatgcactttgtaccatgtctagcaaggcactcagtggaaagcgttactttaacagatgcttttgatgctgttgtttaaaggttcctgtacaacttcttttagtgtagaatttgtatatttctgcctgtgaccttcaggcatctataggaccagaggatctgaaaggaaggtgctagagcagggcagctgagggaagggagctgagccacacaccttttctacactaatagtcatcccttgacctgaaggatagttgcagacacagaaatcttttacatttctaagaaaaagcagttgcttgattgtttggggaagaaaattttgagaaaaatgcatgattctggtcaacataagagccatttactgaggatctactcagtagcagacacgggaaaaatactttgcatacattcatttaatgacatgaagagtaagtctaaccgtttccaaaagtagctttcaaaaaaatcaaagtcgagtatttttccacctatcatttcatgaatgagaaaactgagtatcaaagaggtttaataacagtctctctggctccaaagctgagaccatacattggcagcccacggggtagatctggctacagatatgtttggtttggctgacagtgcattttatttaacatctgaattagctgccaacattgggcctcattaatgacaggggatttgttaccctacattctatatgcccacctgaaaatagttggacagaggcaaggtcagtccctttagatgaggttggagatctctagttgttcacactcttcactaatccaccatcactcattcaccttacttgcctggcccctaagcatctcacttttcaagtcctgctctgaagagtgtattccttcccccgccaagcttccaaaggaaatcaactcctgaacattatccttgaccctatttgtgttgtgcaggttatcccattccgggtttccatatccttgctcacagtgctgcttgccctttggtcctatatccagtgggatctccaaacagtatttcattgtttggggaagtctcttttgaccaatgacaaagatgttgggagaaatccagtacctttttttggcatctttctgtcgtagccactgggtcccctggcaacgacattccttcccacctctttctgcagagatgagtcattctcccaggctcttggagctctagtatctagggacagaaactggctcccactgctgcctctagactgctgttctataaccttcatccaaaaatctcttctgttttgcaggtgtgcccgcttcctcaactctraaaatcacctgcttcccagccttctcygaagattcttctttctgatttataacatgcctctccaccctacttcctgctattatctgggtgattgtagcaccccctgtaacattctactctcttgcttcttaatgctctgacaacctcctcctcctcctcttccctcctcttcctcctcctcctcctactcctcctactcctccccccacttctatacttagagaggtggagaaaacaggagaagggataactacgacttttgtcctcaaataccaggaaaactagtaaaacacacagtatctcattttatgcattcatttgctgaaaatatttccaaagtt

SEQ ID NO: 93927 - DNA, 29986 bp, Homo sapiens
  misc_feature (1)...(29986): n = A,T,C or G
ggagtctgtgtgagaagacactccagtgtcctcctagtcaacccatcaagtaatgcagctataatcaaaatgcataaaatcccaagtgttggcaagggttttattttattttattttgagacagagttttgcccttgttgcccaagctagagtgcaatggcacaatcacagctcaccgcaacctccacctcccgggttcaagggattctcctgcttcagcctcctaagcagctgggattacaggtgcccaccaccacacccggctaatttttgtattttttagtagagatggggtttcaccatgttggccacgctggtctcaagctcctgacctcaggtgatccgcccacctcaacctcccaaagtgctgggattacaggtgttagccaccatgcccagccctggcaagggttttaaatggagttcttctagcctgctggcaagttattagaattctccactcagggcaactttgcaatatctggggacatgggagttgggggcagggggcgctgtggctcacgcctgtcatcccagcatttgggagaccgaggcgggcagatcacctgnnnnnnnnnnnnnnnnnnnntcaggagttcgagaccagcctggccaacatggtgaaaccctgtctctactaaaactacaaaaattagcagggcatgatggcaggcgcctgtaatcccagctactcaggaggctgaggcaggagaatcgcttgaacccaggaggtggaggttgcagtgagctgagatcgcaccagtgtactccagcctgggcaacagagcgagatgccatccaaaaaaaaaaaaaaaaaaaactaggaaagaaaataatcctgtaatcccagcattttggaaggctgaaggccaagagaggaggattgcttgagcccaggaatttgcgaccagcctcggtaacatagtgagacttcatctctacaaaaaaaattttttttttctgagatggagtttcattccgttgcccaggctggagtacagtgccacgatcttggctcactgcaagctccgcatcctgggttcaagcgattctggtgtctcagcctcccgagtagctaggattacaggcacgcaccaccacacctggccaaaaaaaatttttttaattagctggagatgctggcacatgcctgtagtgccagctactcaggaggctgtgatgggaggatcccttgagctcaggaggttgagactgctgtgagctatatttccaccagtgccctctggcctgggtgacagagtgagatcctgtcaagaaagaaaaggaagacaggaaggacagaaggacagaaggaaggaatgaaggaaatggagaaagagagagagggaagaaagaaaaataatctgagaagtgtgttacaaacatgtaagagttgggtgtggtggcacgtgcctataatctcagctacgggaagcctgaagcaggaggatcacttgggcccaggaagagttcagtccagcctggataaaatagagggatcccatatctctttttttaagcatatacaataggatgctgtctgctgcagtttttttgtttgttttcttttttgttttttgtttgagatggagtctcgctctgtcacccaggctggagtgcagtggtgcgatctcggctcactgcaagttccgcctcccgggttcaagcaattctcctgcctcagcttcccaagtagctgggactacaggcgcccgccaccacgcccagctaattttttggatttttagtagagacagagtttcatcacattagccaggatggtcacgatctcctgacctcatgatccacccgcctcggcctcccaaagtgctgggattacaggcatgagccaccgtgcccggcctgctgcagttttttatagcccaaatatgaaaataatctaatatgtaaaaaataaagaattggttccactcttgccatacacccatgaaatacagaaccacacagacgttatcatcaggttgtgggaaagcagcaatgtggacgaatctcaaaagtatttccttaaggccaagcaaggtggttcacgcctgtaatcccagcactttgggaggccaaggtgggcagatcacctgaggtcaggagttcgagacgagcctggccaacgtggtgaaacccaatctctactaaaaaatacaaaatttagatgggcgtggtggcgggcgcctgtaatcccagctactcaggaggctgaggctggcgaatcgcttgaaaccgggagtcggaggttgcagcgagctgagatcgcgccactccactccaacctgggggaacaaagagactctgtctggaaaaaaaaaaaagtatttccttgagtgaaagatgccaggggcaaaagtcctctcattgtttgtttccattgtttccatttttataaagtgtacgaacagatagcagtaactcacggtgacaggtcagagggtgaggacagggcaccagggaacttctgggataataaagtttctaggtctcattttgatggtgataaaactacatatacagttgtcaaaacccatctactggctgggtgcagtggctcacgcctgtaatcccagcactttgggaggccaagacgggaggatcacctgaggtcaggagttcgagaccatcctggccaacatggtgaaaccccatctctactaaacacacaaaattagctgggcatggtagtggccgcctgtaatcccagctacttgggaggctgaggcaggagaatcgcttgaacccaggagatggaggttgcagtgagctgagatcgtaccactccactccagcctgggcgacaagaatgagactccgtcaaaaaaaaaaaaaatctacttgaataatgggtgccaagggctggggagggggttgggaagttggtgtctaatgaggacagagtagagttccagttttccaagacgaaaagctccagagatgggtggtggtgacggttacacagaaagtgaatgtacttaatgctgccaaattcacttaaaaatagttaatatggcacaccgtatgttcctgcatgcattttaccacaagaaaaaatcatacggtttttaaagaaataacgggagaaaaagtctacttgaacagctgggatgggcattgtattgagttagctatgccttgacttaaaaaagttggggaaatagtggcatggaggtttgctacacataattagttgcaacgattatatgcacattagcgagaaaagtgaaccccactgttccttctgcgcaatagggatgctttaagaaacgaccttggacgtcctcccggaggcgagaggagcttcaggcggccgagcctgcgccacggcctgcggacggcagagggcgcgcgcgaaccgccgggccggccccgctcggacccccacctgcacggcccggagcgcgcgtccccgccccaggctgctggacccccgcacgtccctcgccgcggccttggcgcctccccggcccctcgcaaggtcctcccgagccccagagacccccgaggcggcgtctacaggcccgggccgggactgacaccgcagccccctccctggtcgcgcctcccacccccgtccacacctgtgccgggaggcggtgcggccgccgagctgagctgagccgagccgacctggtcgggcacccaggcccctgagcccaccgcccaggccggcctctgctgggtgcaaaggcaacgtggaactaaggcggggctgcagaaaaaccaccgtcctccccagggtgccacctccctagtccgccagcctggttaggggcagaacctaacgctctcagtgcttatttgcatgaaaatggctacggggattataacaatcgccgcccagggcactctgccccccagggacagcccaggccctccaggggagccgtattcccctccaaaccgccccctgggagcctccaggagggactaaaggtcgctgcctgccacctgctccagcctggccagtagctgcccagggtataaccagagctcttaggggacaatgggcactcccaggccacaggcagatgctggccacatcccagctgggcagaagacacgcccatcgggctcacctaggcctggcagggggaacaagccaggtgaggcttccccccaggcgacagcccctctatctaacggctaacagctcccatgcctgcgggtcccaggtcctttcaggcctgtgactgcctcctcaaggacctccttcgccccctccgggtctcagcctgaatcctcctgccccctcccagggccaagcctcccccacttttcaaacccagcaaggctgcagcaggcagccctactcacctggccccgcatccgggtccggcacctccagtctcagggtccccctccagccagggcctcccttctcgcagggccctcccgctttggggcgcagccccaaccccaataacccctgggctcccttccgggacagacccactcccgccaaggcgtttgtttgtgctgtgtgccagctctgcgccaggacgcactccaccgccacccccaccccatacgggccactgccgctcccctcaggctggccagggaagggagctgcaagcgcttattaatcgccaacggtgtactcagctctgaggctggcaggaagactgagtatggaaagggggagccccaaaccccgctcagcatcccctgctgcccacagtactccccacccccagccatcaccattggcaccctgagctccgtggtcctggtgcccactgagggttctgcggtcgttgcgccagcttcattttctgtggcccttcattcaaccagcggccgaagcccccttcagagccccagggtgaccctggggggcccaggctggctgggggctcgggggcagaaggcggatccccccacgctccctctccacccggcagcggggagggggccttttagaaatgtctagggtgtctcgtgacaacccccccccccaaaaaatcattactttcaaaggctcccaggctcctgggcaggggtctttgtccccttcctccaggacagcgaggcctcccccgccctccccctgcagcgcgagtctgacccccttgctcccgcccaacacctgccgaaggtgcaattacccgtgcgttcttcctgccccggactcgccgcgtccccgccgcacgcgcggaggtgttcccacagcggtcggcggggtgcggcccctcaacagcccgcacaggggtcgtcggggcggctttccacggaagcgggagggctgggggtcgtggggggtcggcggcgtcctggggagcccgcccccggagttcgcggatgtgtgacccgaggcagccggctcgcctctgagggtcccaggtccgcccgagtgcagggggatccggctccgtcctgcgggggtcgcggcggggcgagcacagccgctgcaggtaaaacgccgcgcctgggtctggggagggctccccggcggcggcccagcgccaacaaaggccaggagaagggggggagcggcgccggcgcctgtccgggtcggggggaggacttcgcgcccggagccgctcagctggaccgtccggggtctgtgcgacgcggccgggggcccgggtgacggggggcctgggtgacgcggggcccggggccgggagggcttcctggaggcggggtcccggacgccgcgtggtccctttaagagccggtcccggggtgagggcggnnnnnnnnnnnnnnnnnnnnnnnnngttcgttaaagcaaagtgagcatgaagcagggagaaggaagtcatcagccttggccacaccagtaaggtagcctgtcctctgtgaccagtgctcacaaaatccccgccggacgccggacgcccgagcccgagcccgagcccgagcccgagccgcgccggaacctcccggccgcgcccgccgagccgcggggctgggatgcgcgccgcgagcgcgcgtgcccgcccgcagtgcgcgcgccccggcccgagcgagcgctccccgcggcgttggcggcggcgacggcggcgacggcgacgcggcccgcgcgctcccccggcccctgccccggctgcgcgggcccccgccgggcccatggacggcgcggccgagcgggcgccctgagcgcggcgcgggtccccggagcgcccccgaggcgagcgcgagcgaggtgagcgggggcgccggggatggggttcaccggcccgggccggggggcggagggcgccgcgtctggggcgctggggcagcggcacccggtgggcgcccgggaggaggaggcggccccggaatgagcggccacggccgtccaggacgccagggacagggaggccccttccccgccccccgcaacgcccggcggacccgggcccagcccacgcccgcccgccgcgttgccgcccttctccccgcagctccttctttgggtgtggaatgggggggggacaaaaatccaggacccaccagggccgcctgagatccagcgcggatctgcgcgagcccccgacgtcccgaacgtcacccccgcgggggccagaaccggagcaggcggaccctggcccggagtcggtccgggaggtgtggagcctcggccgtgggagggacgcgacggcctctggcctgggacacccgggaaggggccttcccctgtcgggggggagggctgcagatccatccccccagtgtccaggccgcactgcctccccaycccgkggtgcccagccggcccctgagggataaagcccccgcgcccttccgcctgctgcagaggcagccgcggcgctgggggaggggctggcacagccaggctgctgcagccacctcgctaggcccagctgcccagcctgggatgcggagcagaccaggtggggatacctaatagtctggcctggaggggagggggcaacaataggcccagccccaacagggtcaccccttctgggagaatctgcctccgtctccctgctgcggggtgtaccggcctctgctgaggggaataggggctctggtgctgcagtgatggggggcggggacactgtgggatggaggagggggtggcaggatgtagcgtggctccgcagtgctcttgctgtgcagcttggggtgggggtggggtgctgcaggccagggaagctccttttgtgccccagcggggggtctgaggggagatccaaaccccggcactctcccttgcctcccttctggcacagcccacccagagacactgttgcacctagggcggtccaggggtgaatgtagcaccccaggccccagccctccaccaggaggacagtcccatgcattcactgctaataagcactggatgcggatggcagatcatgtgaccccagctggaagttcatcctgaagtctcgctgaaatacctcctgctgcagccagccgggggctgcacgagtgtggctgggcaggttctattcccctggtatcctctgtcctcggggaggcttctgggaataaagtcccattaacagaggtgcagaaagacgcttagagtcagtctctgctccaggacccttctcttctcaggctggggctgaagtcagggcctagaggctgccactggacaggtgcctcgaaggggcatcagctagggcctggggagacctaggtgtcacttcttgcagaaggcagggaaaggggcagacccacagtgagagagaggtggttggactctggccatgagaactgcacccgctgaggccccctctgccggagttgctcagggcagtgaaccttggaagcgccacactggtcctgatgtttagcatgtggcacagtgaccaggaggagggacacaggtctggtgggaagggagggaacctggatatgtccggctctgagactcgactgtcacggccccttgtgccaagtcctcccatcccctgccctgcccggaccccgttcctgggatcggagggagccccccgccccaccccactttctcccaggtccacagcttccccaggccagcggagcagagtgtaggccagcttgggtcctacagcactagccaagggagctgaggggaggcagggatgagggcatctgggggagcccagtgagggaagatgagctgacctgtgtgagtgcagggtccctgcctcccagagttgccacccaccagtctctcctcagcctccttagtgtgacgatttctgcctccagaagcatccytgggtracagtgagccggacagctccaagagcctgcctaggtgtgagggggagacacagtcccatccccccatgcttgacagtcctggcagctgtctctgaaggtagtgagtccccatttctaggtgctgagcagaaggtaacatggtaaggatgctgtcagttgagagctgggggwggcctgggactccctggtcccgtctgtgctcagggacaggaatgtgctgcacagagacgctgggtgtgggagctcgtgtttgtaaggagtctgaagctgacccctcgggtactggagtcctggggttctcaggggatcctgcatacagagggcaaggacgtgcgtgtactctagtgtatgtccagcccacgcgtgtgcacatattcacgcgtgggtacttgcacacagggcaggtggattgyrggtaaggagcaccagccctgtgtgtggagtgggtgtgcaaagaggtgtgttctggcacgcacagagggcagtgtgcacgcagcactggagccaggcgtgctgtgtcccaggggagggtggcggcctggtgcctcctggaaggtgtgggcctgggaggagccttcttctgactttggacttggaaactgcttcctcctgggctcaaagacttttgaaaagggtgtatgggggctgtgctagggggcatcctgtccccagccctgcctctcaccccccaacccctaggcactggaatagcagggccacaggtactcaggagggcttggcatgtggggccgtgaaaggagaggcatggaaccaacaccatccacatttccttacctctgttcccacatggccagtgctggccccactgatctgcaccagactgtccttagtgtctctgctccccaccccacccaacctgccccatccctggcatagctgagccccgatccttagcatctggggagacagaggtgaggaacatgtccccctgggagctgtaggtccagggagaccctgtgggtgaggatgctctcccagaggccagcatggcacagaggcttcctgcaggagggggcactcggccagcccttcgcagtacagagaaggcctctgagggggcggggagccggcgagctgcagggagcatgctgggcacagcaggtacctggagtgggaaggaaggttaggaccaggtagggcagaggagcggaggggctgaggactgggctctgcactgccgggcacctgctggggtgggtaggagagagcagggaggggcgcgtgcccactctgcagaggagcctgctccatggtggtggctgccgcaggagcagcggttgcctggcacctctgctgttgccatggtgacgatggaggtgctaacttgctaatgaatccccttcggctgcaaataacaatactattgtgggtgataggcccagctccagctcagcgttgcttaggaggcagagcagggccaggtaaaggccaggacccgtcctcccgcccctccagcccctgcccaccaccctgcagctggacttgccctcctccctcccctccctctgggtctcagatctggctggctgcaccgaggtctctcatggcagtgtcaggactcagggctgcatgaaggctaggccctggctgcagagagggcgagggcctctcctcacacctgccctcctccctgcactggggggtatttgcttctgttgttttcagtgagagagaatccacccccacttaacggatgaggacattgaggccggggcagctcctcaaaagacccccagcccaagtgtccctgccactgcagccttctcggggttctgggtctctgagctggacccttgggtatcctacggggcacctggagccgctgtctcaccagaaccacacatctgggccctcgcctctcaccacctgtgcaaggctcaggtagaactcgggaaggacaaacagctcatcaaggaccccctgtgggcagtcagggacccccttggcaggcagagaccctccacagcaggcaggcagcaggcccttttgctgttgaacttgctgggtctggccctggagaggactcccaggcctcgttccccaccctgtggtggaggctggagcaccagcccaggaacgttatctgagtgggatcctgaggccctgctgaccaggtgccactgcaatccctggtgtcagccgtggggtcagctgaggctgcccatccacagtcaggtgtttccctggcctctggcaacaggagggatggtgggaatgcacagaagcctgggcccagtcgaggcgggaggggccaggcaggggccaagcttgaagtgtctggagaaggagagtgagtgcgaggctggggctcctgggcagggaggagctgggacctgcccctcagtgtggagttggggctgggccagggacgaggtccacaccagccttgcacctgctgctctgtgaactctctcactggcccccgccggcctgggagctgacctggagagtccagaaacggtggtggcctctgtccccagcctgctgtttgcagtgcatgggtgtcctcagggcgcctccccccagtgcctcctgtggctgtgggttgggggtctggcttgctgagggcccgctacccaccgtagcccgctttgcacagggcgcagggcccagggtacatctatctcccagccttccctcagtcctgagctgggtggagtaaacttcctgactgcctggcagctgtgggggcacagggaagatggcattgcagggacacccagtgcccatctgtgtgtgacccaggtgtgacccaggtcccaaccctgccccaagcctcggtttccccatagttaaagcaaactcatcatccttaacactrtgcgcctcctaggggctgtgagtgtaaagtggacccagaggaaggccagtcctggcaggtgacagggagatggggcccggcagtggggcagtgacaggcttgtcatcaagcctgcaggaggggcttccrgagactccatcctcagacatccctactccacctgcccacccggcagtctgaggccttygcaggccatgccgagggcctggcacctgcggggtccccgacactgaccctcctcccagggctgccccgcccctcccatcctkggccctatcagcccatgaaggagcctcctagaccccaggctccgctaggggagaggcactgtgtgggtgcmacacgcccctgcaggagctgggcactcacccccagcaggcacgtggcgcacactaaacctcagcctgcaggtcaggagggcagcagtggcaaaggagccgtgcctctgtgcctgagcccctcccgcacccgcctgctatccggctgcccccgggagcccactctccagtggaggcagccccaaggccaccatccaccaggggctggattatcggcttacggagctgccctggagtcaagtctccagggattggactccctggggctgtgctagggagagaggggcaggtgtgaggacagcaagcccggaggagggcagagagcttgaccatgtgggagggtgaggtgcagtccagaccccgacttgctgggggtcctgtggtggaaaagatgcagaagtcacagcagggagatgcctgtgtcccagggatgagatggaatgttctggaatgcctaagggtccgtgaaccccagggcccacaggaaggacccctggcctcttccagccctcagacccttctctgtggggcccatttgcccccctctgccttgttgcatcctgctgagagctggccttgtgacctggacggggtctctccagagggagaagggttcccacgggcacatgttggtgtgtcctggtgggcgcagctcccagctctgatctgtcctggggagcttctgggtgccacccaggggcccgcagcactgctgaccatccccctgtccctgcaggtccagcaccatgtgctaggtcactcccagcgcgaggccacacctgggccgtcggagcagcccctcctcacttcaggggtcaccctccccagcacccattgccccaccatggctggggaccggctcccgaggaaggtgatggatgccaagaagctggccagcctgctgcggggcgggcctggggggccgctggtcatcgayagccgctccttcgtggagtacaacagctggcatgtgctcagctccgtcaacatctgctgctccaagctggtgaagcggcggctgcagcagggcaaggtgaccattgcggagctcatccagccggctgcacgcagccaggtacccagcccactgcccaccasgcatgcatcacgtccagggtccacagctaaggggccctcagctcgggcagcacccccctcctctgccttccagtccaaactcgactccttggggtcacagccaggggmgtgtggagcagtcctccctggcacttgcctctcaccgctgcctgttgcccctgctcagggcatcccccgcacccccgcccgcagcacccttccctaccctccctccagggcctccttgctcagcttctgcacagaggtgccgggccctccccacgcagataggactgtgtggccasggccaacccaggctcacagaggggagcagtgagtggaatarcaaggtgtgaccacatggcagtgggagcagcccagctggcctacacgggacagggacagctgtgtggtccacttccactgctgtgaggacaggaggggtggtcaaaaggcacacgtgagcagtccatgtccccgtcccacagcttcccccagcccgcagagtattcagggacccagaattctctctgtggccccccaggaatgtccttctggggaaggacagctcattctgcccaggaccatcaggtgcagctggggagggaccagcggggctgttgacctgtgaaggtggcggcacctcctccttctactgcctcgcaggggacaagggtgacaagctcttggccctggaggctttgagaggggtctgggtcactgataggccctgttcagagctgggacatgggaggactcaagtgggatggccactggccaggagtccgcccgccccaaggccagaatcggctccctttggtttccaacaaggggaatcyggtgattaatgacccccagcaaggactcccggcagagtgcgatcccattggctgccggtgacgtcacccagcccagggttggcggctcagctggcttaagggctgagtgtgtgcttgcagggcgggggcaccggtgctgtctgagcaaaagccgctcaacatctgggctggcccttggggtgggggaggagggcaggaggaacccagcttccagctgctgcctccggaattggtgcaggggcctggggtcctgctgcagccctctgtttctccgctgggggttggggaggggatagggtggggagcagaattgctggctacacagttagccccactgagagcccacacccgaaggcatgcgtttcagggccgagcttctctgtccctccgccaccctgggagccagccaggtcctatcctgggctcccatcgcactcacctgtgtctcctccacacaggcctggcccagagcgtccgtccccttcacccatgtgcatggcatgggggcacagctgcgcagggcaggagtccacccctccctgcccccatggcttgctgtgtggtgtgggtgtgtgcatctgggcctctggcagatggaggagagtgtgtgactgcacctgccctcccctccaggcagcaaggtgacagctgcctgcctcccatcatctgatgcccttactattcccttgagccagcatatctgggacrgggccagggcatcgataggtggaggcggcatgctgatctctgccccatggcccccaggtggaggctacggagccacaggacgtggtggtctatgaccagagcacgcgggacgccagcgtgctggccgcagacagcttcctctccatcctgctgagcaagctggacggctgcttcgacagcgtggccatcctcactggtgagtccatgacccacgcctccccgaggcacttgctccgccagcagtggggctggggctggggctggggcatcagggaggtgtccgctgggcacggggggatctccatacatctgtggttcttgaggccccaccatcctctccccaggacgcccacacttcaggacccaccaatatgactatcctcaacacagaaggaaacctcacagtacagctgggctccagaggtgtagggcaaggcatgcaggctgggagcccctcccactcccggagctcctgtcagaagccggaggcagaggccccatcctctggaaactcagttggagccgtggggtcccgaggaagtccccccacctccgaaagcccagctgagtgcaggttgcctggcaacagcctggcaccaaggctgctgcctgggtcccagcagacagcccccagggatccctgtggcccaaaagcagcctgggcaactggccccaagccctggaggcagggaagccgcccccctacacacgctgatacacactcatatacactcacacactcgtggtcccagagggttctttctttccttgggctgtggctgagggcgtgtctgtagaatccacctcctggggtcggcccaggtcccagagccggacggagctggcctgtcccagggatgtgcaccctcccccatccaggtctggggtctttgtccaggctccttctgcctggcctctgctaccaggggctgttccaggcaagcagaggatatgggggactgtggggtgcaggcacggtggggtgaggagtaggcagccaagccaggcccttggccctgcatccagtggaagcagggaccttcacccagcctgagggcgrctgtgggggatgaaggggtggcagccgctttggccaggccgacctcccgacatggcatgtcctgggacctaaagggcacctgggaggcttgagggtggtccagtgtcctgggcaagagcattgaggccaggctccctccccacctctctgtgggtgagaccagcaccctgcactgctgggtggccatggtcagagggtgtctgtgcgtctgtgcatggctctgggcgtctggtgaccagcatctgcctctgcgagtgtgtacgtgagcatgtgtgtgcatgtatgtgtgtgtgtkcatgtgcrtgcatgtatgtgtgtgcatgtacatgtgtgcatgtatgggcatatgcatgcctgtgtgtgcgcatatgtgcatgtacgtgtgtgcacgtgtatatgcatgtatatacatggaggtatatttgtgtatgtacccgcctgtgcttgtctgggtgagatttgggatttgtgtgcatatgtgtgaactctcagaaccagaagccacagaatgacgcactctgatccaaccctgttcccctaggtccagtttgaggactgaactggtggggggcggggagagagtagtttggggctttttacagctcaccaggtgtaacaggacccctcccaaaggccagtttgctgccctagccaggaatgggagtcaggagactctwcttggaggctgagaaaggtcccagagtggcacctccctacctgcaggcagatcccaggaaagtcccaagcctggaagggcctgtctccctcgaggccagagtgggacggtttggggggctggggccctcacccagcactggtgggtgggacagcatgggtgtgcaggtgggcgtggatgagtatgggcatgggaggggcmgggcctgtgctaggatttgccaggagggcactcccagggcctggtcatgccaccctcagaactgcctttctgtgctgacatctgccctgcaaggttgaggctgtgtccccttttctccagaagtgcagctgccaaggagtcccaggccccgtggtatacagtgggctcatggcgacacccaggcaggcccacgggctctgccctcaggctccctcccaccctgtggtgggcacagcccctgctctgggctggctctgcgaagaaccagggagagtgggaaagaatatattggggggggcaggggtgctgcccctcacccaggagaagggatgttccaggatcccgcggcacaggcaacacagctccttggtccatttgcagggacagtagaggycggaatgtgaggaccaagcctctgtcctccccacagcagggcaggtttgcgggaagcgggagagaaacagtggcaggacaggctgtgctggggtcccaggactgctgtgaagcccacctccccctgccgctcctcttcccccactccagctgcgctgctcacgatgttggggggcaagcggcaagggatgagagaggggcctggccctttaagcagcggcccgcagtcggccttggacccttggccgggcgactgcactgcaagtgggtggggtggcggcccccgccctggcggggagtccagggntcatggaggtggcgggcagaagtgcgtctgtgactgtggccataagcgcttgcagggtctcccaggtggcatggggcaggcacatgtcctggtacacacgccttttttcaagtctgggatttcactgtgagtaacaggtgaactgcaggcgctgccccagaaacccccgagtcagggagcagggatactgggaaggcgcctttggagatgcctgggggtaggggtgcctccccagggcccaaagagtgctgggacctacaaagggtccactgaaccccaacacccctcacttatcactcacccccagagcctgggtggttctgaaatccctggagcctcggtccctgctaggcctggcatccacagtggggtgtgtagggacatccacactacctgctccgcctggggaggtcctgggaagcttcctggggaattgctgacatagctgtcggttctctgcacctgtccagagactttcctgcctttacctcctctgggagaggtgggagggtactgatggaatccccagcacctcctcctttggccaggccctggagaaagcagagagtaaggcacaaaatccctgggagagccacagggaggaggagaggcagcaggtggcagaagagtctgcagagaagtggtgcagcccttccgcctccccggggctgtcctgcagcgggaacatccagggctaccccagctcagaacagtgagtggaagccagctacagtgcccatcccagcctctgctcaggggaacctgcaagctggggcgtcgttggtgacaagtcacctacctgctttcccctgtccagtcagcaggttcccacagaagagactgttcctccaaggctgctgcctcaacccacccagcctggagcttcccctatctccacagtcccccagcgtcacgccctttttagggacacggggagctggcacagcaggtgttctggttgggggtttgcacacactcccctgtcctcaggagttatccagggtggctctactccacccagcaggggagaatggagagaggaggagccctaggcactgggggcacgcggggcaggcagtgggcacctgctacacatgtggcaccagcctcttctgcaaaccaggacaaaaaagagccctggggttcccaggccctgagctcccgccgtcactcccctgccccgtccaatgggatagggcaggcctcagcccagctgcctcaggctctgcacaagcaggagccggcttgccatgggggcttatgttctggaaggtgtcctcggggtggtgctgggccatgctggcttcaccctcccaagagctggcagccaccaggtgggtgctgcccagtttctggtccacatcggtggtcgccccagccaggtcagggacggccaggtccattctcaccatgtgtcttcgtgctcattatcttcttggaaccacatgatgctgtgtggcaggcaggaggaggaagctgagaccagagccatggtgtgcactacccatggtcactgagtcagacatccagggattcacgttcgggtccttccagctggtgcagggcaggggacttcctcccaccagcctgtggcctcggacttggacgtgtrtggaaggcagcagcacacgctggtcacgtgtgcagcgggtgcccactgcctgctctgcgtgcccccagtgccccgggcttctccactctccgtcctcccctgctgggtggagtacagccataaccagacagcaaatgccccgagggctgtgccagggtgatgtcatgcctggggacggggagggcctctcggaagccctggcctcctggtcctggcacccaagcccaggcctggggctcccagccagctggaggcagggaggcattgcatcagtgcaggggaggaggaaggcccagcctggccccaggccatgggtatgggagatggccgggctcgtgagggcctctcctctgggctgtgtgacacacaccctcagcaggagacccctgtggcctctgagcccacccctgcctgggcccagcgcgtgccgtgatggccagccacctcaacgccacctttacgggcatcctagcggcgtcctcagctgggtcagcccctaattagcatgaggaggaatgtgggcgtaggtgcaggctgtaaatgtgtggcagtaccccctccccccaccgcgggcagagcaggtgctccgccagaggcttgccggctgggctcaggctcgggtctgggctgggtgtgactgatcctcagcagtagatggggtgccctaggcggacagggcaccctaggcggacagggagccctaggtgttctctcaacccacttgacggccctcctcctacagggggcttcgccaccttctcctcctgcttccccggcctctgcgagggcaagcctgctgccctgctacccatgagcctctcccagccctgcctgcctgtgcccagcgtgggcctgacccgcatcctgcctcacctctacctgggctcgcagaaggacgtcctaaacaaggtgtgtgtgcagtggagttcggggggtggtcaatgggaaaggggcaggagctccagaagcagcttggcagcggagcgggggatgagggaggaaaggagctgaaggcagtggatgagctgggtgtgggagaagcatgggtgggggcccaggaggaccccaggctccccacccatgcccctggaaggaccacagcagggcttgcgggagggcccggcagggctcgggggaggagcggggagctggcatgccaagctgcggatgtcactgggcctctggccagctctgaaagaatcccatgttttaaaaatggtgacgagggaaaagggtaaaagccaccacccaggcaatcataaaattcctaggagcccaccaccagccgtgggtggggcctgcagtcggaggccagccgtgccccaccccccgcacgggcccagggtgccagggtggaccagagaggcctcctgggccctcccctggatacactgggatctgggacaaattccaaggctcccaggattctaaaggccctcctgacggcagggcaggaaaagcctccaccttcactcccgccccgagcttctcccacccctttccaacccgccctcccgcccctccaggatctgatgacgcaaaatggaataagctacgtcctcaacgccagcaactcctgccccaagcctgacttcatctgcgagagccgcttcatgcgggtccccatcaacgacaactactgtgaaaaactgctgccctggctggacaagtccatcgagttcatcggtgagtctgcggtgggcggagggcagggacctggctagaggaaggctagagctgtgtgtggccacagacacaggaggggtccccaggaagtagccggaactgttggcagttgggcgggtggggtcccctacctgggccagggagaagctgtgcagtcttagccctcacctggcccccatggcccacctgcccagataaagccaagctctccagctgccaagtcatcgtccactgtctggctggcatctcccgctctgccaccatcgccatcgcctacatcatgaagaccatgggcatgtcctccgacgacgcctacaggtaccaccttccccagtcgcgcacttgtggctcacagcgtcgcttcccttcccccggctgcccacttgcaccagaatgaccccaccgtccaggacccgtggcaagggaggagggcctgagaccagcctggcgcacatgagctcgtgggtgcccagcgggtgcgtcaggtgggcagcctggccccggcgggcgcctgggactgagcctcctcccccgcaggttcgtgaaggacaggcgcccgtccatctcgcccaacttcaacttcctgggccagctgctggagtacgagcgcagcctgaagctgctggccgccctgcagggcgacccgggcaccccctcagggacgccggagcctccgcccagtcctgccgccggggccccgctgccacggctgccaccacctacctcagagagcgctgccacagggaatgcggctgccagggagggcggcctgagcgcgggcggggagccccccgcgccccccacgcccccggcgaccagcgcactgcagcagggcctgcgcggcctgcacctctcctcggaccgcctgcaggacactaaccgcctcaagcgctccttctccctggacatcaagtctgcctacgcccctagcatgcggcccgacggccccgggccccccgaccccggcgaggccccgaagctctgcaagctggacagcccgtcgggggccgcgctgggcctgtcctcgcccatcccggacagcccggacgccgcgcctgatgcgcgcccacggccccgccggcggccccggccccccgccggctcccccgcgcgctcccccgcgcacagcctcggcctgaacttcggcgatgcggcccggcagactccgcggcacggcctctcggccctgtcggcgcccgggctgcccggccctggccagccggccggccccggggcctgggcaccgccgctcgactccccaggcacgccgtcgcccgacgggccctggtgcttcagccccgagggcgcacagggggcgggcggggtgctgtttgcgcccttcggccgggcgggcgccccgggaccaggcggcggcagcgacctgcggcggcgggaggcagcgagggctgagccccgggacgcgcggaccggctggcccgaggagccggccccggagacgcagttcaagcgccgcagctgccagatggagttcgargagggcatggtggaggggcgcgcgcgcrgcgaggagctggccgccctgggcaagcaggcgagcttctcgggcagcgtggaggtcatcgaggtgtcctgacccctccgctgccctcggccccgccgcccgcagccaggcccgttataaatgtatattatatataatgcaaagaaaggtaaatggttttactgggatttttatcgagaagtaaatatttcgattttttatttatttaagctgttcattctggcaatgatttggcaacagtgcgggtggtcctcgagctctatttttactgtctggtatttaaactgaaacatrcgtttctaagcaatacgaggccaccttcagtcgcaagctgggtgccaggcctggggcccctcccagttcccccgccccaggaaacactgctgacctttgcaaaggctgccgagctttcgtgcactttttacataacaaaaaggtgaaaaaaaggaaaaaaaaacttctttgccacaaactgagccgcagaaccccccttctccccccacccacctcccctgctccctcccttctctgcgccggcctagggctctgcaccaaagccataggatggaggagcaggagctggtgtgccccggagaggtgcggccagccctccatcagctccaggcaccaaatcttggtggcaaggagggcaccccgctgcccgttgccccagagctgttctctggcaggggaggacaggcattgggcttcatggtgccagggtgttcagaggggctgagaaatagaacagtgtgtgtaggggcttcgggcagggggttctggaacgtcagatgaggtrcagcccaggggaggacagaggtgttagtgcccccaactcctgccagagccccagtccagccacagagtggctcagaaaggccattcctagagggctgcggccctcccttctcccttgcccatgcccccagagctgcctgccgggcagggtggcaccactgcaggagaggagcttggcctccgggggtcaggcaggaggcgcctggctagccagtgctggctccactgggcaggaagccctggacccccaggtatgaggagggggtggtcttagggttctgttccaggtctgccccgcccccctcccagccatgccccaggcagaacttggaattcaggtgtgcacctgcaggctgaggggctctgtgagcaggtgctgctcacacagggagttcaggcgccagccaagcccctgtgctgctgggataggcctgcttcacttagggagcactgcctcaagacaggtaaagccccctcgtttgcccccacccccatggggccgctcaggagagaaactcccattcacccctttcccagggtgctctctctctaggtggcatgccagcccccaaacacaagtggcttttgggcccaggtgggtcagcctgctgcccctgccccatacccsctcgggccattgggacccctgcccttcagatgtcctagggtctaggagtggggccagtcactgtgggaagaggccaggggcttggccggagaggcagcccagggcaggacycagtcctgagtcctggagcagggccagggaggcgcccatcccgccccrgccagccgccctctctgctgtttcttctatttgttcttcttttcacccacagctctgtgttcctgtcatccctcctttcagcaaaagtcctgttcccrttccctctgtccccacccactcctgttcccccaagaaaataagctatcgttgtatttrcaatctatggattagaggtttaagtatttattattattggttaattattattaattatgtaaatttgcctcccatatgtctgttgcgttgggtttctgaggagaccctgggtgaggaggatgcactggcttcccgcttctcgccccccacccctgtgctgtccgggagacagtggtctggggccactggttgggcccccttctcccttcccccttccccttgtcccttctgcaggccgttgaggggggctgtctgtctcagtctgtctctgctcccactcttgaggcactggttaccgcaaagtgagcagccagcaggggggcgaaggtcctgtgttggccactgcctcctccagtgctgcaggaggcgggctgaggccccacctggtggctttcacctgacccagccmtgagtcctctccaagcctctctccggcccctcccacctggccactgcctcctccagtgctgcgggaggcgggccagggccccacctggtggctttcacctgacccagccctgagtcctctccaagcctctctccggcccctcccacctggccactgcctggcattgggatcgccccaaaatggacccggcccctcctgttatttgctgggaagtccagcggaggagagggtgcaggtcccccgctgagcctccagtctctgtagactgggctgccggcccttcagccccccttggagcccctcccgccacagccgcaccttctgctcccggcccctccctttgtatttggagacaatgtgttgtaataaagcttaaagtggatgttttccccacgactccgcgcctcttccttcagactggtggtgggcagggtgggggcagaggctgctgggaggcaggcctgaggccagagcctggtgtgttgggtctggaaacttgccccaggctcacaccgcgggtgagctctgagaatagtccctgggggccaggcatgggcacaggtcctcagctgcacctttagggtgtaaaacacactttttcggttgttacaggctagtaaaagcttaaataacttaaaacgatataaaacctcagtgttacccaccagtcccctcactcccacaatcccaatgtgaacagttggatgcttccctcccagcccctccatgtgtgctgtgtgctgtgtgcatgtgtgtgggtgcatatacgtaccagcagaaataggggtctagctatatatagtgtctccaaccagactttttttttttttttttttgaaatggagtttcgttctgtcatctaggctggagtgcaatggtgcgatctccgctcactgcaacctccgcctccccggttcaaacaattctcatgcctcagattcccaagtagctgggattacaggcacgtgccatcacacttggctaatttttgtatttttagtagagatggggttgcaccatgttggccaggctggtctcaatctcactgacctcaagtgatccgcttgctttggcctcccaaagtgctgggattacaggtgtgagccaccgtgcctggcctccaaccagcttttcaaatcttaagtaatgtgcatgtcatacaaggattaaaagcacaccagggtatgtggtagaaagtactggtttgtctcccccaggcttgtccccagcctccagggtcctctccctggaggcagccccagcccggcctgcagagccccgcctcccccccccccaccccccaccgagggcagacctggctgctgcaggtgccacaggctgcaaagattcacagtgtgcgtgcagcccgggctgaggcttgtctacactgtggcggaggataccagatctgtccttaccacacagacctggttcatgcagcttcttccaggtttagtatacctctcccagggacccctcccaaccagtgatgctgtccagaccgtgtgtgtgagtgctcatgagacaggaggaagaggaagcaagagaggggaagaggagggggccagtccctcctcgggggctgcaggaggaggtagggtccttgaatcctgcatctttaagagtcctcaaaaaggaggaaagctagaaacatagtctgatgctcccgcaaggctatttttggctcaagaacatctatttataactcaggcagcccccagcagtcaataaaactgaggcctggaaagagctgatggctgactcaagcagcaccgaggtgctcccttaccccctgtgcgcaggagcacctgcagctccagcaggtgggtgacggcctctcctaggatgcccatctggggcacataggtctcaggaccctgggggcagtgtaagactccagatggaaggagggggtctcatttaccaactcaatcaggctcctagtggtccaagagctgcccaaagtaggcggtgaagcaagagttgaacactggtggactggcctccaactgctacgtagagtcccctaaaggcttgttgccctgcctacagctgtgtctccccccaggacaagagctttagttgctggatgggtcttggatgggtgggtagatgggtggatgagggagggagacatggatggatggataggtgaatttatggatgggcagatggatgaatggtggatggatggatgggtgcatggatgggtgggtagaagggcagatggatgaatgggtagagggatgcgtggggtgggtgggtgggtagatggatggatggatggatcaatgaatgggtggatgggtgggcagatggatgaatgggtagagggatgagtggggtggatgggtggatggatcaataggtggagggataaatgggatgggtggatggatggatagaggggcagatggatgaatgggtggagagggatgagtggggtggatggatggatggatggatggatgggcaaatggatgaatgggtagagggatgagtggggtgggcgggtggatggatggatgggcagatggatgaatgggtagagggatgagtggggtgggtgggtggatggatggatggatgggcagatggatgaatgggtagagggatgagtggggtgggcaggtgggtggacggatggatggatgggcagatggatgaatgggtagagggatgaatggggtgggtggatggatggatggatgggcagatggatgaatgggtagagggatgagtggggtggatgggtgggtggatggatggatggatgggcagatggatgaatgggtagagggatgagtggggtgggtgggtggatggatggatgggcagatggatgaatgggtagagggatgagtggggtgggtgggtggatggatggatgagcaaatggatgaatgggtagagggatgagtggggtgggtggttggatggatggataggcagatgatgaatgggtagagggatgagtggggtggatgggtgggtggatggatggatggatgggcagatggacgaatgggtagagggatgagtggggtgggtgggtacatggatgaatgggtggaggaatgaataggatggatggatggatgaatacataaatgggtattcataaataggcaagtagatgtgtggctagggagtagaaggaaaggaaggtggacagatggatggacgggtggagaagtgatggggtggataggaggtggaagaatgggtaaatgagagggagggagggagcgaaggtgggtgggtaataatgttacattgcgttagttgcacttctgttagtcttacattaaagccagcttgtgcttacctccattctccattggactgcagatgggtacctggtctttgcatacagaaggtacccagtgaatgtccaatgaataagccacatactaactgtcttggagtgggacatcacaggagagaccctctccaaggcccagggagaggaacaggcttggtcaatgtcccttagagggtcaggggccaagttggggctgggcttggttcctggtctctcaggcaccattcctctgcctgccgagccatccctggaagtaagctggaggctggtctcagtggcacccctgccagctgccactgtactcctgtggatggacttaccaaggcccttccggagctcagaactgaagagactgagcaggagaaagggcagagggccagttctcaggaagcctttcaggaggagagttttggcctctgaaggccaggttgtgtttggaggggctgggggcaggtggggcaggaggacattgcaaaggtccacagcatgggagaaaaggcagaggtaggagcgccctgcggggagccaggcagaagctgaaggcctctggccaaggcaaggcccgacgggaagagggtgcatctcgatggggctctgaatggcaggtgggttgggggagtgtctaagaagagtggttctttgtgggcaagatgaagggaggacttgctgttaaggggaagccatggagtctttgaggggcctatacaatggacaccagcagagggtgccccaacctccccggaagggcgcagggcacagggcagggcgggccctggacagagggtgggagaggaggggctgattctcagcagagcttcacaacaaatgccttgtgtccatggtgggagcacgtggggaaactcaattatccctgcaggcagctggggctcggcggcacagtccctccagagaaagcacagccttctggcccaggggtgagggtctagacctgtaaggcagcccacagtcccaggccccactcctgcccctgggaatgggtctcctggggtaggagcctctgtggaagacactaggccctgaaggcgtgatgatggcttgtttgtgaagcgagtggtccctgactgtggggaccagagctcagaggggatcctggtggggcgaggggaacatgcgtgtgcctcccacccccaagcagggcgatgccagggcaggcctttgccaaacactaggcaagtgcctgggtggatgcccttcagtccttccaaactgagcaggtagacttgtcttgcttcagaacccttcaatgtccccctccagaggggctgggttgggggtggcctcagggagggaaggggtatgggagctgaactggagttgagtgagaatgctggggagagggaggcctcagtagtggggtgagaggagaggaactcagtgaagggccttcattctggaaggtgggcggggggagggggacgggtgctaggtccaggggcatctctcccagtctttgcagacaccacccatgaaaccaaggaacagtggcctgtccccaggcagctcccaggaggaagctctgggaaggaaaggggaagacgccgcttaccccttccccgccaggaattctgctgccccccccccaccaagtccagtgccctcccactctgccccagcacatgcgccctcatggctgagcgcacctgcagaacgcactcccgccccccacacacctggggcctccgaccaggacagcgcagggcaggtgactacccaggaagggtaggggaatgtagggggactggtggcaccgttggcatcgccggccgaagcctgcccctgactgacgcaattgccggccggtcgcagctataaatagccaaggagagctggaaatagaagccagggaagggccagaggcgggtggagggaggagcttgggcttgagcacctgatgccagaggaggaaaacaaaactccattctagggctcccctccctcatcccaccccagcccagaggggcgtttgcacccggaaacgtttggggaagcagggtgaagtcaagaacctgcccaacagtgggcggggcctccctgccgcgagggtcggggcgcgtggagcctgcgctggccacagcccgcggtcttcggctctgggtcatctgcggggcagtggcccctcctgatatccgcccgcccccactcccaagcagaaagagattccggtgcctctccaccctccccaccccactccctccgtcaagcccctggcccaggagacccccgacagccctggaacacagggccgattggcgagatcagtggacactaggcctgcccagagcctagccggtgggggcggcgtcctgggggtgggaggggggcttgtggggcagtttccatatcttcctcgcccaacccaatccttcggccagcggcaggaatggggctcagagactttgccggcctggggcagggcgcactgcagccagtgtggaagccagacccaaaccggacggtcccggtgcctggttctgctcggtcacctcttgcccacctacccagcgggcgctcacaagctgggggcccaaaagaggaacagaaaaccagaggactgggggggctttgaggctgaagggcgaaggcccttcccggacacccttgagccctccaccctgagcccctagcagcgccagggagtgacttcagtccgggttcctactgtggggcctccgcctctcggagggcattagggctggcaaggcgcggccgatggggcccttcgcctgtgtggaccgtaacaagaaactccaggaggggcaggattgagggcagtaggacggggttggtgtgggcgaggggaggtttgggtccccccacctctccgggcagctggtggcggccccgccctccctgagggcaaggaacccgcagccgggaggacggcggctgcaggccagtgtagggtgggcgcggtcccattagagcgggcggggtccgccaggatgggcggtgaggtcagccccgacgtagggggcccagagcatcgctgggtggctcgggtggcaccggcgtccgggccgccaaccccgcaggaagcgccca

SEQ ID NO: 93928 - DNA, 61530 bp, Homo sapiens
gtgtgccaccacaccaggctaatttttgtatttttagcagagatggggtttcaccatgttggccaggttggtctcaaactcctgacctcaggtgatctgcctgccttggcctcccaaagtgctgggattacaggcatgagccaccgtgcccggcctgaaaataagaccttttctaccagactgttgaatactgcccctctcccaatctcccaccccctccattcctgtagtttcttccccccgtgttagtttccaccatctgaaactctatattttacttatttattcattattttctcccccaactgaaatggaagctctgaggccaggaatttcttccctctccctaactgctctattttatgccccttaaacagagtttggcacacagccatgctcaacaaatactcggtgaatgaatgagtgttcacgtgccattgtccaggaggtagaaataaaattgccattcttctaaacaccaacaaaattggtgtcaaaaacctagaacaaatataatgcagctatctttatactcttatattgaaaaattatctgtcagtcaaaatgaaatcactttattacttgagacaaaagttgccagttgaatagctcctcaacggtttgttttgcatgaattaaatccacgcttaccttccaacagcattcaaaaactctctggtatacagctatctgccaatctcactcttaagtaaaagtaattatgcacaccacaaaccctagaattcaagaggcccagccccttaatgcctgcaatttctatcatttaaaaattttttaaatcagtgcttatttcaacgaaaccattcataggtcatgtcccatctagtttaatggatttaagaatttcagaaaacctaccagaacagacaaaatgaagccaagcatagaatgcatctctagtgcaaaaagtaaatgttaaaacacactagtttgaagattatcaggagatctgcccacggtcagtatcctccatacaatatcagctagaagaaacaaaactctccctgctttatgattctgttccaaattccatttccctaccttgctcttagtactgatttcgctactttgggaactgctactactgtgtcgttttttrcccttgcgaaacatttttcaccaccattgcttgatccagagaagatcccctgaaaaaacaaatattggtaacagttacatcgggaaaagcaacttttttttttttttttttaagagacagagtcttgctcttacccaggctggagtgcagtggcacaaacatggctctgcagtcttgacctcacacctcagcctccccgagtagctgggactacaggcatgtgccactacacccagctaatttcattttttgtagagacaggatcttgccatgttggccaggctggtctcaaactcctgctctcaggcgatcctcccgccttggcctcccaaagtgctgggattacagctgtgagccaccatgcccagccaggaaaagcaactttgatattggttacagttacatcaggaaatgcaacattaaatcactttatgcaaaatagaaataaaaatcatcaattaacttttcccttggatactattccttttcattctttcctattaaattatagaaagttaacccaataagcaaaaaaggcagaaaccttcttgtcctacaggtgtgaaaagcacttttctcaaaattttcagacacgtcacctagttctcaaaattttaagggccttacttctcttcaattgagtcaagattttagcaaaatatactatgacacattggcttttcagtcgagatactaagattcagtaaccctctcagtttcacattctatacttggtagggctaagatatacacacctctcagaaatgtgcatttttcttgaagttttgaaatacctttaagtaaaagctgacacaaagacattcccaggtgccagcacctcacctcccctctctattaagcgtagttaaggagatgaccttgcctcccagagtctgtgttacatatttctttttttgaaattaataataataaatgcattggaaactaagattcatccttgccagttgcataaggacagcatatactatacttggcaaattaactaacctacatgaagctgcacagctcacagaactcccgggacagttctactgtcatagcctcatgataaccttgtgacatatccatttgctctactgatgctttttaagggcataccatatgccacacactctgcagggctctaagctctccctcaaggggctcacagaaggtgggctgtaatctgccttttacagatgagggaactgtgacctgcctctcaagacgatttatgaataagataacctgatcaattttttaccaaaaactgtattctccagagagaacaagaaaatctgcttactatagaattgaacactatttgactgtcttcaaaggtcccacatacagcggtctgcacagagagtttcctttcattctgacctgggtgatgcttttcagagaaactacgcacctgatgaaggaaaaagaacgagcaactcacgcagcagtcagtgaaagctcctgctgcaacccaaagattctccgtatttggagaccccactctaagtccacttactaggggacgacattaggccacttgcccaagtctgaccactgagcccaagctttttaatcagcctcatcatccaatttatttctatatttttgctttatttgtggggtaccaggaaaatctgatttattcattcattcctggatagtcagtgagcacctaccaggtgtcggggatgcatcagtgaaccaaacagagcccctgacctcagggagcctgttcttagcgagagtagacagaccaacaagaaaaacacacatgaaacatattattaggaaaccactgctatgaggaaaactaacacaagttgaggagacacagactaatggaaggaaggggtgggtatttcagaaaaagatgctgtagctctttttctgaaagaagtgcgggcagccataaatagcctggaggcaatgccgtgcgggtggagaggggcccgagggaacagtcaaggctgtccgggagcaggaggacagcaatgggcccaaagtgccacagaaggccaggcaggccgcggtaacagtggactttagtttaagaggaatactctgaaggctttttatttattttttgcttatctgctgtgatcttctggaatggaggcttttaaaaagcagtttagcgacacaatcaggtgtcttctgttttttaaacgatgaccctggctgccagatagcgaactaactccactggataagggtaaaaagtgagagatgtgttggaagaagactgcgggtgattgctgcaaaggggaaccttaccagcacaggacacttgtcagtgagagatggcaggagagccttattccaaggcctgcacgaaactaggttaacgtagcagcataaagtgccatgttaatggcgctcacgggttaaaatgttgatgtgtaacatatttaaacatcagatacttaagtatatataaatacatatttatatataggtaacaattttaaatatgatttgaattttaaatcaaaacttattttaaaaacaaaatgtgattctactgtcagtggaatcctgaagtgtctcctcaaatcccttgatatgaaaatcatgacacgacaatgccttagcaactccttaaggctttcttttcatcatcaacccagcggcttaggaaaaagcagcatttattaaagtctttgatatctgctgcaattttgatgcatgttctcaagcaaatcattcttgcctcaaaattattcatgggtggctcacgcctgtaatcccagcactttgggaggccaagtcgggcggatcacgaggtcaggagatcgagaccatcctggctaacatggtgaaaccccgtctctactaaaaatacaaaaaattggctgtgcgtggtggtgggcgcctgtagtcccagctactcaggagcctgaggcaggagaatggcgtgaacccgggaggcggagcttgcagtgagccgagatcgcgccactgcactccagcctggacgaaagagcgagactccgtctcaaaaaaaaaaaaaaaaaattattcatgcatcaaaatgaggccaatgatcctgattggcgattggatgctccgcaggctcatcaaatgcaaagatgtctcaagctgaacccatcatcctcccctccagatctgctcctctcctctcctctccctgtcaggagattctattattgctggaggaagccagaaaatcatgatttccttgctgtccttcaggccccacatccaatctggcaccaagacccactgtataccccacctgaagagctctctgagccagctctccaccagggcccccgtcatcctaaaccatgggcacagacactatttttttagaaactgatgaatgtgatggatcctcaccctataaaaatgcacatccatacaaagtttggcatgaatttaaggaattcacaaacccaaggatatttcgtggataagggaccttgtcctactggattccctaacactttaaatctacccccacactgcagccaaaacgattaaaatgatttctttcaaacatgaatctaatgccactagcctgctgaaaatctttcactggttctccaaagtcagagaccaaagtcaacgttcttcagcacgacacgccaggtcctccaggacccagctcctaatcacctttccacttccatcctccacaacccgggcacagttcattgatctcagcaaggcaaagctgctcctggttctcagcgcgatgctccacgcgcccctgctttgcaccgcccgggacgtccttcacctgtcaggcacttggctacttcttacctttcaaggcccgtttcaggctgcaggccttcctgggatctcaaggctggggtaagggacccacagcttgagtgtaccccctgatcacagcgccacgatctgctgtggtctctgatctcactctcccagctgcacgctggtcaaaggcggagctcggtgactcctctgcattgccagggcgcctggcaggggacgcgcttactgaagccgagaactttctggggaggtgacaccccaacagcgattcccatgtaccaaacgcctaccacgtgccatgcacggtgctaggtgcacagatccctctcaccctcaccctcaccgaccagcaaggctgcaggataacagcccctttcaaacgaggatgccaaagcgcccgaagagtcagtgacctgcccagggtcaccagagtaaggacggatgcggccaagctcggggcctagggagagccggctccgaagttcctcccagacgccagcctgcttggcacctgtctgtcaccgtgatggagcaccttccaagcgctgggtgcggaggatgtgacagcgaaggggacagacaaccccgaccctgagaggcgggaggcggccgaagcggggcagaggaagaggcaaggaaacggcccgcggccgcccgccttgccgcccctccggggcgacagcggctcgggaagctgcagtccgcaagcccacgcccgatctgcggttccaagctcctccacccgcgccccgggagcgcggccccgcccggaaccaagcccgagcccaggcatccctcctccgcccgccccgcggccccacccatccttcctggccgtccgcgccgctctcgggaccgtgttcccgtcaggcctccgcgagctcggccccaagcgggacgagggctgggcgctcacctcgcagccgcgggcccatccccgggttgcggacttcggggtccgcgtgggagtgccgcggcctttggcgcccaggcagctactcccgttcccgctccagcgccggcttttccagccctcctgcccacgtccgccgggccgcgcctccaagactatgcgcaggcgcagtcctgacgtcctacccccggttccaagaccccaagtggtgggaagcctcgcgagcggcgtcccccgaccggaagtcgaggggaggagtctagtgccgcgggctccggagtgacggaagttgtgctcttggtgaatggggttcttccttttttatttaccggtggctgtgcttccaatttaggaagaccccggcgacctgttcctcacccccgcttcgccctcacactttcgggatgtctgcgattcctgctgaggagagcgaccagctgctgatccgacccctgtaagggaccagcgagagagggaatgaagccacgggctgtgaggggcgcgaggggtaaccggagactggcctcctccgtcgcccgcgctcccacctaccccggcagcctgcctttggtccgcgcttgcgggccaggcttctcaggctcgaggggttggaggaccgttgatcggaaggggcctgctatagagtgaacgggattttgctttttcatcagtttcaggggagggtatgttggagtcggaaaaaaaaaagttttacggggccaccgctcgctttcgtacacgctaagaagcgttttcacttagcacaagcacggatctctgcgcgtcagggcaagctgtgagggagccggtgaagcttatgaccgacaggatgagaggaggacctgaatgaggctacagccgtgcagggaagaattaagtctgtttcttaacaccagggcttcacatgtgccagaagttagaaaatattagggacttgccgtgagtttcgatcttctcagctcaggccctagtagaataaggaaggtgtaaagctggagaagagaaagtgcagaggtgttagggacaaaaactcagycctcgactgtccataaggagagtggcctttcagtggacacgatcctcatcagtcgggaatgctgctgaaggggagatgcaaatgtagagaacttgaattcctacagatgagcatttcgaacccacaacatgtttattgttagatactagttggcacaacatgaatatacgctttccaaaaggtagaaagtatctcctttacacaatcattcagtaaggcttcattgagcacctgcttgggacatagtccgtttccttctgcttagttcacacctgtcatgtcttcctgygatgagcaaacactgagcaagtgtcaagcaccacacatggggatatagacgcaacagagggcccagttaattgctctcgctcttttggagagaattacagtgcacagtgggaaatattggagagatactttggaataataggagactattactttgaagtcagacctgaagtccattatctacttgaccaattagtaggacaacaatctcactgaacccgttttctcatatggaaataagataaaacttgaagagtgaacatcgcggtaggtgctttgtaaataatagctaatctaagarcgcaggcaggcattgcactgagcactgtgaaagtatggaaaagggatttctgacagattgaggaaaaaaggatacctcgtggatcctgaaaaatgtgatgcctgagctgagtcctaaagaatgagtaggagttaaagactggggggcccaggatgttctaggcagtggaagtggcacatatgaaagtgagagtggtcacagcttgtggccagattcctcatggctgtagctaaagagttgagttagcagatgaagcgacaggcagttgaggtccagtttaggaagcacctcgtatacacaggagtttggacctttatcaagtcaattacagggagccagcgaaggctattaagcaagcatggatattgtgggaattatgttttaggaaaatctctcctggcagcagtgtagcagatgaataaaagcatggatgaataaaagcatggattgagtagagcagattcagtgagatattgaaagattctaagtctagctgacgagagcctgtagtgagtgatgtgagtgtgagagagtatgcaaatgagatcttcaggattttgtggctgatcagctgtatctggaagggtggttgtggggagggaaggcagggcagagaggatgttatgatcagattcctaagtttggcagttgggaaagggtagtgttattcactcaaggagtataagagatggggcaactctggagtaaatttgggaatttggttgtttcgtaacagctttattgagatacagtttacataccatacaactcacaatttacataccatacaactcatttaaagagtataattcagtcgttcttaacatagagttatacaaccatcacctctctctaattccagcacattttcatcactcccaagagataccttgtattcattagcagtcatagacaatccccactacctctccagccctaagcaaccactaatctacttctttatagatttgcctgttctggacatttcatgtaagtgtgatcatacaatacatactcttttgtctctgrcatctttcatttagcataatctttccaaggttcaaaattgaggagttttgttcattcaataagtattttttgtgatgtgctacatgccaggtactgtagcaatacagcagtgaataagatggacaatgcctctgttcttaggaagctttcatttagtagcctgaaagaagacataagtaggtacaataacttcatgtagttgtattaagataactgatgctgggttgtggcttgctgtgaagggcaaattagaggaggtagtcaagggaaagcatctgagaaggtgacgttggaactgagacccaaatgatacaaaggagccaaccacatcaatatctgaagacaaagcatttcaggaagaaagtagagcaagtacggggcatgtggtggaaactagtttggcatcttgaatatgaagtcccgggagagatcctagtagagatacctagtgtcacgtgtatgtattaaaggtctagaattcagaagaacaatctgggttacaaatacaggcttggaagtccttagcatgtcagaaagatgagaatgaagattgagaagttggccaaggagcaaaccctcggaatatcaacatttaaagggtaggcagaggtggctgaatatgtgaaggaaacaggaaagccagcaagacaagatgagagcatcaggtcagagaagccaagggagaggtgcttgaggaaggagcaggtactccttaggagtgacaacggctgccaagagaacaagatagggactgacacctatagttccagctacttgggaggctgaggcgggaggatcacttgagcccaggagttgaaggccagactgggcaacatagggggaccttgtctcaaaaaaaaaaaaaagactgaaatgactactgagcagcaaggacagtttcagaaaagtgattggtaaaagccagagtatagcgaattgaggagcgagtagaaggtgaggaagtacaagagggtccactgccctgggaggtggtctggggaaagaataaagtgggaactaaaggagcttagagtcaagggattttaatttggggatgaacatggctgtagtatgtttaaatttggattggatggtaaagagcagacagtgaggaaaatgtcaatgacacagcagtgttgagttcctcagaaggagggagggagtacgtagagtagaatggtggaaagwttcattgtggaaagagaggtctattctatctatagaggagaaatagaaggagacagatgtgggcaggttggtaccctgttggtacatgtattcttaattattgtaccaacatgaagttgaggaaatttacaaatggactgtttatttttttgatgcagaagatggcccatgcctcaagtgaagaagaggatagaaggttggaaaatttgggaaagggaagaaagtttgaaaatagttgatatggaaatgaaatggagaaaacagccaggcaacattgagggccagttaaagtggaaggccagggtatccacaataattacaaataaaaaatgtttaaaaagtggaaggccaggaatttatggcggctctcatccacagttgtttgatcttctgtatcaacacctgtttggaggtaggatctcagtttggggatagatccattgcatgtccatctgactgagttccttgaggtcagggtccctgtaaggcatttccatgtcctaggcacttaatccagtgcttggcaaatagaagctgcttaatgttgagtgagtgagtggattgtgagctagaatggttgggaaaaggcatcaaagaaggtgagggatttgaaagatgaggtttaacttaaagtgtgccttgtgaccattgcaaattatggctgaaattattaagaagaaacaaaaattatgtaagtagttggtataaaatatgctgaaataacagaaagtagaagaaaaagtgattgaaattcacagtatgaataagtattttaaaaaaaaaaattttttttttttttttttgaggcagagtctcgctctgttgcccaggctggagcgcagtggcgcgatctcagctcactgcaagctccgcctcctgggttcacaccattctcctgcctcagcctcccgagtagctgggactacaggtgtccgccaccacgcctggctaattttttgtatttttagtagagacggggtttcaccgtgttagccaggatgggtctcgatatcctgatctcgtgatctgcctgcctcggcctcccaaagtgctgggattacaggcgtgagccaccgcacccggccatttaaatttaagccatttrgcaaatacacattatgatcttaaagaagatgacagtgttgaaatgcttatggctttctacttaagtgctaattctagaagtattattatataatctgcgtaactgctagtttacattttaaatacattataatttaatcctaaaattcagaaaattgaatttaaatcaagcccaaacctttgggcttcttggatctgtaccgccttctctcttaattttaagaactgcaagatccctggactcccaaggatcagttttcatctgttctcatgtggacactgttcttccctgtctttgtgattttgtagaactctcttacgtctcagaatttttcagtgaggtgctgtcatcagatggcatgtagtgtacattgtaaaaaagtgtaagtttattggacttggttttgattttttttaatccttctttttctccccttgaatatttacagtggagctgggcaagaagtaggaagatcatgtattattctcgagttcaaaggaagaaaaataatggtaattactatttttgtactcagtttaatagtatggctctgtctgtattgggtgttagtcttttctcatagactagttatctttttagctcccagaaaaatgttatagtacatgtaatctatgctgtatagtgttaatgagaaaaactaatacacacttctacttrgtaatttagttgattaagaagatatattctatgactgtaaaattgtcagctagatctgttgaactgttacctcttcaaagtccctcttccactcctgaagggttgagccagcctaactgccccacccccagtggaagatcccaagggcccaagcactctgaacacactgagagctctagccgcctccagcatgtggggatcaagccttggcctagaagcttggatccccaggtcccactggggctgccggccttggccaagtcactttgcttctctaagcctgaaaggtagaggggttagaggagatagtttctaaggtactcattagaaagtcagttctgtgtctcagattcctttgattcctctttcttctcaactcctcccaatctgaaaagaacatgtataggtcagacatagtcatccttttagtcatctgttttgttaatttggtagtaaygccataaaaataagtaactttaatgactgagtcttaagaatttgttccctaatgccttaaaatatttaaattaccctgatcaggtaagtttcccatttctaattattatcttctcacgagagtcgatctggtagtagtaaatctataaacttttaaaattttaatctgatatcaaagtttttgaaaaagatttaattcgttgttagaatgacgaccaaaagtagctggaaagaagctgttttgtactttgcatcctgtgacccctaaatgtgagctatattttaaatttgttgggaagttagaattgttaatggcatatttgccacatttaataagaatcatgttccaagtgctagtgcctggagtccatcttgagtatatgggtgatggawctagaattattgcctatttgccgaatgaattttaataaaatgtgcaggagattgtgatctcttttcctgtttctttcagctcgactgtgggatccaccctggcctagaaggaatggatgctcttccttatattgatttaattgacccagctgagattgatctcctattaattagtcagtaagtttttccctttattaatgacactttttcacggacttttactatcaagatcattctttactagattttgagagtttggttttttaaaagagtgttttctgctaggaagcatattgcagacatctgagtctaaaccaacactccgtaatgtcatcacaggctagagaagtttgctatgaaaaacttacctacctctatgtataagttcagtgagtatgtgagaaggagatagtacagaacttgaatcattgtaaaacttgagactaagaaagcccttttccaggatatctccttgaggtcactgttttatcacattcttctataagaacgccatttcacctttattgaaactatttttaaatagagttcatatagaaaaatgtgacaagacagtgacctcagggagatatccatgtttcaactttattctgttaaaatgtttgctgtaattctggctgccaggagtaggcttgggatattcttcttcctccctaattcactaataaagttttttgctgtttaaaaacaatactttaaacatctttcctccattttagaactgtatgcattacttcttccttctacacatacctactcttggtttttctgaaagtatcagcacatagttgtttatataaaacttgttttgtacagtaagcaacagtttcattacatggtatctgatggataataattttaagaattaatgcagcctctttctttttaagtttccatttggatcactgtggagctctgccctggtttctacagaagacaagtttcaaaggaagaacatttatgactcatgccacaaaagctatttatagatggcttctttctgattatgtcaaagttaggtaaattactttattagattatacacgactttggctctatatggyatgtatggttcaagatatggaccattttgtgttttaaaatgaggtgctcccttttcatgtataaggatatcagtaatttcatcattcattaacaaggtcattgaaacctattgtgtttctagcaccttcctgaccttgaaggtttttttgagacaggatcttgctctgtcatccaggctggagtgcagtggtgtgatcacagctcactgcagcctcagccacctgggctcaagcagtccttccacctcagcctcctgagcagctgagactacaggtgtgtgccaccacacccagcagagttttttgttttttgaagagatagggtcttatgttgcccaggctagtctcaaactcctgggctccagtgatcctcctgccttggcctcccagagtgctgggattacaggcatgagccactggcctggccttgaagtctttatatagctttttgtgtccttttaaaacttcattaggctggattggaagagttatgcttaattgtggtaacactcgttaacacttcaataatgcttaccacatactaggcccaatcctaaattcctaatgtatattaacttcacacaaagataaataaatatayatattttttttttctttttttttttyttttttttttgagacggagtcttgtgctgttgaccaggctggagtgcagtggcgctatcttagctcactgcaacctctgctcccgggttcaggcaattctcatgtctcagcctccccagtagctaggattacaggcacacagtgcataccaccacgcctggctaatttttgtatttttagtagagacggggttttaccatgttggccagcctggtcttgaactcctgacctcaggtgatctgtctgtcttggcctcccagagtgctgggattacagggttgagccaccgcacccagccgggagataaatatatttaatcttcacaccaactcatgatgtaggttctattataaattccattttatagatgatgaaactgaggcacagcgaggttaggttatttgcctaaaatcgtcacagtaagagacagagcaaggatttgaacccaaacaatctggctccagagtcagcgtccttaaccactgttctctcttgcttttttgtaagtacattaacataattttcaggagaaaggttgtgctagactttgtagaaaaatcttttctcatcctaatgtgagaaatatctgccatggttcaatgtatgtgagtgtgttatatctttcaggagtgttggggtgggaaaaaagtttgagaagtactatcctaaagagtattttgtcttaatttattgtatgtattattgaaaattgagagtactttgagctcagtgtcttaatttcctgtgtggtttgtttaaaatcaagttttgtagctatacacacaatagagtaaaaaaaaaatacacaaaatatctgagaaattttaaatacatgattcatacagtatattttaaagaaatatcttcatggagatgttatccacaatttctttgtgttcaaaggctttttaaaaaatctgactcttaattgtttttgctggcatctttcaaaatttagtaacatatcagcagacgacatgctgtataccgagacagatttggaagaaagcatggacaaaattgaaactatcaactttcatgaagttaaggaagttgcgggaatcaagttttggtgttaccatgcaggtcacgtcctaggagccgccatgttcatgattgagatcgcaggcgtgaaggtaccctctggctgtggcgcttttctccccagagaaatcagtacagagctttgtgccaccaagtactattwaaaaaaaaaattccctaagacttgcaaagtgtcagaacayggaaacataagataaaaatacagttaacgcttgttccttttaaatattgcagttcctacctccattacaatactttctttatcaagactgaggaaaaaaaaatttttaaagactgagaaaagagtaaaataaacatctcaaaaagtgattccctgacaccataggattccgtttgctttagaaaactggttagggaagaggtgtctttgtggctgcattcgtttaaaattaaaacacaatttgatattcatgtccccctgatgtcttagaattcacaggtaagcccctaagcagggtggactgcaagagtgaaaggggttaattaggaaagatctttggggaagccttgaacttctgacaacgtgggtgggccgctggctttccagactccagagcagccgctctgaactcaggctgcaaataagactcacttagggagctgctgaaaataactgttgaatcaaaatctggaggcgcagcttggccttttccttttcgagtttgctaggtgattctaacgtcagccagagaaccaatgctmtagtgtcacgtcctaaatttttcacagctgcttatacatttggaacttttagacattgaattgtaaagtatatcactaaatcacttattcttgcagtttgctccagggcacaaaaaataagtagcacaaatgcagatgtgaattctcttggaatttgatgcagaccctcttatgattttatctccggttttagaccrtgtacctcagtgcactcctttccttgtctgcatgccctttttctctaagaagttcagagcacttctcaagtggattaatgttatataggttatcattgtgagatgatactgggaatagattattcccrtttactagaggaaataattgaagcactgaaccgtttactgactgaactacacattttgaattggacacaagcactgcatgtaaatttcatcagttttagacttaaaaactgtaactgcacttttggatttcatgagtttaatctattcactagcaaaatgaagccttccccaaatcctaactttctagttttatctttttcacagcttttgtacactggtgatttctcaagacaagaagataggcacttaatggcagctgaaattcctaatattaagcctgatattcttatcattgtaagtattaatatactatattgtaatcaatgtaatgtaagcagattttttttcttttggaaaataatactgtgatctcactttcataatatgttattggatataaacttaccttttttaaaatataagaaaactggtggccgggcacggtggctcacacctgtaatcctagcgctttgggaggctgaggtgggcagatcacttaaggccaggagttagagaccaccttggccaacacagtgaaaacccatctctactaaaaaaatacaaaaattakctgggtgtggtggtgcagttacctgggaggctgaggcacaagaatcacttgaacccagaaggtggaggttgcagtgagccaagatcacgctgctgcactcgagcctgggctacaaagcaagactcagtctcaaaaaaaaaaaaaattggggcaggtgcttctttttgtagtgcagyttcactttcttgctgttaaatgcattaactctagtctaatatcagagatgccaggctgcctctgggcaggatcagcaggctgtctctgggcaggatcatttttactggctatgccctctctctgtcttctaaatatatatttctagatgagaatatgtagaagaacatcttacgggtcattttaaaatggtgtgacctcactgcctttgccatggtgactatcctcaggcccttagtccatgctaacttatcgttttgtttatctttgtgtgtcatgtctgcctactaggttgcaagtcccaggggagcaaaaaaaatgaactgtgtacagaagctctttgggggcagcttgggatgtgtgttgctgactgtagagtcaggggttgggagagaaatcttgcaagcttttggtgtatataagaacatcaggtgtatgtggttcaaggaggaagagttgtctgtttctcctccaccacctaccatgttccccagctgcccaggcatgtgggccagtacatactgctgtccataagcaacatgtgagcagattagattggactctgctcatggtatgcccagcatataaacttaatttaagggaagatttattttttgaaccctcagaaaaagtagctattttcatagtaccatactttagagcagtgcttcaaattttaatatgcttataatcatctgatgatattgctaagatacaaattctgattcagtacatctgggctggggtctgagattttgcgcttctgataagctcccaagggatgtcaatcttctggtcagtggaccatacctagtaagactttaaggatattcttaaacagaagtataagaaacaacatctgtttctattttaaaagctttgacttatcagaggtgggagaaataacctttttcttcctaatggaaagcaaaatggttaaaaaaggacatgggaagaagatacagttttggactatttcattttataaaaagttcttagatttgaattctagcattctttttttttttttttgagatggagtctcactctggagtgagcgactgcaatggcatgatctcggctcactgcaaccactgcctcccaggttcaagtgattctcctgcctcagcctcctgactagctgggattataaggcatgcgccaccatgcccagctaatttttgtatttttagtagagacggggtttcatcctgttggtcagactggactcctgacctcaggtgatccacccrcctcggccttccaaaatgctgggattacaggcatgagccaccatgcccggcctctttttgttgttgttgttaaattttatttttttgagatggagtcttgctctgtcgcccaggctggagtgcaatggtgcgatctcggctcactgcaacctcctcctcctgggttcaaacagctctcctgcctcagcctccggagtagctgggattacaggcgcccaccaccacgcccagcttatttttgtatttttagtagagacagggtttcaccatgttggccaggctggtctcaaactgctgacctcaggtgatccacccaccttggcttcccaaagtgctgggattacaggtgtgagccaccacgctgggcctgaattctagcattcttgcttgctcttcccaattactattatgacaacacatgttcgagtaaatgacatgctaatggagaagtgaattgcttagcccctcagtatttcattgatgtttaacttttgaattcttggaggatcattggtcttagtctcacacttctaatgtattatttaggaatctacttatgggacccatatccatgagaaacgtgaagagcgagaagcaagattctgtaacactgtccacgatattgtaaacagaggaggcaggggtctcattcctgtctttgctcttggaagggctcaggagctgctcttgattctaggtatgccatttcctttgtatttaggcgatgatcaaaatcttgtcattttatcaagataataaygtggtcttggatgagtcattccaccgttctggacttcagttttcttcatttaaaaatagagatttggggccgggcgcggtggctcacgcctgtaatcccagcactttgggaggctgaggtggggagatcacgagatcaggagttcaagaccagcctgaccaagatggtgaaaccccatctctactaaaaatacaaaaattagccgggcacagtgacagatgcctgtaatcccagctactcaggaggctgaggcagagaattgcttgaacctgggrggtggaggttgtagtgagccgagattgcgccactgcactccagcctgggcgacagagcgagactccatctcaaaaaataataataataataataatagggatttggatctaggaatagcccaggaaaacagcaactctcatgcactgctgttgggaatgtgaactggcgaccccttccggttgccatcagaagtcttaaaatatgtgtaccctttggccagcagttccgcttctgggaaataaatgagatgtacagaaaattttgtcaggaaaggtattcatcattttagtattttcaaagaaatatgtgagtaaatatagcattgtaggaaaaaattgtgttacagatgagtaattacatactttgcacataatatattaagtcaaccaaaaaagtagagttcaaaactatatttactctgggytggacgtggtggctcacgcctgtaatcctagcacttagggaggctgaggtgggcagatcacttgaggccaggagttcaagaccagcctggccatcatggtgaaacctcgtctctaccaaaaatagaaaaatgagccaggtgtggtggcacacacctgtagttccagcttttctggaggctggggcatgagaattgcttgagcctgggaggcagaggttgcagtgagccgagattgcaccactgcactccagcctcggtgacagagggagacygtctcaaaacaaacaaacaaacaacaacaaaaaaaaaactatatgtactctgatcctagttaggtaaaaaatgcacacacaaatgactgaaaagctactaaatctggatagtgaggatatggatgatattttttgttttctgcttttctccattttacaagtacttcagtgagcatgtataattttttgtaataagagaaacaatggttgttactttttagcatacatttgtacttcatgatcccttctacctcacattcggtgattctagttgggaagagcactcttattgaagaataaaagaaggtactttacagccaggcatagtggctcacgactgtaatccctaattccagcaccttgagaggctaagggcggaagatcacttgagcccaggaatttaagatcagcctgggcaacaaggcaagaccctgtctctacaaaaaatacaaagaattagctggacgtggtgatacacgcctgttgtcccagctacctgggagactgaggtaggagtatcacttgagcctgggaggtagaggttgcagtgagccaagattgtgccactgcactccagggtgggcgacacaatgagaccctgtctcaaaaaaaagcaaataataaaatgggtgctttgcatgagtgtcacctctgtgcgaagcactagaaacacttgcatcttagctcatcctctctgttctgccatcttggtgaggaggagaaaaaatagtatccctgtcacactgaaaaggaaaacagaaggaaagttggaagaaatgaccccagatgaaaaggaaatctgtaatagataggacttctagaagctgaatttcccaaatccgaatctaattcagtcttttgatcttgattggtcctccttcctaactgcaagtcaaattcgtccttagaagtcttgaaatcaaagtcttcgtaacctgtaagatgaagaacagagaagttaggaagttgaaacaatgttgccaccatcaaattgggttgccagatttagcaaataaaactagaggacaactcattaaattttaggttcagataaataatgaataatgttttagtataagtgtaccaaatatttaatatatattctttttttttttttttttttgagacagtctcaccctgtcacccaggctggagtgtggtggcgctatctcggcttggcgcgatctcggctcaccacaacgtctgcctcccgggttcaagctattctcctgcctcagcctcctgagtagctgggatcctagctaatttttgtatttttagtagagacgaggtttcaccacattggccaggctggtctcgttagtatatattcttatactaaaaatcttttgttgttcacctaaaattcaaatttaactgagtatttgatatttttatctggcaattctaccgtctgttctttgcaactggttgccctttttccttcaattctcccttgtaatgtagtataatagaaagaacagctgctttcaaatcttatctgtgtttcagatgaaatctatcatatggctagagccatatgaccttgggcaaattatttaactttttttaatattcagagtttattcataaaaacacgcacaacaaaccaagaaatggtggcatgattgtgggatgtagtccgctttagggtatctaagaaatcataagagtaataaatcatgaatgggataaactagaagacaaagcaggaaatttgtaatgcatgtgacagaaagtctttgtcctcatataaaattatcattgatacatcaaatggaagaataacattcacacaataatcagcctttttttttacccttagtttgctagttaaaatggtgataagtcttcgtaagttgttttgaaaattagaaattatagatgtaaattggtgaaaccccgtctgtactaaaaatacaaaaaattagccaggcatggtggccagcgcctgtagtcccagctactctggaggttgaggcaggagaatggcatgaacccgggaggcggaacttgcagtgagcggagatcgcgccactgcactgcagcctgggcgacagagtgagactccatctcaaaaaaaaaaaaaaaagaaattacagatgtaaattatataataggcatataatacattttcaaactgcagaggcacctattagaataaagggtgtctttcagccatactaccctgataaaattttgggatttaatgagggcttttcccttaacataagtcttttgacggtatattacccactgctttctttaattatcagaaactggttagtaggtttttaaaaatacaagcatggctgagtgtggtgactcatgcctgtaatcccagcactttgggaagctgggcaggaggatcacttaagtccagagtttgagaccagcctgggaaacataatgagacccagtctcaaaaaaaaaaaattagccaagtatggtagcacactcctgtagtcacagctcagaaggctgaggtggaaggatcacttgaacctgagaggttgaggctgccatgagccatgatcataccactaccctcaaggctagtcgacagcctgggtgtaaaacacaaacaaaaacaaacaataatagcataatatgactatactttttttttaagtgttcaaaatcggttaactcttggcaattctcttttgtaattagcactcaataaatctgtttgaaatattaataatacatttttaaaaccatcacagaattttttctagtacacttttctaatacatttaaataaaaatgtattatttagtgtcttattatggtagtaagttatagacttcagtgtaaacttatactgagtcatgtttaaaagcctccacatctttggactatgatcatagcattctttttaggtcatgcactatttagaaataagttttggttttgtaaatttaagttagttacaacsaggataattttgcttaaactctttaaaatatagttgtgtgctttatttcttggttgtatgtgtatcatttcttgttctgtgtgtatcatttgttatttgaactgtttaccccatctaacaaagtgatgtttgtttcttgcaaaatctctctagatgagtactggcagaatcacccagaactacatgacattccaatatactatgcatcatctttggccaagaagtgtatggcagtgtaccagacatatgtaaatgccatgaatgacaaaatccgcaaacagatcaacatcaataatccctttgttttcaaacacattagtaacctcaaggtgagtgcttgtggaagaaagacaaggatggataaaaccaaatcagtcattagtagtaggaggtacgaggccrtgagtgatggctcacagctgtaatttagcactttgggagtctaaggcaggaggatcactagaactcaggagtttgagaccggcctgggcaagatagtgagaccctgtctctatcaaaataaaataaaaatcgtaggcagtgcttgtcagtgactctggctgaattcctcttgctggagtcttaccgcttctcaacaggtgtcgtttttctgcagaaaatcaaaacttcagcagctgacattctttttctgcttcaacagattttgccacttgccccaagtagccatgtgttctcagtatttataatactcatctcttttgccgtaggcataaaaagttctgaggagaaaaatattttgtattatgtatttaagtttctcttctcactcaaaccaaatcatctttttgattagtgctgcaaattctatatatgaaaatttttatatacttttctggaagcattcaataaaatctgattttatttaatttaaaaaatactgtttaactcgatgcttgaatcataataaaataattgatatccgaaataatttaaaagtggacttccagttgtaaataggctttgttcataaagtatttattttaagttaactgcttaaggattgtagacaagttctccctagaacaatgttaaaccttttgatttccaggccagctcaaaacatgcatggagcatgcaaagctattgtgagtctttgggaatattttttcagagttgtgtcttgggtagatcaagacccatttgactcttccttttacttttctgcctgcctgytaggcgctgaagatggtcctgatggttctgatggccctctagctaccaacagaaggttttgaagatcggggtgaacttacygctttttattacttggtttttctaccattcctagcctaaactgtttaggaatttggcaactgaacttaaaatgtttacagatcttgtgaaggctctttcagtgatgtgattaatctcttagccttttgttattctttaaaaagaaagaatgctttgtcagctgctggtagctaacatacttttcccattctgttttctctcttagagcatggatcattttgatgacattggtcccagtgttgtaatggcctccccaggcatgatgcaaagtggcttatccagagaattatttgaaagctggtgtactgataagaggaatggtgtcattatagcgggatactgtgtagaagggacacttgccaaggtcagttacagtcataggctgttgtgttattcctattcagaatcacggaggtggcacggtcctcacaggtttttgcactgaagtagttcttcaaataatacaagttttgatttttaaaaatgaggacgggaataggtagctagagatgtgcgtaggatgtagaattatgcagacactgaatggcataatgaggtcccaggtgattgatatacacattaaagtttgagaaatgctcatctggttgcaagtagagaagaatggacaggaacctgtttgagacaaacacgtgaatactctccgtcctctcatgaagaagaggttgactaatacatatgatcttaaaaagctgtagaatgtgtttgggttgaccactttctactattatgaaacattgattttcagctcttagggatgtagaaattgtagaaaatatatgcagaacttgggaggcagtttctgagcatccaggcatcacattctcatcctctattttatttttaaaaatatgatatgattctttgataatctttattactttaccttattctataaagttctttagtgacaatgttgtatttaaaatagatttccaggctgggtgcagtggctcacacctgtaatcccagtactttgggaggccaaggcgggcggatcacctgaggtcaggagttcgagaccagcctggccaacatggcgaaaccccgtctctactaaaaatacaaaaaattagctgggcrtggtggcgtatgcctgtaatcccagctactcgggaggctgaggcagggagaattgcttgaaactggaggcggaggttgcagtcagccgagattggcgccactgcactccaatctgggtgacggagcaagactccatctccaaaaaaaaaaraaaaaaaaaatttccaggcctggcacagtgcctcacatctgtaatcctagyacttcaggaggccacagcaggtggatcacttgagctcaggagttggggaccagcttgggcaacatggagaaatcccatctctacaaaaaatacaaaaattagccaggtgtggtggcacgtgcctgtagtcctagctagttgggggactgaggcaggaggcttgcttgaacccaggaggtcgaggctgcagtgagctgagatcgcacactgcatttcagcctgggtgacaaagtgagaccctatttgaaaaaacaaagattttcagaatagaaatatatccacatatctaggaaatgactttggagagcacaagaatagttgggaatacaggtttgtctttctaagcataagagttatgattctcactgccagcactccagatagatgagttttagttaatttgtttacttttctcattaaatgtttgcttgattgagaacatgagtatttgatatttactgagtcagttatattagaatgattttgtgcgtaaggtcctaaatttaacatgaatttatgactgcatgaaaaaaatgaaaatgtacctttacgattataactgggtagtttgttttgttatttttctttattttccacagcacatcatgtctgaacctgaagaaatcactactatgtctggacagaagttaccactgaaaatgtctgttgattacatttctttctcagctcacacggattaccagcaaaccagtgaatttattcgtgctttgaaaccgcctcatgtggttagtctatgaatttcatttattgtattaaagggraaaaaagtgcatacccaggaaactgtgcagcaggcagttcacaaagcaggcatcatcacctactaatgcgacaccccctgagcagagcctttcacrtgcactcggatttggcctttacaactcccctttgatttcagcaagctgccccctttctccagaactgactgactcagacctaccaaccccaatcctaatgtttttctgttattttctgctgcctctccaataatttaagagccaggcttggagtatgactgctcatttggaatgccagctccatctcttacttactatgtaacccttggcaagttacttaacctctctgtacctcatttgtaaataggaataatagctcataaggttattgtaaggatgaagtgaaagaacatatctaaagcacttaatatggtgcctggcacatagtaaatgcttaatatatatattatatatatatatatatatatatatattttttttttttgaggcggagtcttgctctgtcacccaggctgactgcaactccgcctcccgggttcaagcagctctctgcttcagcctcctgagtaactgggattacaggtgcccaccaccacacccggctaatttttgtatttttagtagagatggggtttcaccgtcttggccgggctggtcttgaactcctgacttcatgatacacccgcctcggcctcccaaagtgctgggattacaggcgcgagccactgcacccggccgacttacttatatttttaagtatcgtgtaacttattaaaaataagttagatattttgatggaattggaaaggaggggtaagctgaaaaaagtgtgtatttttaattagaagaacactaatgaagcatgtgtccatagaaaatagatgacgtgccctttccaaatgtattggaaagcaggagaaatggccttttgttagttttgtttgtttgcttgttgtttggggtgttttttggtttgtttgtttgtttgtttgtttggatgaagtcttgctctgttgcctaggctggagtgcagtggcgccaatctcagctcactgcagcttctgcctcctgggttaaagcaattctcctgcctcagccttccrggtagctgggattacaggcacgtgccaccacgcccagctaatttttgtatttgtagtagagacaggttttcaccatgttggccaggctgttctcaaactcctgacctcaggtgatctgcccgcctcggcctcccaaagtgctaggattacaggcatgagccactgcacctggccttgcttgttgttttttaaatacgttttactgtggtaaaatatctaacataaaatttgcagttttaaccatttttaagtgtacaaaccagtggcattaattatattsacagtgttgtacaaccatcaccactgtctattttcacagcttttcatcactccaagcagaaactctgtaccgttacacagtaactccccattcccttccgccaaccctggtaatctcaaatctactttctgtttctatgaatttgactattctaggtatttcatataagaggaatcrtaatgcctatgatgttttcaaggttcatcatgttgtggcatgtatcagcacttcatgccgaagtcatggtccgttatatgtagaccacatgttgtttatccattcacctgtgggtggacactcgggttgtgtcactttacagcaaatgtgaagtggtatctygttgtggtttttattttcatttctctaatgactaatgatgttgagcaccttttcatgcagtcttttgttcgtttttgagttttttctagcatgataggcctcacaggtatttgccactggcccttaatgagcagattatttggtcaagaaaaatcactctcctgtctatagcatcacagtgtgtagggtttagtcacagagtaggctcctcccaggtgtttcttattgtctgtgtgcatgaacactcccccagatttccaagccagggaggaaaagccgaattgctcttttgtgtggtgtcaccacctcatcctcagccccatttcatcctgtcactctcctggttctacttctgctgacagtttaagttcctgggttgaacttcatgctcattttcttgtgataaccagctccagcaaaagtatagctgcaggataaaattgcaatactagtagtgttggtggtagtaatgaatactagctaacattgattatttaccatgtgccggacactgtatatgtgttttatatgaactgacttgcttaatcttcatgaccgacagctgttctgcagatgagacaactgaggtgtgaaatcacttggtcaaggttacacagcttaaataagcagcagcaccaggattctgttcaggcagccaggcccaggcccttccccagcaagcagtaagcccctgccacgtgctggtgctggctatgcccagccacaagccatctaccacatgtgagaggctaagaacaatctatcttggccgggctgcagtcccagcactttgggaggccgatgygggtggatcacttgaggccaggagttcgagaccagcctggccaacatagtgaaaccccatctctactaaaagtataaaaattaggcagggcacggtggctcatgcctgtaatcccagcattttgggaggccaaggcgagcagatcacgaggtcaggagatggagaccatcctggctaacacggtgaaaccccgtctctactaaaaatacaaaaaaattagmcgggtgtggtggcaggtgcctgtagtcccagctactcgggaggccgaggcaggagaatggcgtgaacctgggaggcggagcttgcagtgagccgagatcacgccactagactctagcctgggcgacggagcgagactcggtctcaaaaaaaaaaaaaaaaaaaagtataaaaattaggtaggcatggtggttcacacctgtatcccagctacttggaggctgaggcatgagaatcccttgaaccctsgaggcagaggctgcagtgagccaagatcacgacactgcactccagcctgggtggcagagtaagactgtctcaaaaaaaaaagaacaatctgtcttgtaagatagaagttacaaaagtgaatggaaagggactggtagctaatgctgttgttgtaaataccctctaaaatattccatttggggctgagcacagtggctcatgcctgtaatcgtaccactctgcaaggctgaggtggaaagactgcccagaagtttgagaccagcctagacaacatagtgagaccttgtctctacaagaataaaataaaactagccaagcatggtggctcatgcctgtagtcccagctacctgggtggctaaggtgggaggattgtataagcctgggagattgaggccacggtgagccaagattatgccactgcactccaacctgggcaacagagcaagactctctttaaataaagaaatatataaagtaataaaatgttccatttggttctgaaatattttattaggataggtacagtggctcacgcctataatcctagcattttgggaggccaagatgggcagatcacttgagcccaggagttcaagaccaccttgggcaatatgtgagaccgtgtctctacaaaaaatacaaatattagccgggcatggtggcgtgtgcctgtagtcccagctacgtgggaggctgaggcaggaggattgcttgatccctggaggttgaggctgcagtgagccatgatcacatcactggactccagcctgcgcaacagagtgagaccctgtctccaaaaatatatcaatatatgaggtaggccaggcacagtggctcaagcctgtaatcccagcactttgggaggccaaggtgggtgtcaagagttcgagaccagcctgaccaacatggtaaaaccccgtctctactaaaaatacaaaaaattagccaggcatagtggcgtgtacctatagtgccagctactcgggaggctcaggcaggagaatcgcttgaactcaggaggtagaggctgcagtgagctgagatcacaccactgctaccctccagcctgggcgacagagcaagactccatctcacaaaaagagaaaaaagagaaccatgggtgttttctaagacagtagggtagcaatagttttgtacaagagtcataggcatttaaaactagaagagactacagaagtcagccctttacaactgtgaacatagaagcagtgaaacatggaaaaggcgtgtatctcattagtggcaaagactggagtagaaaagaagtttctttactctttgttcaaatagtaccacataaggatcaaacagaatgaatatgtgtatacaagttgaatcggctggaggtccttaaaagtagtaaagtttcataacttccaagtatgtctctatttcatatattaaatatatttcatatatttaattcaacttaaggaccatgattaagctgaatgatgtttccatatattcttttaacatttattctatgtagattttagtccayggagaacagaatgaaatggccagattgaaagcagcactgattcgagaatatgaagataacgatgaagttcacatagaggttcataatcctcggaatacagaagcagtgaccttaaacttcagaggagaaaaactagccaaggtaaaaggttatggttcctgtctgtccaatccatgttttttcttcaggaaagactgtacttcttaagaaaayagatctttagtcaaaagaatatgcttatttctgtctacttgttacactacaggaattttatccttatcctttttggcttcttttggttctgtgcattcatttcttcaggtggaaaatgttcagctagattagattttttgtgtgtgtgtgtgtgagacggagtctcgctctgtcaccaggctggagtgcaatggtgcgatctcggctcactgcaacctccgcctcctgggttccagcgattctcctgcctcagcctcctgagtagctgggattacaggtgcgcgccaccacgcccagctaatgtttgcatctttagtagagatggggtttcaccacgttggccaggatggtcttgatctcttgaccacgtgatccacccacctccgcctcccaaagtgctgggattacaggcgtgagccaccgtgcccggcctagattagatcttaatgcagctgaatctcatagctctttaatccatatccccacttgcttttcctacccacatctgagggtaaagaactgtttgttactgtttgttactgtagccagtatagccttgtgtccacctcttgtcattctccctgagaatctgaagataggctcatatctctaaacatatatgtttgtgtagatatgatggaatatatgaaacattttctctttaaaaattaatcggccggacacggtggttcctgcctataatcccagcactttgggaggccaaggtgtgtggatcacttgaggtcaggagttggagaccaacctggccaacatggtaaaaccccggctctaccaaaaataaaaataaaataaaaaaattagctgggtgtggtcgcaggtgcctgtaatcccagctacttgggaggttgaggcgggagaatcccttgaacccaggaggtggaggttgtagtgagctgagatcgaacctgagagatggaggttgcggtgagctgcgatcgcgccaatgcactccagcctgagtgacagagtgagactgtgtctcaaaacaaacaaacaaacaaaaaagaagtaatcaaggctgggcacggtggctcactcctgtaatcccaggactttgggaggccaagtcaggcgaatcgctttagctcaggagttcaagaccaggctcggcaacgtggtgaaacccagtctctacgaaaaatacaaaaattagctgggtgcagtggcatgctcctgtagtcccaactacctgggaggctgaggtgggaggatggcttgagctccagaggttgaggctacagtgagccattgtcctgtcacggcactccagcctgggtgacagagcaagaccttgtctcaaaaaaataaaaaaagaattaatcatttttgagagtgaaatgtaacattttcagaatttaaagttgaaatagttaaggaaagcctgagctggctttttagagggatgctgtcagaagtctgcatctttacttctgttgatcacaactcgtttagaaatacttctaagagaaactttttaaaaattacatatataattttaaatttttaaaaaggaattgaaatcattatgttgaagagatatgtgcaactcccatgttctgtttttttgttttgagatggggtcacactctgttgccgaggctggagtgcagtggtgcattcatgacttactgcagcctcgacctccctaggctcagctgatcctcccctctcagcctcccaagtagctaggactacaggcacaaatttttttttttttttttttttttagaaggagtcttgctctgtcgcccaggctggagtgcaatggtgccatctcggctcactgcaacctccgcctcccaggttcatggaattctcctacctcagcctcctgattagctgggatcacaggtgcccaccaccacgcccggctaattttttttgtatttttagtagagacagtgtttcaccacattggccaggctggtctcgaactcctgacctcaaatgatccacgtgccttggcctcccaaagtgctgggattacaggcgtgacccaccgtgcccagtctgaggctcaaacttttaatgatttagttgaaggtttaagtatcaacatatgggccaggtgctgtggctcacgcccataatcccaggactttgggaggctgaggcggacaaatcatctgagatcaggagttcgagaccagcctggccaacatggagaaaccctgtctctactaaagatacgaaaattagccagtcgtggttgtgcgcaactgcagtcccagccactcgggaggctgaggcaggagaatcgcttgaacctgggaggcggaggttgcagtgagccgagatcatgccactgcactccagcctgagcaacagagcaagactccgtcttaaaaaagcaactttacgacacacttttaatacataatgagccaaacctgcagacgctaatgaatatcctttcttgaaggtgaattggaggaaaaaaagaaattagcaaaacttagggtatgaggtttttgttgtaaatrgtcgtagttactcctgagtcttactgtccacaaaacttttcaggggccgatttaatagtatttttcttatacctgtagaaaaatatactcagttgagaatctagaactgtatttcacatactctgctggtggtggatatgtggggagaaaaaaaaagttttgcagtcagacagtttagaagatgaattgaactgagttcaggaaaagttgggtttcttatcggagtgttctgtttctcacccataattttaatgatttaaaatcattacctttagttatttttctctctcaagtacatcactgtattaaaattagtctcctaggagcaaaggttcttttctgaaagctacctacaattaaggagaaaataaccctaggaaatactgtgaaatacaaccctctgtgtttataattatgagaacaaatatagcactgcctggttgctgtttgcccttacttgcttaaaggcaaacaagtatggaacacactacctttattcctttgagctcatttatttgcagttgagagaagttatatttaagaatactgggtttcagccaggcttggtggctctcgcctgtaatcccagcaccttgggaggccatagcaggcagatcccttaagctcaggaattgaagatcagcatgggcaacatagtgaaactccatctctacaaaaaatacaaaaataagccaggcatggtggcgcacatggtgagcgatgatcgcaccactgcattccagcctgggtgacagagcaagactgtctcagaaaaataaataaatgaaacttttttttttttttttttgagaaaaagtctcgctctgtctccaggctggagtgcagtggcgcgatctcagctyactgcaagctccgcctcccaggttcacgccattctcctgcctcagcctcccgaktagctgggactacaggcgcccgccaccwcggccagctagttttttgtatttttagtagagacggggtttcattatattggccaggatggtctcaatctcgtgacctcatgatccgcctgccttggcctcccaaaatgctgggattatgggcgtgagccaccatgcccggccataaatgaaactttttaaaaatgaatagtggggctgggtgtcatggctcacgcatgtaattccaacactttgggaggccgaggtgggcagatcatctgaggtcaggagttcaagaccagcctggccaatgtggtgaagccccatttctactaaaaatagaaaaattagccgggcatggtggtaggtgcctgtaatcccagctacttgggaggctgaggtgggagaatcgcttgaacccgggaggcagaggttgcagtgagctgagattgtgccattgcactccagcctggcgacagtgagacactgtctcaaaaaaaaaaaaaaaaaagaatagtgggtttcacgtttgtagtatttttgtttttaaatggttgttattttattctcttaaaaatgtttctccctcaatgtatgagctcacccataacctgtttttattgacctttttattcaaagccgctgctgctgcttttagtgttaggtgtaccacagcctcccaggtttgtatcagtgggcctcactctctgttatgagtttgcagccagcctgagggagtgcatgtgtgcgtttcacggggacttcccggccttccctactgcagtgcagctagtgagagctttcttaagcccyggcacctagtaagttacttgcttgttgaactgattagaactgaactgtgccagatctgccactgtgactcttccctttgacattggtagcaatgcaactgccctcatcatagagatatcaaacattttatgtttttcgtggttaaatccatatgttgttttcatagttcaaaggtgttatggtcttcattatgatgaactgcattttattacctgaaaaactgcattttaccrggttctattttcttcaagtattttttttttacaggttatgggatttttagcagacaaaaaaccagaacaaggccagcgggtctcaggaatacttgttaaaagaaactttaattatcacatactttctccttgcgacctgtccagtaagtatactattaaatgtcaaatccaacttcaccttagcactgaaagaaaatctatgaaaacttctcttcaccttgtggcctaatgttatgtaatagacaaataataaaaaaggaatgaggcaagttagctaattagctttgtggggagagaaaaacacctcccatgaactactgaaagattgaaattattggtgaaatcactttcttcatctttggaaacataagttcatttctgagttcaccttgttttctaccctctacaacagacttgtgggcttttattttctgaagtgactttggattccccagagaagccgtttggtttttatgacctttgcataagcatttcagttttttatgacctttacatcacttgcagggcctttgtattccttcaccattccaaaaggagtaggaacaaaaacttgtataatttctttaaaagcaaaaaagtattaatgtaaagcctaattttttcattacattgaaactttcaacatccaaataagtaacaccaactatataactgatgcctctaatgtgtgtgtatacattgaagctcattatagagaaaaatgaaaaattgggcagggtgcagtagctcacgcctgtaatcccagcactttgagaagccgaggcaggtggatcacgaggtcaagagatcgagaccatcctgaccaacatggtgaatccccgtctctactaaaaatacaaaaattagctgtatgtkgtggcacgtgcctgtggtcccagctactcaggaggctgaggcaggagaattgcttgaaagtgggaggtggaggttgcagtgagcygagataatgccactgcattccagcctagtgacacagcaagactccatctcaaaaaaaaggaaaaattgcacaaaactaataagattacatttaagtttgtaaaytgcttttttcccawagttgatacacatttccatatgcattctttgtctttataaatttactgagccatcaataagtcattttccaatgaatatggtattattttcgagtaaatactatgctcaaggtgatttacatggtactaatacattatatgtgctttatgcaggaataaaaaatagcagtggcccggcacggtggctcacgcctgtaatcccagcactttgggaggtcgaggtgggcagatcacaaggtcaggagttcgagaccatcctggccaacgtggtraaaccccatctctactaaaaatacaaaaattagctgggtgtggtggcatgtgcctgtagtcccagctacttgggaggctgtggcaagagagttgcttgaatgcaggaggcagaggttacagtgagccgagatcacgccattgcactccaacccgggcaacagtgcgagactctgtctcaaaaaagaaagaaagaaatagcagcagtggtgaggtatttacctgtgagattgccctgctgtcagttttcatagcatcataggtcactgtctgacttgtgccttcattctgagttagtgagctcttatactctttttttttttttttttttttgagatggagtctcactctgtctcccaggctggagtgcagtggcgtgccgtctctgcttactgcaagctccacctyccgggttcatgccattctcctgcctcagcctcccaagtagctgggactacaggcgcctgccaccatgcccggctaattttttgtatttttagtagagacggggtttcaccgtgttagccaggatggtctcgatctcctgacctcgtgatccacctgcctaggcctcccaaagtgctgggattacaggcgtgagccactgcgccgggcccgagctcttactcttatgccacatagtcccagcccttgaaatctgtctaatgagggaagcagtcttgggaagagctaatcccagtattgctcagtggcatatagaagctcatgatacatatgtgaagagaaactgtgcacctcaggagctggaaaaagctttgtaaattaggyagcccttgtgccaggtggtgaaagattgttgggagttaccaaggaaagaaggcagatgacagctggcataccagctctgtggcatccaagaacctggtatgtttggggacatgaggtgctttttttttttttttttctgagatggagtcttgctctgttgcccaggctagagtgcagtggcacgatctcggctcacttctgcctctgcctcctgggttcaagcaattctctgcctcagcctcccgagtagctaggactacaggcatgcgctaccacgcctagctaatttttgtatttgtagtagagacggtgtttcacaatcttggccaggctggtcttgaactcctgatctcgtgatccacctgcctcggcttcccaaagtgctgggattacaggcatgagccaccgcgcctggccataaggtgctttcttacagctggagcagaagttaactgaaggggagaggtagggacatagggagatcagtggggaaatgtaaggtggtaccaaattaaggagcatcttgttagctttctgaaaaacatgttcacatttacttgcttttatttcttttttctttgctcctggtatgtgttttgtaggactagtatttcttcaagtctmttctcattttctcttcagattatactgacctggccatgagcacggtgaagcagacccaagccattccatatactggtccctttaatttgctctgttaccagctgcagaaattgacaggtgtgtgtgtgtactgaaattcatttcattgttttctgtcttttagtaagataattttctatctagaaaagaatgttacttaattttgataattgtctcagaattgtgtaagttttataaatatgtgtgatcatgttattattgcctttatgtgaaattttagaatatacactcatattcttgcctgacggtcctgggaaaaaaataaaaacttaaaaaaaattaaaaaagaaaatatactcaaattttttttaattccataatacttatctttgacccaattaaaatttagtagtctttgttccttatgtttgaaatctattttccttgaccatacctaaaattttatctgtttcttttctttgatcagtgaaaataatttttctggttctattgataccagtctatacagcaggttttataagagttcatgaccactggccaaaggccagtgagaaaataaacctagtctgctttcattattagaccatttgagttcgagattttgtatattaacatcatgaggggccgtgactaaattaaaaggtgtagactttctgatagagcaagaatacttcatattacaaaatacattttccatcagtaacgctcttcatgactcatgaagtaccaccataaaataaaccagtagaaagaatcttttttttaaaccttggaaccttgcactaggataatctgtcataacatagaaggttaataaaatatgtctgaactgtccttgattaagaggatgctagaaagaccagaaaagtctcttcaacaatagaattccgctgtagaatgttgacgcttacgaagacagaaggtagatgaaactagctggcaacaattgacaaattttatgttatatgttaagatgctagtggaaggctaaatctcttgtatacaaaagatagatgtttgagcatcacttaagtttgccactgataaaatgtttgatgtccagggtaaatgctatctagttgaatgtttgcaatacatgttcagacctttccgttgctgtactttgctgtttaaaaattgactatacaaatgagttactaactttttaattgtgtagctgctttattttagctgtctctataaacaaacgaatggtctctggaagattatcagaaaagtatatacatcttatagttatgtctttctttcaggtgatgtggaagaattagaaattcaagaaaaacctgctctgaaagtgttcaaaaatattactgtaatacaagaaccaggcatggtggtattagaagtaagaaaagatcatttacctaaacaatgaggggaaaaaagttttaaaaagagttcatgaacaattgtagagaaaattagtttcttcccaattagaaaaagaatattgttggaaagtatatgtgtgtgtgtgtgtgtgtgtgtgtgtgtgtgtgtgtgtgtgtggttttaaggatcagcattaagtataattaagtagctgagcattttctatgtagtcacaaaaaaacctaataataaattaagggttcttatttagtatgtgtgataaatatagtcctttcctataagtcttacctgattttgtggtactccaggatgtctttagttatatcagaaggttttacaattcttaaggtaaaaatttaattctgttaaattaaaacaaacttaggtaccactcgttaaaagagcagaattttgaagattcaaataaacaacaataaagtgacccaaatctggaaaggatagaaattattaaattaagtgatatggttcctattagaattttaaactccaccttgtggagtttggaagacagataccaaaggaattrcatggttgattttgatagattggcacctattaagtttaaagaaggactttcaaagtgagtcctatcattgaatagtccagggaggtaccttgtctactgctatgccccaaggtagaattgtatataaattgccaaggtagatggtgaactatttcattcatacattctaattttttttttctttttttgagacagagtcttactctgtcacccaggctggagtgcagtggggtgatctcagctcactgcaacctccacctcctaggttcaaacgattcttctgcctcagcctcctgactagctgggactatacaggtgcatgccaccatgcccagctaatttttgtatttttagttagagatggggtttcaccacattggccaggatggtcttgaactcctgacctcaagtgatccacccgcctcgcatacattctatttttaaaacaaaaaagatttgtcagctttggtcccgatgcaattctgtgatttaagtctaaatttgattcataaggctaaaagcaactaaagaaagtgtcaggccaggcccagtggctcacagctgtaatcccagcactttgggaggccaaggcaggtgaatcacctgagatcaggagttcgagaccaccctagccaacatggtgaaaacccgtctctactaaaaatacaaaaattagccagacgtggtggcaggcacctaaaatcccaactacttggaaggctgaggcaggagaatcacttgcatctgggaaacagaggttgcagtgagccaggatcacgccactgcactccaacctgagtgacagagcgagacgctgtctcaaaagaaaaaaaagaaagaaagtgaaaaggagtagttatctataaacatgaagttacatagaacaatatataaaatgttaatatcagaaaaagggggaagttattggagacattaatttagctcattctaccaaatactattagaggctgtgtatgatggctcacacctgtaatcctagcaccttgggaggccaaggtgggcagatcacttgaacccaggagttcaagaccagcctgggtaatacagcaagaccctgcctctataattcattcattcattcattcattcatttatacttacatagtagataatatatttttgttcctagggtaaacatgtcagagattgtaccctaggaacaaaagccaggggatctgaggcttagtgtgagaagcaaaagtaaatatttaaaaatattaccctcttggccgggcgcggtggctcatgcctgtaatcccagcactttgggaggccgaggtgggcggatcacctgaggtcgggagttagagaccaggctgaccaacatggagaaaccctgtctctactaaaaatataaaattagccaggcgtggtggcacatacctgtaatcccagctacttgggaggctgaggcagcagaattacttgaacctgggaggcagaggttgcagtgagccaagatcacgccattgcactccagcctgggcaatgggagcaaaattccatctcaaaaaaaaaaaaaattaccctcttcgcattctgtctgtagtcatatactatactaaatataagcattaggaatttgagttcagtcccagcaccagtaattatcctgtgcaagttacttttaagtcagttttctcttttataaaatgaaattaatcgtgctgttatgaaaattaaatgataatgcctataaaacactgtgtcgaaaggaagtgctcagtaccatttacttttgtttacagaaaattagaggactatagtattattaatttcagtaaacaatgagtcagttaatttcattgaaaatgctagaagcagtagttccatatgtacagtccatggtttggtgggttgtagttgtagcctttgtggttggtcaccctaggtaggtcacttcctaattctgccttttgctttccagtggctggcaaacccttctaatgatatgtatgcagatacagtaacaactgtgatattggaagttcagtcaaatcccaaaataagaaaaggtaagagttcatttttatccttttttttttttttttttttttttttttggagacggatactagctctgtcatccaggctggagtgcagtggcacgatctcagctcactgcatcctccacttcccaggttcaagcaattctcctgcctcagcctcccaaggtgttgggattatagatgcctgccaccacacccagctaatttttgtatttttagtagaggtggggtttcactgtgttggtcaggctggtcttgaactcctgacctcgtgatccgcccgcctcagccttccaaagtgctgggattacaagtgtgagccactgcgcccagccactcatttttatcctttctttcatttttcttatgtttctgtgaactaaaaggcagtacatagactcctaacaaacttgatcatttctatgtaatctttaagatataaaatacacacagcaatgcatgttgttagtattttgcttatttttgtcctggctcttcactcatactgcaaaaacctggctgcaattaagactaagataaaatccttttagaaacagtcctcttaaaaataattgagtcaggccgggcgcacggatcacaaggtcaggagatcgagaccatcctggctaacacggtgaaacctcgtctctactaaaaatacaaaaaattagctgggcatggtggcgggcacctgtagtcccagctactcgggaggctgaggcaggagaatggcgtgaacmcaggaggcagagtttgcagtgagccgagatcacgccactgcactccagcctgggcgacagagcaagactccgtctcaaaaataaataaataaaaaataataaaaataattgagtcagaaatttcaaaatattgatgaattgagccagtagattaggaagatatgctactatcttcatgtttaataaaatttgttgaatagaattgaatctccctatgggacaatttgcaaccagagaaaacagtgaagatatttttgtgttacttctttgattctattttatacttaagtcagcataatatatgtcttttttttctttctttctttctttttttttttttttgagacaaagtcttgctttgttgcccaggctgctctcaaatgcctggggctcaaatgatcctctcacgtcagcctcctgagtggctgagactacaggcataagccactgtacccagctctttacatgttttgagctgtgagtctccggcatatggagtagtcctgtgtgctgtgctgggggaagtgaccatacgggaagtattctgggaagcctcagcctttacccttcacacaccattagatcctggactctcagagaatattattgttccttgaaaatatacagttagttagttctttgatttcatgagaaaaaagttgagcagactactttgtaattcatttcttatgctgcatctataatacaaacaaataaatacttagacaatctaaatctgttattcatttgagtcactggtaagcatttgaatttgctttcagtaattgtaaaaatgatcatttggacatcatttgataacttgttttagttgaattaactcatgggaaatggctcctcccatgtgcatgtaacacaggagacagctgtgcatatatataagccacaacgcatttatataagccacagaagaatgccgcaagattcttacatgatgctcagtgtcacagtcttaatcctggggtagaaacatattgacagaaaaaatgcaattgtcaattttctcttacagttgggcacggtggctcacacttgtaatcctagcactttgggagactgaggtgggtggatcccttaaggtcaggagtctgagaccagcctggccaacatggtgaaaccccatcttttctaaaaatgcaaaaaaaattagccaggggtgctggcaggtgcctgtaatcccagccagctattcaggaggctgaggggcgaaaattgcttgaaaccggggggcggaggttgcagtgaacagagatcacaccactgcatttcagcctgggtgacagagcaatactccatctcaaaaaaaaaaattgtttttgtcttacttatcttaggtggtaaaaataaaggtgtgcagggtgggaaggaggatcttttttttttttttttttttttttaaatttatctagagatggagtctctgctctgtcgcccaggctggagtacagtggcaccatctcggctcactgcaacctctgcctcccgggttcaagcgattctcctgcctcagcctcctgagtagctgggattagaggcgtgtgccaccatgcccggctaatttttgtatttttagtagggacggggtttctccatgttggtcgggctggtctcaaactcctgacctcgtgatccgcctgtgttgacctcccaaggtgctgggattacaggcttcagccaccgtgccgggcctaggaggatcttttaaaagatcatgagtaagtagtggtacagaagttaggaacggtgacgtggggaagagggttaggtgcggagagcagaatcacgcccagggctttgggccacgcagytttcagctgtaaggcccccatccttctaagagcacagctggccttcacttcctatcttagtctgttcagttcaaatcaaatgccaccagggttgctttctcttcactatatttctgatagcccttttataaaatgaagtcttttttgtaatatagtcaactaattagaaattgatatacttttctgaaaaatgaagtttctatgcaaaaatggcacttttttaggccggttaggatgttgtgtgactacaaggtctttggtgatgtttagtgtctgagctctgccagcctgttttccatgtggcagaggagggatcacagagatgttgtcaggatgtcatctgctgttctgatgagggctctgcctagcggtgatgctgaaaaacaagaggtgctgtggtatgacagataatctccacatagctcgtgtgtgttttatacgggaaggaatacatgacctgtcataggttggtttgcctttatcttgattatttctcttaatgctccggtccaaaatgaaatgtacctttactctgatctgcagtaattgaatttaaattaattatcactatattattagtaatccctcttatgctaataataaaaacattccttcctttggttagcctgtggccatttcagcagaggttcattgcagacaggttagaactgggctgtttccgtgtgttccgtgtatttagcatttgttcagctggctgggtgccttgtgtttcttagttcttccccattttgtagtttatggagaatgaggttttatattcctctgggatgatgaagtgtttgcatattttcattaacattcatttgacagatgtttactgagcacctgctccccagcaggcatgcctcaaagtgcttaggaaacatcagtgaacaaagcaaacagatctgccccctccaaggatctgacattctgscatgtcccagggcttcctgatagggtttggagttgggcagatcccatagggtcttgttggctattgtaaggacctcagactttcagtgtgagtaaaatgaggctatgctgcagagctttgagcggggctgagacaggatctgacggagtttttaaaggactgccgtggtgcttgctgaaagtactgttaggagggcaagcaagaaagcagaggctccagctgggagcttcttcagtcatccaggtggcagacagtggctcagattagggtggaagtcatggggatatcgcaaagtgctggattctggaggtgttctaataaagccagcagtatttcctgttggattagctgtaagtggtgacagaaagagaacagacaggatgaactttaagataatgatccagggtatgtatgtgataygtcagcatggacagttgtcactcgtggggctaagtgacaggttttaataagtagcacttgctcctttcaaaggtgacaagtattgcaagaactggtacatgtgacacttatgctgctcatgaggaagttgattctgtatatttattatttatcgaactgacttcttcctatccaaacttgggattttcacatttagagcagagtcagcgactgtggcccacaagccacacctagcccgcctgctttggtaagtatagtgttaccgaaacacagccgtgcrcactggttcatcatctctgatgcctctttcctgctacagcagcagaactgagtcattgcaacagcgaccctgtggtttacaaagcctagaatgccatctggccatttacagaaaaagttgccctcttctcaaggcacctctgtgaaacaatccgattcttccttgatggcatttttctcccttttcatttcttagcctcctgacacttcagtccagattctggaaacacaacttgtatttgtatctgtggtgtatgtgtgtgtgtgtgtgtgtgtgtctaaccaaccacaatttatgtgtccccattcttaaccaaaggggaaatcttatatattttcaaaatacattattttgtttttatattccataacattcttctattttacatggcacctgttttcagcatgtgtgtgtcctgttttgacacacagacctactaaggacaggtatacctgtctgattgtatagttctgtgtttaatatgatctcgtgtctgatgagtttgtctaaatattaatgcaggaatttgcaaatatatatatacatatatatacacacgtaaactttggaaagtttcttttgatagtttcatagcctagatatttattttgtaatatattttgtgagattgtttttacatgtcaattaagtgcttattttagtaattaatgaaactaatgattataattaaagtataaaattctgttatatagttttcttggctagcacctggttagttttttgtttttgtgtttttttaatatttttatttttattttactttattttattttttgagacagggtctcactgtgtcgcagacttgagtacagtggtgcaatctcagctcactgcagcctcgacctcctgggctcaagtggtcctcccacctcagcccccacaagtagctgggactatagacgcacatcaccacgcctggctaatttttctatttttatagagacagggtttcaccatgtggcctaggctagtctcaaatgcctgagctcaagagatctgcccaccttggcctcccagagtgctaggattccaggtgtgagccactgcacctgggcttactatttttttttaatggagatggggtcttgctatgttgccaaggctggtctccaactcctgggctcaagcagtcttcccttctcagcctcccaaagtgctgggattacaggcgagtagttagttgtatatacaattgaaattcacgaattaaaaagaattagatgaagtatggtttgaattctagaatagtttaggagaaatgacaagttgagtcttttccgtagagtagattgaaataggtatgtgggagtgcagaagtgagttaataaagctacacttacatgatacaatattttaaaaagtcatagtgttacatgagaaagtaattacttgggctgggaaattgaaagtgcattgaagaaatcataatttttgaagtctctttgaaatgacagagtcttagccaggcacggtagcacacacgtacaggcctagctacttgagaggctgagatgagaggatcacttgagcccaggagttcaaggttacagtgagctatgattgcaccaccgcactccagcctgggcaacagagcgagacattgtttctaagggaaaaaaagaagaaagaaattacagtcttatattatattttcctgtttataggtgaggccataagattatttctggtattttcccccatatcatacacacacacacacacacacacacgcgcgcgtttatatataaaaaatatataaaagaggaaattggttatgtatatttattatttatcaaactgacttcttcccatccaaacttgagattttcacatttgggccagcccagctttcaactcttaaggccccccatccttctaagagctcagctggccttcacttcctatcttagtctgttcaatcccaatcaaatgccaccaaggttgccttctcttcattatattctgatagcccttttgtaaagtgaagtctgttatgaacatgaaatgaaatgatgacaatatccatatatatggggtgtgtgtgtgtgtgttgtctgaaggattttaaaattctgcactactctttgtaacagcattattgatacataattcacataccatacaattcatccatataaagtgtagaattcaatgattttttagcatattcagagttgtacaaccatcaccacaatcaactttaaaacatttacatcacaccaggccagacatggtggctcacacctgtaatcccagcactttgggaggcacaggggagcagattgcttgaacccaggagtttgagaccaacttgggcaacatgctaaaaccctgtctctacacgcacacacacacgcgctcacacacacacgcgcacacacgcacgcacacacacacgtgcgcgcacgcacgcgcacacacgcacacaaagacgcacacacacgtgcgcacacagacgcaygcacacgcacactgacgcacgcrcacasacgcacgcacacacgcgcgcgcgcgcacacacacacgcacacacccacgcactcgcacacacrcgcacgcgcacacacgcacacgcgcacacacgcgcacacacacaaaattagctgggcatggtgatgcatgcatgtagtcccagctacctgggaggctgaggtgagaggatcaccagagcacagaggtgaaggctacagtgagccgtgatcataccactacagtccatcctgggcaacagtgcaagaccctgtctctaaataaataaataaataaawgcacacctccgaaaaggaaccccatatcccttacgtatgatgccccaatctctatattctcaccaactcaaagcaaccactaatctacttcctgcctccctggatttgcctgttctcagcgtttcagataaatggaatcatacaatatatagcctttgatgactggtttccttcactatgctgtgttcaagtttcatccgtgttgtcacataaattggtacttccttcctttttatggccaaataatttcccattgtatggacacaacacattttgtttatccattcatctgttaatggatacttcggttgtttctattttatgggttttatgaatagtgctaccgtggagatttggatgtaagtttttctgcagacatatgttttcatttctcttggatctgtacctaggagtagaattactaggtcaaatgctcactgtttaactttctgaggaagtgccagactgtgagctctgcactcttttgctactgttgatgcactgagttgttgaatgaggggtcagagcatgcctgaaactccagattaaggggggcccattttcccaagctgtcagatttgttttggaaggaaagctgagtaatttaatgggcaagtcattttaaatattaatttttattaaaataattatatctaatagaaagctaaatttatatcacattttagataaaagacttcacagatctttgagcttgaatatgtccctagaattcctggagttaattgcccgtggtcataaatgtaaagtttaagaaatgtgggaaataaaactaaaaataatattaagtgtcattttgtggttctttaataagaacatgaaatattggagaaagggtgaaaagatgtaatagaaaattttttttaaatacacataaaaagaacatgaaattaaatgatgaaaatatccatttcctttagcaggcaaataatacaaatccctgcttgtcactttaaggattccatagttattcmctttaacttatcagtaaccagattctgattattgatttggaaattattctgaataggaatttagaaactgaactctctgtcgcttttttttttcccaggtgcagtacagaaggtttctaaaaaattagaaatgcacgtttacagcaagaggttggagatcatgctccagtaagtttttcacccattatttctcaacaagacagtgacagcggccggaaggagccctggattcggctctgactccttcaaggactggggcgtggctctggccaggccactgccatgctcggaggcctgcttctctgttaggaaagagaggggctggaaccgttccctgccagctctgcactcacctgtgacctgctaggtcagccgtttgtgtttcatttaatacagtgcttcaggatgctggcacagggctggcacagttagcaagcgttaaaacattctcatcaaggacaagttcaaaaatcttagctgaatgttactgtatcttcaagaattattttatatatttacttgttaaatgtgaattctttgtaaaatggtgttcttctagactcttcttagtctgtaagcgatgaattaactttaaactaagtatttctttttattttattttattttatttctatttttgggagatagagtcttgctccattgcccagactggaatacagtggcatgatcttggctcattgcagccttgactcccaggctcgagcaatccgcctcagcctcccaagtagctgggatcacaggctcgcaacaccatgcccagctaattttatttttctggagagacagggacttcctatgttgcccaggctggtctcaaattcctgggctcaagggatcctcctgccttggcttcccaaaatgctggaattacagatgtgagcccttgccccatgaaacggtttaacaaagtaaggtggcctgctagtttagaaggcttttatgctaacatttctgttccttcctttctttccccaaaattctacactgacctttttttttttttttttttttttttgagacggagtctcactctgtcgcccaggctggagtgcagtggcacaatctcagctcactgcaacctccacctctcgggttcaagcgattctcctgcctcaacctcccgagcaagtgggactataggcgcatgcccaccacacccagctaatttttgtatttttagtagggacagggtttcaccatattggccaggctggtcacgaactcctgacctcatgagccacctgccttggtctcccaaagtgctgggattagaggtgtgaacccccgtgcccggcccactaaagcagcagtttagtggctttaaaaaaaaatgatagactttaaatgatgactttgtttatagaagttgtcatacatcttcaaaacagtattctctgtgttgtcattttgattttaaagagcattcctcatacaaaaccagccaacagtgcaggcacagtgattaccatggccgttgaaaaggccagagattttactggttcccacccctggagcctctggttctcttaactcattttgcagagggctcaagtctgccagcgttgaagtctgagtatcttaatcatttttagatccttcacccctttggcagtcaggtaaggctgtggggcgggggcaggggacacacatatatgcagttttacctttgatttcaaggaggttagacaaccccctccccacaggctatcctgggacccccggttaaacagccctattgtagaaggtgggtgttgctgaccagggacttgactacaatagttctgttggcggccctgttccctggggctctacaagaatagaaaacccgtgtggccctggactggccccgctctcccacgtgctgcagtcggggtgcagaatggaagttcacattgctgtggctggtcctcaggagccgtggggagggcagtctgcgggaggctgcggcccttccactggactttcactctggccttcttccctgtcctcctgacaccactcctcccgcctcccctccctctccctcacctcccacaaacacaccagaactattcaactctgaggaacaggagtatgagacagcttccattcggccaggaatgggaggttcccatgtccttaaacttcaaagccaatcgtacccttaaaaatgcagctatttccccagttgtttaaacacttaggattagataggagtagatgtattggtttcttcagagaagccaacagtggatcacatgaaaatggaaccttttttcctatccttttgaatacatttctgtgtttaaaatrtaatttttttggctgggtgtggtgacccacacctgtaatcccagcactttgggaagccaaggcaggtggatcacttgaggttaggggttcgagaccagcctggccaacatggcaaaaccccatccaaaatacccctactaaaaatacaaaaatgagccaggtgtggtggtgggtgcttgtaatcccaactactcaggaggctgagggaggagaattgcttaaaccaggaggcagaggttgcagtgggccgagatcgggacactgcactccagcctgggcaacaagcaagactccgtctcaaaataaataaataaaataaaatataatcttttcctttgtgctagggtcccacctaagtttattcacacatatgatgagcagtaactgcctgaagatgcaaggagttgattcccactccccacttcccccgcttaatacagtgttgtcagtgcttaactgtcctaggctgaccatggtccatgggttgtttagagtcactgcctgcctttcttacctgcattcagcctgctggtggactgctgtttcctaacacctctgtaccaatggggacgatgttgaaattaaccatcaaaactgtttctctcgatgacagaggcaatgtcttagtgccttctttatccccagctactagcacagaaggaatctgccacacagaagatgctcaataaataccaagtttaattaaagtaggagtgcacagctagtgggcttgggagccatttaaacctagatacctggatttgaatgccggctcagctgtttactagctgtgaggctttaagcaaatcacttaacttctgtgtcttgttttcttcacatgtaaaaggggatccttactaaaattataggttaagataatgtatataaaccacctagcatgatgcctgctgaatagatcattcttgaataaagctgtgtattttccctgttttataaacttaataagctgtatcaaggcaaataagaagcttgtctcaaaagtaaatacaggctgggcatggtgactcctgcctgtaatcccaacactttgggaggccaaggcaggtggatcacttgaggctaggagttcaagaccagcytggccaacatggtgaaaccctgactctactaaaaatacaaaaattagctggctgtggtggtgcacacytgtaatcccagctactagggaggctgaggcaggagaatcacttgaatccgggaggcggaggttgtagtgagccaagattgtgccactgcrctccagcctgggcmacagagcaagactccatctcaaaaaaaaaaagaaaaaaagtaaatmcagtattctgctttagaactaggacctatcttcagttttattttttcctcaaatatataaagccgggcattttcactaatcctgcatttctgcttattttcagggacatatttggagaagactgtgtaagtgtaaaggatgactctattcttagcgtcacagtggacgggaaaactgccaaccttaacttggagacacgggtatgtagctgctctttcctacgtttcaagacatttgggaaataaagtgaaggcataaataatctgtgctctcacactcaacagtctactgttgcatattggcatttgcttccagtgtttccaacatttttttcacattgttctttttatattattatggttgaagttttcygtgtttttccgggttactgcatagtacaaggttcgcgtgtatgccactccattgctgtcctcttccataatacagcttagttcacctcatcccttctctagtttggcatctagttgactctccattttttaaagaagccgctcttctgtttgcaccagcaagatccaagtggattttccaaacagttcaaaaccagcccgggcaacacagttaaaccccatctctactaaaaaatacaaaaaaaattagccgggaatggcggcagctgcctgtagtcccagctactcaggaggctgaggcaggagaattgcttgaaacagggaggcagaggttgcagtgagccaagatcacattactgcactccagcctggatgatagagcgagactctgtctccaaaaaaaaaaaaaaaaagaactagaggccaggcgtggtggttcacgcctgtaatcccaacactttgggaggtcaaggtgggtggatcatctgaggtcaagagtttgagaccagcctggccaacatgatgaaaccccatctctactaaaaatacaaaaattacccaggcgtggtggtgtgcctgtaatcccagctacttgggaggctaaggcaggagaacccaggaatcaccttaacccaagagacagaggttgcagtgagctgagatcacatcactgcactccagcctgggcgacagagcgagattctgtctcaaaaaaaaaaaaaaaaagaagcaactagaagattattagtgagtttcagtcaaattcagtaccaaatgttgagtagatagccacatccattccttgccaagtaatttgtgtggcatagatgaacttccctggagtatcatttactagatcaaactgtgggctttgatgtaaatgtagtttactagactttccccagtctttcaccccagcctcaagtcatcactaattaggaccgtgctgctgtcagraagcactgcacgcccacaagtgtgtagggcggccgttctgtttcatggtaatcagtcccaccatgacctctgcacacacagatgattgttcttttttttagtttgagacccggtctcgcagtgccgcccaggctggagtgcagtggtgcagtcacagctcactgcagcctcaaccttcccggctcagtgatcctcccacctcagmctcttatctgggaccacaggcacacgccaccacagctggctaattttttatgagatgatggtttttttaaagagtattcatttatcttctatataatcattatagacttaattctaacagtcttgtttgtgcctcactttcagactgtagaatgtgaagagggaagtgaagacgatgaatccctccgagaaatggtggagctggctgcacagagactgtacgaggccctgacgccagttcactgagactgtgcctgtatatgaactttgaaaaaatacttgactctacttttgttacctaaaataaaatgcattcgtttctctgggggagcctgtttacttttaatgtcaaatggcctttatttcaacagcctgaatactgctaaattgctaattaatttgtccattattctagaactaactactagatcaactgcccattattttagaattttggattcttcttccaggcatgtatgtgcagctcccattgaaaccatcaagatctgccgatagcaaccgctgctggttaccctctcctctggggtaaccaatttgagttaataataaggattctaagttgcacttgaatcttttctgtcttcatctccactgctgctgttcgagtccaagtctactctcccctctgaattcctgcaaccacctccatctcctcccctatagctgattcctggaacagacctggcctcaagcctctgctgcttgaaggccttaatgaagtccttgtgataaagatgaagtccaggcacctttgcttgctctagcaggggctctcaatctgggctacccgtgggaatcacgtggggtgcatcacaagtgcacctgtgcccaagtcctgccaccaggaggtgagttagtccggctggaatgagggccctaggttggatcttagttgtaaagctcccccaggtgatccaagcgagcttgggacgagcaacctaaagaaagtcatgctctacgcccatcgccccgccccagggagcggggtcggcctctgcgccggcgcccctggcccttctgttactcatctacagctccgtgatttcaaggcatccttcccacccgttcgtttttagctcggctgccgaacttcattgcacagttgaggtaagaacgttgcattacaaccacgttttaacaggtgaatcccttggaagttagtcagtgctccgtgtccgcggggttctgcatctgcgcatccaccccacggcgggaaaaagaaaagcggccggctgcgcgcgcactgaaggtgcagctgctttcccttgtcattcgcagaaccacgaggtactgccagggtttccgcagtgcctgcgtcctcgtgggtgttacaggccctccagagtgacgctgggcgcaggaggccgcgcgcgcatcccacgacctcttccaggggggcctggagcagccctccgccccaccgagagccagctgtgcttcccgccgcgcgtcctgaggtcacactcctgccctttgccgaacgcacctgcgcccgcggagcgcggggtgggcttagaagggcccccaaccgcttttcttccgggaaccacgcagcgggacgcgggctccggactccctgggggcagccttgctgtgggtgagcaagcgcggaggccgagcttcttgcaaacggactccaaggggcaacgaccttcgcgcgtcaccaaagtgactgcgtgggtgcccacgagcccggctcccgcaacccacgggcggccactgcgcaggcgcctctcgtggctggcggccccgccccgccccgcccggctgctccatggcgctgtgcgaggccgcgggctgcgggagtgccctgctctggcctcgcttgttgctcttcggggactccatcacccaggtacggccgccccgacgctcggcctcccgccccggcctccctgcggggtcgctgccgagcaggccgaggctcctcgccgtcctcttcggcgcccgagacggctgggccggaggcctggccacgcccgtggagacaccggaggagtggcgggtcccccagtggctgcgccttccgggcccgcggcgtcccggaggtcacgacggcgtccgcgagagcccgggctccaggcacagacgcgaggggacccggccgcgctgcccgccccgcgccgcctcccacccgggtcgagatgcgcggtcttcccctcagcgccctcctgggcagcggcctttcccctccgggtccgggttagcggccgcgggcgaccgcgcgctgtgtcccaggaggccccgcggccagctccgggcagaggcgccaggagctctctcgccccattccctgcgggcacaggtggggccgttaggggttgaccttggaagtaaaacgccttcaggaattaggtagaaaaggaccatccgttcatccaagatcatctcacctcccatgaagggaacggtcttctaaatgcaggttcttacttcggggagggagtagaaattccattcctgtgtgtgtcctcttctcagacaggacttgcttcaccaggcttttgtgtatacgccagtaactggtaacattatgtttaggcatatggggcagtcagagctgccgaattccatgggaatgtgtatgaaaaagtgttcaccctcagctcggtaaccagcaaagcagtgaggcggtgtggccttcatttcctcactgacctttgactttatttcctgaacttagatttctgtttagcttttttttttttttctttttttctttttttgagacggagtctcgctctgtcgcccagactggagtgcagtagcgcgatctcggctcactgcaagctccgcctcccggattcaagcgtttctcctgcctcagcctcccgagtagctgggattatagacgtgcgccaccacaccgggctaatttttgtaattttagtagagacggggtttcgccatgttgaccaggctggtctcgaactcgagacctcatgtgatccgcccgccttggcctcccaaagtgctgggaatacaggctgtttagcttttgatagagaaaaatccccctctgctaaagtgctgccaggtgtacttacctgtaatccccaaaatgacctcctggagtgaagcaatcaaagccaagaagggagcgccgagaaaacagaagttgccaatcagaactgccctcgctgagatgcccggttacagtcattagtagtaataatgggcttttcttcctccagttttccttccagcagggtggatggggagcatcgctggcygacaggstggtcaggtgagaatggtttccgatacttgagttcttatggatggaaaatgtcttagggatccgtcttatggatgaaggatagttctgaacagaacattcctcctttattaattttgcttgcctcccctaatcagtatataggagaaggaacagaaaacatttactcttcactcagtctgaccaattagatattttagggttgagcactgatggctgggtagactcagacaaatcaaggaaatggccaaggcctcttccctagtcaggggcagacagatccaagtccagctgctatgactgcagaacttgcagtttcactgctacaccacactggtaggaagctactttgcctttttttgaagtgctgccatgacttaagactcaccttgtcacaattctaccgcactttgttttggtttttggtggtttttgttttgcgacagggtctcttgttaggcgcgtccacgtgaagagaccaccaaacaggctttgtgtgagcaacaaggctgtttattcacttgggtgcaagtgggctgagtctgaaaagagcaaagggagatgggtagggcagtactataggatttgggtaggtagtggaaaattacagttaaaggtggttatctattgttagcaggggaagggggtcacaaggtgctctgtggggagctcctgagactcattgtccaggggaggaatgccacaaggtcgattgattagttagggtggggcaggaacaaatcacaatggtggaatgtcatcagttaaggcaggaactggctgtttcactccttttgtggttcttcagttgctccaggccacctggatgtatacgtgcaggtaacaggttatgacggcttagcttgggctcagaggcctgacaactctgtcacacaggcttgagtgcagcagtgtgatcagggctcactgcagcctccacctctggggctgaaggcatcatcacctcagcctcctgagtagctgggaccaacaggcactcgctaccacacccagcccagcacttcattaaagtattgtgatttcactctgtaaaatggctagtcgcattttataatcattacacacacaaacaatctcttagaaataaggctgagtttcggtggtggttctgcagtttataaatgccacctgagaactttgagcagtgtcagaaagtgtccccttgtgctgctttggagccgctgcctgacgctgtggcctgcagttctccgcgggtgccccagcttctctgcttggttatgcatgtatgggaatgtgaatacagcaaaatgaaccatattgatttactaatcataagttgaaccccaggcgtcattttaagaaaactttatggacaactttaaatatctacagaagcaaagagtgaaatgagcccatccatccctcctatggattattctgaagcaaatcccaaatcatatcattttaccaagactaagaaaaaaagagtccctcttatgtgactggtattctctgaggggtttcaaacctactgcctgatgcgaatccttaactgggattctcctcactttacatgtgaggaaggagcacagcgtgcccagggtcacgcctagtcacacagggagccgagaaacaaatccaggcaacccggcttttttttttttttcccccattacacctacagtactgtgaatccaactgtttttaagaaggaaacaaaaagtattaaccggtttaagttgaaacacaacgaatgtatttactaaaactatttaatcaaaaccagaaatctcaaatattctatagactrtttaaatataaaccaaactaaactatttaagttccaggatattagtgactttttacctgagatacttgctcagattatctatctgttgtgaactccattttaaaagcacctcactataccatgcttgaagtcaggtagtctgtagacttcatcacagcccctttatatataattacttctctcacggaggagtatggtgtatttacctgtatctttgaatggcttaagattagcatgcttcagctatgttcttgctcctatcaaagtgaaacctgggggtggctcagagacacgtgacgggtttagaatcccagagagcacaccctcactaaaggccggttactgcgaccataaacacttcttgcccacaattcatctttttaaaatttttcgtttcagaaaatgtgatgttctgaatcgtggattttcaggttacaataccaggtgggccaaaattatccttccaagattaatcaggaaaggaaacagtttggacatcccagtagcagttacaattttctttggggccaatgacagtgcactaaaaggtaaaagcatttttgatgttcttctagctcacttttaatcatttttatgttacagcaaacttgcatttaatatacttttttcaactgtttactttctcccaatagatacagttttgccaaacttatgttgtttatatgtattcctggctttaacactggtggattttattcttgactcagtttctacataccttggttgctggcagtcctaatcttgcaaacagttaaatattttctagagtctgttagtgctatgctaagtttgtaatgtgttctctttagttgatgcatttggcagcagaaagcttaaggataccttgtggcttgcatcacactgatggcagctggtggcgtgtcttagggagggatatgtcagggcagcagccaccctgacctcagttaggcttgaatcctgggcaatggtgaacgtgggtttggaaaaggagatggtctctccttgactgctgaagaattgctgctgtgactagaggaaagctagccatgtaagaggcctttcttccccttctactcttgaaaaaagccttctgcgtgctatcgacgagaaaaatcagcctttgttttgggaagttaggtagtcaccttccagagatttcttttgttaccctacttgtgtcacagaagtgctgtggtctgctattcacgggcacaccgtaggagacctctgagttgaggctggacatgaaggaacaccaactgcagtaagaggaattc

SEQ ID NO: 93929 - DNA, 13045 bp, Homo sapiens
tgaagaaaactggtaaaattcaagtaaggtctatagtctcattcattgtattatgccagttgttttcctgatcctaataaagcataattatgaaagatgtcaccrtagggggaagctgggtgatgagtacaaagatcttctttgtattacatttgcagcttattgtgagcatataattagttttattaaaaagtttaaggctgggcgcggtggctcatacctgtaatcccagcactttgggaggccgaggtcggcgtatcacctgaggtcgggagttcaagactagcctgagcaacatagagaaccgctgtctctactaaaaatacgaaattagccgggtgtggtggcgcatgcctgtaatcccagctacttgggaggctgaggcaggagaatcacttgaacctgggaggcagccgagatcgtgccattgcactccagcctgggcaataagagtgaaactctgtctcaaaaaaaaaaaaaaaaaaaaagtttaaaacattatttgacgaatataggttttgtattgatgagatgaaaggaatgctaatgagtaaaatatgatagtctttcttcttaggtatgggagaaggtgaagggattgtgcctttagaatccaaagagtagccataaaatataagtagtctttttggcttgagaaccattgatactattctcacttataaatgggagctaaataatgtgtacacatggacatcaagtgtggaataataagacgctggtgactcagaaggctgggagggtgggaagggagtgagggatgagaaattacttaatggctacaatatacatcattttggttgatggatacactaaaagcccagacttcaccactatgcagtatgtccatgtgacaaggctgcacttgtaccccttaaatttatgcaaaaaaaaactattgatactacctcatttaaacaaatggcatagtatagttctttgtgaaagtataaattttatataaatactactttcatttatatccttctaatattattttaataagttaaatttatttaggtaactagcttagtagcctaggtaatacactagaattttctaaccctatggtaaaaggtgaaaggtgctaggtttgcatgactaaaaagtgactttcctaagccagtgtaacagttcattgatcatgatcgtttctctttgtttgcactactttctttcaagtcccctctactcaaatgtgtaatatctaatattttgtggaatgtagtttttctttggtaatatcttagaaatattaacaatattactagttgtaaacaaagtttaaaatagatgtttgcctttgtttaatataattttactttgcaatgtgaattagtttgcataaaagttaagtgtctcattagaatctaccctgtgaaattattaatcagctagcctgatacttcaacactggaacatgtaatcaaaataatgatatggaatactttcaatgctctgtaataagggaaaaaataaggtgtaggtcatatcaacagtttttgtttgttttctaataagagatgtggtctcactctgtcacccagctgcagttcagtagtgctgtcctagctcaccgcagacttggactcctgggctcaagtgatcctccgacctcagcctcccgagtcactgggattacagtgcaagacaccatgcccggctaatttttgtattttttgtagacaagggtcttgctatgttgcccaggcttgtctcaaacctctgggctcaagggatcatcccacctcagcctcccaaattgctgggattacgggtgtgagcctccacgcccaacctacagtcttaaagtagtagtctctttgcttttgtaattaccaaagaagtttaatttatttgtgctttctttatattcttttactagtttcgataatggacaaggtgacgacagttttcaacagtgcacaaagactagaagttgtcagaaactgtatctcattcatatttgaaaataaaattttggaaactgaaaaggtaataaaatgtgatctttcccaagtaagcatttatcatttccctttcagatttacgtgctgaggttaccagcttctctcttctttaattctatcccttttcctaataaagtatcctctcattgtttggatcattttaaatgaatagtgtctaagatttaaagctgttgggccaagcttaattatatgaccaccagaaatatattcatagtaattttttctgtcaaacttttaaacattgttcacaaaacactattttgggatattacttagaaacttaaaatttttttcattttatttttatttttggagccagagtcttgctctgtcacccaggctggagtacagtgacatgatcttggctcactgcagcctctacgtcccaagttcaagcgattctcctgcctcagcctcccaagtagctgggactacaggcacgcaccactgcgcccgcctcatttttgtatttttagtaragatggggtttcaccatgttggccagactggtcttgaactcctgccctcaagtgatccagccgcctcagcctcccaaagtgctgggattacatgtatgagccaacatgcttggccaaaacttaacattttaatataattttatgtattgcaaagaatctagttagaatatgtaatgaattataggaactgtagtattgaacttaaatgtgcctccttagagcatgttttcttgccttcttcaatgaaacatgctgaacataatgtaaccctttcttactgactcattgtcatagttctgaatatctattttcaggggttggttaaagcatgtagaaatgtttacctttacactgactgacccagtgctctttacattttgtgctttttggtttctatgttttcttagagttgaagtctttcacttcttttgctttcaactttcacatcctatttcttatacccacctttagtgatatcatgccctcctacttcttgttttctcctttgttctgattttttagctaaataagcttattattattatatgtgaagtaaattaactaagtcctacatggtgaactgaaggaggcatctttatggatgtgcctgttgtaaagcgaaaagagttttaatgcatacacctagagatatctgtttttgcaactccgagtcctttttctttccttttttatgatatttaaatgagaagagattgtagaacttttcagtcataatttaaagctgaatagtgattaagcagccaaccagtttaaaagtatgaaatcacttgtatttcttattgttttaatttttctttctgttcttgccatggaaaatttactagttatagaaaggtgtcttacgtatctatggctttgactcatgatctgaagcaacagtcaatttggtaaccaaagttttgttaacttgaagaaaaatagtgaaattaaatgtttttcaatttatcacataattatcttatatttcttgctggtttacatataaaaataaccacaaatctattttataattgtcttaataataaatcacctattccctaggagtttaattttactaataactatgttaaataaattataggatgcrtttgaattttcaggatgattgtttgaaagttgttgtttcccccagtggtaccatttggtcatttgtacctctcttgtcctcagacccttcctgctgcactcagagcccttaaaggaaaggcagcaagacagtgtctcactgatgaattgggtttgcatgtccagcaaaaccgggcaatattagaccatcaacagtttgactacataataaggatgatgaattgtactctacaggtaatttgtagttctttcagattattcctcttatttgagaatacttttcatttttccagaatattttgtaattaccaatatatcagttcttgagcctaccacagctaataggatgaagcgtcagtatctctatcatttctgtcaaatacttttttattacttggcataaatattaagagtttttgttctttctttgttttctctttgaaaatgctagattattttactagttctgtaatataagcaagttctttgaaaatgaaaagtcatctttaaagcattcagttatatattacttaatgtctatagtcacatcagcccttttcagtcagttttcagttgtccaagcagaggacaatgaatggtggataatccaaatgataaatgaattacttaattaagtatttaagtactttgtgtttgtaaagcacaacaacaaaatttccacttggcttcaaaatgtgtgtatgatctttcagaaacaaacttcccacaaaacagtgaggacaatttaggagaagctaataatcttgtttcctcatcctgcctcccttgttagagagtctatgacattggcattctgttgagaggtaatgtaaagttcctttctcaaacattttgcacaaggtggaaatgtaattaaatattaagacttcaaagatcatccgtgggactccagacaaagtaaataaatgcatgttaaatattggtacattggaaagcaagaattataggatataattaatcaaatttatgaaagaaacaaggcctaaataaatgagaaaatgtatcatttgtatggaatggaagactcaatatgttaaagatatcaattctccccaaaacaatctacagagacaatgcaattcctatcagaaccttaaacagaagaataaaagccttaaaattaccaatatactcctaaagaaaaacaacaaagcacagcaatttaccttgtcaggtatcaaaaatttagtttaagattatattatttggccaggcacagtggctcatgcctgtaatcccagcactttgggaggccgaggtgggcagactacaaggtcaggagtccaaaaccagcctggccagcatggtgaaaccccatctctactaaaaatacaaaaattagccaggcttgatggcaggcgcctgtaatcccagctacgcaggaggctgaggcaggagaatcacttgaaaccagaaggcggaggttgcagtgagctgagatcgtgccactgcactccagcctgggtgaaagagcgaaactccgtctcaaaaaataataataattattattatttaagacagtgtagaattggcacacttataaacaaattgaccaacagaataaaatagaaagcccagaaacaaatgcacacatatatggaaacacgatttatggcaaaattggcaccagcagtgaaaagatgagcagttcaattaatagtgctgggacatgtacacataacataccattgatacaaaaaatgcatagatacctcccaccacacacaagaatcatttccacatgtattaaagacttaaatatgaagagccaaaaaaagctaatctataaagcttaaaagttttcaaacataatacaggaaatatccatatgaatttggggtagggaaagatttgttaaactagtcacaactagtgccaatgttaaaagaaaagattgataaatttgactacattaaaattaagaacttctgttcattaaaagataccatagagagagggaaaacataaacctcagagagagaggttaatgctccgattacaagaactataagccaggcatggtggtgtgcatctatagtcccagctactcaggtagctgagataggagaatcacatgagcccaggagttaggctgcagtacactataattgcgcctatcaatagccactgaactccagcctagacaacttatcaagaccccatctctttaaaaaagaaaaaaccctacaaatcagtattttttcaaaaagacaacctaacttgaaaatgagcaaaagatttaagtatcttaaaaggcagagccgagaatgggagaagagcagagtttctgagcgcacagtggcctcccctcctctctcctctcctcactctcgcagcctacctttacctacccgcctgctcagtgcccagaacaccttccaccatgaccatctcagcaagctcccacttaaacagaggcgtcaagcaggtgtacatgtccctacctcagggtgagaaagtccaggccatgtatatctgaatcgatggtactcaagcaagactgcgctgcaagtgaacccaagcgtgtggaagagttacctgagtagaatttyggtggctctagtactttgaaggttccaacagtgacatgtatctcatgcctgctgccatgttttgggaccccttccacaaggacctccacaagctggtgttctgtgaagttttcaagtgcaatcgaaagcctgcagagaccaatttgaggcacacctgtaaacggataagggacatggtgagcaaccagcacccctggtttggcatggagcaggaatatataatctcatggggacagacgggcacccctttggttggccttccagtggattccctgagccccagggtccatcttaactgtagtatgtgagcagacaaaacctatggcagggacattgtggaggctcattaccgggcctgcttgtattctggagtcaagattgcagggactaatgctgaggtcatgcctgcccagtggaaattccaaatcggaccctgtgaaggaatcagcatggaagatcatctctgggtgacctgtttcatcttacatcgtgtatgtgaagacttcggagtgatagcaacctttgatcctaagcccattcctgggaactggaatggtgcaggctgccataccaacattagcaccaaggccatgcgggagaatggtctgaaatacattgaggaggccatcaagaaactaagcaagcaacagcagtaccacatccrcattcccatgaaacttctaacatcaacgacttttctgctcttatagcccatcatagtgccagcatacacattccccagactgttggccaggagaagaagggttactttgaagatcattgcctctctgccgactgtgacccattttcggtgacagaagccctcatctgcccgtgtcttctcaaaccggagttgagcccttccagtacaaaaactaagtgaactagacctccagctgtcaagcccctcctagtacttcatccaactccaactcttcccctctcccagttgtcctaattgtaactgaaaggatgctcacgcctgtaatcccagcactttgggaggccgaggcgggcggatcaggaggtcaggagatcgagaccatcctggctaacacggtgaaaccccgtctctactaaaaatacaaaaaattagccgggcgaggtggcgggcgcctgtagtcccagctactcgggaggctgaggcaggagaatggcgtgaaccccagggggcggagcctgcagtgagccgagattgcgccactgcactccagcctgggcgacagcgagactccgtctcaaaaaaaaaaaaaaaaaaaagaaaggatggaatatgagggtctttttaaattccttgtgcccagttaatcttgctttctttctttggctgggataaggggtcaaattattaatttcttcacatctttaccctccttttctttccctatcactgaagctttttagtacattagtggggagctgggtggtgaaacataaccactgcttccatttaacggggtgtgcctgttcaataagcgtagctatcggaacagactgcatgtttgaaggagggggattttttctttgagggacctgagaggggaagacctgacttattctggttaggttaggatttccctttgtggtggaaatgtttcttaaaagattataaccaactttctacaaaagtagggattaggagagaaggtaggggttggggatcagggaggagaatgcccttggtctcctgcttgtgtgggactagcctagcttggggtgaaatgctctcctctgaacacaaagcttagtataaactgatggatatccctaccttaaaagaagaagaggttctttttgcttggtcctctatttatcacacaaaacagagtagtgtttttatatttaaatgtaaaaacaagggtcgggtgcagtggctcatgcctgtaattccagcactttgggaggccaaggcaggtggatcacgaggtctggagattgggaccatcctggccaacatggcgaaaccctgactctactaaaaatacaaaaaattagccgggcatggtggcaggcgtctgtagtcccagctattcaggaggctgaggcaggagaatcgcttgaacccaggagttggaggttgcaatgagccgagatcatgccactgcactccagcctgggcgacagagcaagaatctgtctcaaaaaaaaaaataaaaacaagaagattatatatatagttttgtggcttatgtgtgttttgctaagggagaaacaacatacaggtcacgggataccaaattcaaagcaaataatctagacagaaattaagtagccccttttgagtaaggagtgagggaagtggtgcttgaaagttgttgatttgcggttagtccttcatgaccactctagggtttctgtgccctgcccaccctctggagaagacgaatactggtcagttaacagacgacatgttactagcagtcacttgatccccatggctttggtttaaaagacatatacttgtccacatgggtttagaggtaagagttagctggtcaacttgagcatgttactgacagagggaatattggggttattttctggtgggaataacatgtcactaaagcaggacttttgatatattaaatttttaaaaaacaaaatagaagtttagattttaatcaaatctgtagagtttctaagtaatttttgcagaattgcctgtttgctttaactgtctccttctgcctctgctcttgaaggatatggggacagggctagagtcaaaacacttgaaattttgtatcccaatgtcttttctcccagtgtgaaatattccattcttttgttaagactactgagcagttatttttttcttttgtaataagaaacaaaccccacctttatctctacatttccgctaccattctctggtttttgtgtttgcttcagggggccagctgtggttttctcttgccatgatgacttctaatcgccaagtacagtatgctcaaagtcagacaactccttactataaacaaattgtgtaactgcccagagcagcacttataaatcagcctaacataagatctccaaaaaaaaaaaaaaaaagagttaaggaaacccacttggatgataagtgtataacaagatgatctgtgtcaataattgaagaaatgcaaattaaaactataagcagagccttttacactcactggcaagaattaaaaagtctgataatatcaaacaaatgtatggaacaaatagagtatataaactctgctagtgaacgtgtaagttggtatagctactttagaaattttaataagatatgagaaataagattattggtcattatcttataaagctgcatatgaagcgtactctatcacctagtgatttccttcctagaggagctcttgcccacatacatcaagagacatgtacaaaaatgttaatggcaagattgttcaaaatagcagaaaacttgaaatgactcatatgccaaccaacactagaatggataacttatatcttcttacactagaatattatatatcagagaaaataaatgaactgcagttacaaaggatgatgtagatgaatcttaaagaagataattctgtacaaaaataaaaagacaattcagcactgtcatgagttacagaaaaataaaaaggaaaaaagaaaaaaaaggacaattcaactataatatggatccactttacaaaattcaagtgcatgttatatactatttaaggatatttaatctaatgatacaaacatacgtggtaaaagtatttttttaaaactaaggtaataagaaacaaaatatttaagaaaattacctctgcgggacacagaggaggggcagtaaacatggggatcttccaatgtaatgataatatactatttaggtacatgggtgttcattgtatcattcttcataaccttatagcttatgtatattttatgtcttaaagtactgactgctattagattctttacagggcatatttatcttctcaaactcacttcaaacattttgtagattgtataagttaattgccaagttaggggatgattcacttttactggatatacattctttagagtatgagacagtagatataatactttataatggcaaaaatcaaaaacagcctaactgcctaccatttggctagcgattaaatatggtgcacctcttctttagaacactgttcagctactaaatagaaacaagtacatctatatatgtactgatatggaaaaatttcttatatattgctaagtaggcaaaagggaagttacataaagtagatatgaatctatttttgacctaaaattatatgtatgtatgtatgtatatgatagtaaaaatctggaaggatatttacactaaaacctgttacgattatcctgataagagagataccaatgattacctctgggatgtggattagaagagttttgatttccattttaaacccttctctgcttgaaacatacacatataactacattatataagatatataacaagcatgtattacttttataatttgaaaaaagtcctcagttttttagaaaggaaattttagcatcctatgagaagaacttgccctaaaagaaaagccctgtcttttgttactttattacagttactttgttaccattattatagaggataaaggaatagaattaacagattaaggtctctagaagtcctaaagtcaggcaatttcctaattccccaatgattggtattaaaatgacaaaaaccattttggagctttttgctattagtactttctgtgctgtttattagctgaagaactaacttttaaggctttctctaaacttaattttagcatttacaattatggcacttatagaatagcagatacccttaggctacaaatatttttcatttgaataatcatatttctagaaacaaaaagacatggagtttttttgtttttgtttttgtttttgcagctttcaaatacaattgatttactcaggagttgtttgaaaaaaaccaaatacatttggattgaggggcacttaatattttataattcactatttcatgtatacataaaaagagatcctgtgcttcatcaagcacatgctgttgttgaacgttgtatagaggcccttcgcagttatgaatggacttacatgtgatgttcttactttaatgtgttatttgtttaatgtgtcacccacttgggatttgttagtatttatattcttgatgcaacaacgtacttatcaacagggatttaacatgacattctgaacatttttttacaaaagcatagagtttcaaggcagagtggccaaacatctgtgttgatgttttaagaaagaaacattaactaaatgaactaatttttaggtagtgattcaaaaactttggtaatttttacttttcatgacctagaagttattcttctgtctttcctatccacaagggaaaattaaatggaacatgagtactgccaaaaggctgtttatcaggttatttcaatgccagtgtaattttttatagcactgtttcatagaggttatagactattcctacctatcatttcatttcaaagaactgatcatattttagtattttttgaaactgagattactaaaaatctctccaaaaatatcatggccttaactttttattttgtcaaatatacaattaaagctttttatgtgtctacatcctagctaagatcttttaaaaataaattataattttaaaacccagtgaagtcttctatgtccagcattatgttaaattgcatatacgatgaggaaccttctcactaacatagaaatagatctcagaaaattacaaacaaatataaaccattattttggtacattgtttctcctaagaagaaaagaaaatctctaatgtatacctctttatactctgaagaaaaggacaagtagagaaaaccaagccctgagcagttaacagttgggacaatcagatttgtgagtacacccttggcctctataagtcttggccatctggttgaacctgaaagttttgcgtcaagctggaacattggaaaaagaataaagtaatccttatttacttagaataatagtctccaatctcatccaggttgctgcgaatgccattaattcagttcctttttatggctgagtagtattccatcatatatatctgccacagtttcttttttttctttttcgttttttttgagtctcactctgtcacccgggctggaatgcagtggcgtgatctcggctcactgcaacctctgcctcccaggtttaagcaattctctgcctcagcctcccgagtagctgggattacaggcgcatgccaccacgcctggccaatttttgtatttttagtagagatggagtttcaccatcttggccaggctggtcttgaactcctgaccttgtgatccacctgtctcagcctcccaaagtgctgggattacaggcataagccactgtgcccaacccaatatgccacagtttctttatccactcattgattgatgggcatttgggttggctccgcatttttgcaattgcaaattgtgctgctagaaacattcatgtgcaggaatctttttggtatgacttcttttcctctgggtagatacattgctggatcaaatggtagttctacttctacttcttgaaggaatctccacactgttttccacagtggttgtactggtttacattcccaccagcagtgtagaagtgttccctgttcaccgcatccacaccaatatatattattttttgattatggccattcttgcaggaatagggtggtatcatattgtggttttgatatgcaggaaagagcctgtgattttgaaaactgaggaatatttccatattagtgagtatagtgtagaaatgtggttggaga

SEQ ID NO: 93930 - DNA, 38778 bp, Homo sapiens
  misc_feature (1)...(38778): n = A,T,C or G
caagtccacagagcttgaaagtatgagacccagatttggactcaagcagtttgacaccaaagcctaggctcctactcactgttatgctagctaatatagtgctcaataagtttattcagtgttatgaaagatcgtatgcctcctacttttttaaacttttaagttcaggggtacctgtgcaggatgtgcaggtttgttttataggtaaacttgcgtcatgggggtttgtggtacagatttgatcactcaggtattaaacctagaacccactggctattttcctgatccactccctcctcccaccctccaatcagtccccgtgtgtgttgttcccctctgtgtgttcatgtgttctcatcatttagctcccactttcaagtgagaacatgtggtatttggttttctgttgctgctttagtttgctgagtatagtgcatatgcctcctacttaatagaaaaaaagtcagcaggtatggtcaacttcaactttctttctcctacaatctattaaacctacgtacatctatatcttcaccatctgcctttccaccagtctcagaaaagaagtttcccctctctcagttcaaggccagttcttcccgtagcctttgaccccatctcttcctgttttctctggacttcatcagttattctatttgggaactttaatctcttaatctctcctctccttactttctcctcctcacccatcatcctgctcaagatctaagaaaatccccactaggggacccagcattgatctttccagccccttttcagtcattatcctctctctcctccctttcaagcttctggaaaggacacttctcacctcttacctccctcccctcccattctttttttttttttgagacggagttttgctcttgtcgctcaggctggcgtgcagtggcacgatctctactcactgcaatccctgcctcccgggttcaagcaattcttctgcctcagcctcccgagtagctgggattacaggcgcctgccaccacaccctgctaatttttgtatttttagtagagacggggtttcaccatgttggccaggatggtctcgaactcctgacctcgtgatcgcctgccttggcctcccaaagtgctgggattacaggtgtgagccaccacgcctggcctcccattcttgtctcaacatgttacaatctgatttctaccctcactatgctatttaaacttcactaagttcaccagtacattcccaattgctaaatgtttccacgttttatttactgacattctatgctgcacttgattgttctctaccccttcaactcctcattcacttggcttcctggggttggctctgccctcagcactctaccaactctccctgtgagagagacccatccactctccttgattcaggtgaccacctttcataaagggaaatcttttttttttttttttttttttttttttttgtagagacaggatttcaccatgttggtcaggctggtctcaaactcctgacctcaggtgatcctcccacctcagcctcccaaagtgctgggattataggcatgagccactgcaccgggcccatgaagggaaatcttatctgggatcttagcagaacattatctaagggggacgggtaatatccgtataggttcttagctacctgagggcaaaactgttttatgcacagcctgccacagcagacaaacaatagatatctgttgaacaaattaccccttataaactttgcttcacagatgtctaagcaatttctgtagatgtgtccaaatgtttatagaaatattgtaaacgttgtacagagtgttacagatgttcagagaaggaactatcatttttggcttggtaagaatttttggcagtgatagcacttgagctggaaatagtttaagtaaagtccaggggcaggaaagggaggggaggagtagtaacattcaactcccatgccagagactggagaatagcaactggagggactctgtggaaacatcaagtttgaataagggaatagaagattcaactaaaaagataagtaggaggccgggcacggtagctcacacctgtaatcccagcactttgggagtccgaggctggcggatcacctgaggtcaggaattggagaccagcttggccaacatggtgaaaccccgtctctactaaaaaaacacaaaaattagccagctatggtggcatgcacctgtaatcccagctactcgggaggctgaggcaggagaatggcttgaacccaggaggcgcaggttgcagtgagcagagatggcgccactgcactccagcctgggcaacagagagagactccatctcgaaaaaacaaaaaagataggtaggaaatacacatgaggagggcctgaagtctaagctaaggagtgctgggattactccataggcagagaggagcctagactacacaggtaggtgttcagtcgtcctatgtggtggcaaagcagctgctggattggagtgtcacactggcggtgaacagaccgtgggacacgccagtgagcaaaatgagaggctgacacagggcaacggcactgaaatgacaagaaaacagctgtagtacttgacagatttcattgaatctaataaatctgtatgtatgtacatatatatagacacacacaaattttaacttgttattaatctttatagagacagtgtctcactctgttgcccaggctggagtgcggtggcatgattagaactgactgtaaccttgaactcatgggctcaagcgatcctcctgccttggcttcccaaaaccctggaattaacagatgtgagccaccacactggccaaattttaacatctttgttattgaaatacaagtgtttaatttgccggcatattttttaacaatacataaaatactaccgcatcttaaagttgatgttatcttagattcaatgaaatatgataactggatgtgaataagaaggaattcaaaagcaaagtttcaaacccgagtgactggaagggagtttccttgagccccacaggagagtctaaccaaatcttctatttgagcaatgatccccagacaatactgctctcccaccttccccacttgaacttattaataagaggaagtagttattaatgacaactttaatatgaacatgtgcttaaccctcaagaaattgtcacaactgaaagacgggagcaagctgacactgcaaggaacacatgatgctttggaatgggtggcctgcgtattcaaacacatcaaagcagcagttacttgaacaatcggaacttcttcaaatactggcccacttcttccttggggtagggccggagagcaatacaagtggcgatattctctggttgctcaagccacagcatgtggtcaatgttcttctgttgcagggtctcggccagctcctttagggtggtctcatctggggcctaaaggagaagaacacagaacacaaactgaatagcccacttaggaagtgtcaaaaggccaaaaaaggtttccggagtcctcttgcctgaaagtggagtaacagctttaccaaggagggagctgcagagcaatgatgtcattccgtggtgcactggggaggggagagaggcttcatattccagtttagaaaatggagatttgtatcttcccttgtgagatgttgtatgcccaacacacacatgtgtaatgtgtaattctgctctatacattttccagctctcctatggctggcgcccataattttaagtgcctctgactttaagagctgcctagtggaagtttttttttttttttcttttgagacagagtcttgctctgtcrcctgggctagagtacagtggcacgattatcagctcactgcagtctctggctcccgagttcaagcaattctcctgcctcagcctcccgagtagctgggattacaggcgcacaccactacacctggctaatttttgtatttttagtagagatggggtttcaccatgttgcccaggctggtctggagctcctgacctcaagcaatccacccacctaagcctcccaaagtgctaggattacaggagtgagccaccatgcccggcccctagtggaaggatttctaaaagcacatccacttccactttcctccacccctcccactctacctcactgaaacctagaggggttttccttctgctgggatggctcccacttgtttattaaagggagagtacaatattctctaacatccttctgaaattgtttctgggtcatccttactgccaattcacccatgctgaatcccattccaggaagtattaaaacgatcactcagaaaattattatttttgtgttattttgcataaagtttatctcttacctatgaaggcagaagccactaagctactcagaggcttgttttaataaattagagaatgccagtattgcgactcttaacctgctgagtccttctggcagagctctgctggaggactcatcagcttcttcagcctcgggcagcagcagagcatagtgagatacagtgaggctctggaatcagactactggactccaaactcttgctgactgtgtgatcgtggataagttaggtgacttcgctggcctcttcgtccctttataaaacaggaataatgcttcctaatggggatcaatgaaatcaggcttggacctgtgcctggcacacactaagcactcaataaatgtagttaatcctggtattttcttatattttattggcccttctgactacagcagcacctcaatgtaatcagtagcgactcctaagtccctttcttgagtcatgactaacaactaagaatcatgagaccctcttttaaactcaggggagtcacttaatccctgtaggcttcagagagtttcacctgcgacaagaggagtctaacctgatttcttgagacctcttactaggaagaaaatctaagtgaaaagccagcagcttctgttctgcctacacagattctcaaggcatttttcctacaggttaccgcttgatgtttcactatccagcagcaatttttctcttgaaagataatctatctttgccagttacccatgaagggattactccacccctccacctgagttctggcttaaagccgtttttccttattataaaaagccgtttattattaaagccgtttttccttattataaaatatgtgcttaaggtagaaaattttaaaaatacagattaagcattaggaaataaccaaaatctcaccatgcactacttaatatgtagatgtatttctttagtttttcctttcaaagtctggatcattctgtatatatagttcagttagcttcgcatcatgagcactcttcccgaccactaaatatgcttcaaaaccataagggctcccatgaatatccttgtgcaaagctctttgggtgcatctgattattttcttaggctacatctctagcagcaggatagagagtcaaagggtaagggtgagatttgtttggtcatctgcaaacagaacctgactgctattttaaaaggtgtaccgatttacacacctggtgcctggtctagctgaagctaggttcaatttatactaacgtttttagtatttattttcaaataatttggcgtcctacccaggtaaatactcagtttgacttcactttgcactgtcccttcgggctcggttttgcaggaggacagcactttggggcatggctttaaaaagtcggccagtgcacaggcggaacagcggggacacaggagccaccactttaccgcgagcccagcagggggcggaggactgctgtccactcttcacacagtcaggcccttcccaagggcgcacctccagggaaacagctccagtctaaatgttaacgatcaccccaactcccgccgcacccactccccgcagccaggccttcggaccgaagaccacacccacttccgccctcgatgtctcagcacctccccctccgcccgagtgcctcacctcgaggaccactttgcgcatgcgccccagctcttggaggtaagcggctgtgtgcgggtggtcgcggtgagtgtgcaaggccgcggtggccgcgtgacaagcctgcgctaccagtgcgcccgccggccaggagaacggagcttgtgatagatcctttcgtaacaccaagtattgtaccaggacctgcggctccgccccagaggccgccatcttcctgaccacccgaaaggccggacctactccccggtgcatcttgggatcagggcggggccctgagcgccgccatgcttttgtacggcaggatcgcaaagcacgccgggaccggttggtttggttttgaagacgtggatggcgggaattctcgcttctggcctgggtgagctagaagggagaaggtaggggaaagacccattgtcggaccggaccgtggccagggtggcgggctgaacggccttcttaaaactccttccgtggccgggaagcccgctggaccagagtagccgtggcctcgggagcgcgccggggccgcgggatgggcgcgggggtgggcatggactctgctggctcggacgatgggagagggcgggcggctcaggaarggggatcctagccgtgacatttgtgtcatccgcggcccaggggttgtgcctgagtggtgtgtgccctgccgtctgggtttgaatgggactagatgtgatgtgactgttgccatttttcttttattagcaaggacattggagtccctatcaccggttgcctagacaacttcatgggaaggcccttgggaatctgagatggagcaggcgaaccctttacgtccagatggcgagtccaaaggaggtattcagagggtcgccgcctccttcctgctgctgcccaaagatgacccgcaggctgagagagccctttcctcctggaactgacgtgggacctggcctgtttgggagcagaatagtgaaaggaactaacattgaagacaaagggacaggcagccaagattattcgaggaggaaaaatggcttcgtttctaggctcccaccccttttgaaacggataagttgcatccatcatatgctcagtgtttatattctgaactgcggttctagccagggaggtccctttcctctccccggattttttgggccatgtatgcattactcttgagggagggccagtgtagggcagtgactttagtgttggctagaactggttttgagtgttggctctgccatgataaatattgtgaccttaggcaagtcactttattctctgcctctgtttcttcatctggaaaatggaggtgaaaatagcactgtagttgtggttgtggaaaaagtatttcttttgtggtggaaaagtattkaactcagacttttcaagtgaagcatttagcacatgtctaatatataggaaatattcaatgaaaggcttaattctttacatactttgtgtcttaaaatgtagaaggtgtttaaagaatgcttgttagagttgcttagaattacgaaactattacttttacttagtccttagtcaatcctttggaaactgagatttgcgtttgaatttctgtccaggagtaagttgctttcttctttagtgcctagtaatatttgtggacagttctggttttgtgtgactttatgttctttgctactaatactttttagaactttgaaatacttactcaagcctgatgcctaaatccaaagggttctacgttagtactttgggaaagcttgccataaaacctaacttaaattacagttttaaaaagaatttctgagcgcgtcagtgaatttggttatcctatttttctctgggtcatcattatcattgataacagagaagtaactatattcagcytaagatgacttaagctgagactttagataataaaagtatatggggtaagatttattgttactttaagactaaaaataagtttggtgactttatgtagtggaaacatgctacactcaggagtaacctgttctctagtccaggccttatttcatttctgttaaagtaagtgatgaggtggaagttttggattatcaagagacttagaccagtctccttattctctacccaaaacaatatttaaacacttagctgttacccatactggttttatccctctgcttgtttgatttcagttttttgcttattatttgaattctccccactcatttgagaaggaaggacatggagttgtagttgcaaccagatgatttattcaaataggcagggattttgacyttttytgggacaaagctgactggctaggatgagatgcaatcataacttccaaggtaaagcaggcccagcagatacactccctcttttctgtagtagcaacgctaaacaacaacgctacccccttggtgtagagggaatcaggtcggtaaagaagctgggcaggtttgagagcctgagaagagggctgtgtggaagtgcctagagaaggagcagcatgatactgttttgaacacctacttatctcagaaactttgggaatattgatatctactgttttagtaatatagaatttccataaagtagaatttggtgaggcgtctcctctaccaccctaaattattctatgtgtgcgtgcttttcagatcacctcctggttggacattaatttttgtaagctccgtgaggacagggacttcgttttgccaccacagtatgaataacttccagcacggtccttggtccatagtaaattctcaatgcatagttgttggataaatagagatttgtgaataaagcagttaatcacgtgctaattattaggactaatttatttaattagaattttggtttctcacgattattattgcggtaatgtgggtttttctgtggacatgagccaagtgaatgtaatctccaagagtgtcatgcctggttgtccgtgtttcggtaaacatttccggagtgttggccgggcgcggtggctcacacctgtaatcccagcactttgggaggccaaagcgggtgaatcacaaggtcaggagttcaagaccagtctggctaacatagtgaaaccccatctctactaaaaatacaaaaattagccgggcatcgtggtgcatgcctgtagtcccagctaattgggaggctgaagcaggagaattgcttgaacctgggaggtagaggttgcagtgagctgagatcgcgccactgcactccagcttgggcaacagagtgagatttcgtctcagaaaaaaataaccatttccggagtgtttaccatgtgtaaacactttgtgctagggttaagggatccatgggtgaacacaaatgcacacggtccctgattttggaactttaaggttcagtggaaaagataagcaaatcaaataatcacactaatgaatatacaattaaaactatagtggccgggtgcggtggctcacgcctgtaatcctagcactttgggaagccgaggtgggaggatcgcttgagcttaggagtttgagaccagcctgggaaacatagtgagaccccatctctttatttaaaaaacaaaaacaaaaaaactatagtattgtctcagaaggatctttgagagcttatgagctggcacctgaccttgttctgaaggtgctacaaaggtttccctgaggaaatgctgcttgcattgagtgctaacgagctagagtagctgcaggtgaaggtggataaggggcggctgtggaagagcctttggtgtgtgtgttgggggtggggggatcaggtcagtaaagaagctgggcgggtttgagagcctgagaggaggcctgtgtggaaatgcctagagaaggagcagcatgatactgatgagggtaagagagatccagaggccagtaggcctcgtaggcagtgtgaagtcatcgaaaggctttagccagctggatgacacgatccagtttagattttgaaatatggcttcagtgtatgggccacctaggaaacttgtaataggccagaaatggtagtagcttgaactacaatggtggcattgcagatggggaaaatggaaatattttagagatactaggaatgtwtattcaataggatctggtaatggattgggactgggtcagggagaaggtgtaaggaagaaagtactggtttacacagctatagatggataatggttccagtcatggaggggtttagaaggggagatgatgaattcagtcttggacatgttgattgtcaggttcctgtaagtcttccaagtagatacactgagaaggcaggtggatattctgctttctcaagaagcaggagagaggtataagctagagatacatatttgtgtggcatcgacatgtatggccattaaggctgtgggtactgatgagatttcttctggaaagaagaggtcttaggactgagctctggaaaatttcagcatttaatggtcaaggaggagagtaggagccttcaaagcagaaagtggggtcagagaggtaaaatgtaagtgtcacaaaaacaggttgtctgttgttcatcactatgttcccagtgcctgaaatagtacttggcacaaaatagatgcttaataaacatctgttgaacaaggcataccaacaggccgctatgctaagattcagaggaaaagagggtttcgtgaaggtggtgatcagtaggagcatatagtgctgggaggtgagataagggagcttgaaaaatgtcctttgggttcagcaacatggatatcactgttgatcttagagtggttttgtaaaataatgggaacagaagtgagtttcaagtgggttgaggtatgagtcacaggcaagaaaatggagaaagtgagtacaagttgagcactgaagatccaaaatctgaaatactccaaaatctgaagctttttgagcactgacatgatggtcaaaggaaatgcttatttccagttttggattttcagatatgggatgttcagccagtaagtgtaatgcaaatactcccaattccgaaatctgaaacacctctagtcccaaaacgttcggatactcaacttgcatggacaactcttttaagtagttttcctggaaaggaaaggggagaaaagggagatagtagctgaaggggatttgtgggcaagaataggcctgtgagtgtatgaaattgtgtgtgtgtgtatgtgtgtgtatatatatatatatatatgagtgtgtgtttgaagacagttgagacttgagcgtgtgtggaagggaaatgaacacagcagagaaaagggtaactgatcatttagggtttctgagaaagcaaggggataggcctcaatgagtaaaataggataattctgcatatagtgcgtgtctgtttctatttgatctcacacaaattttttttttttgagacggagtctgtcacctaggctggagtgcagtggcacgatcttggctcactgcaagctccgcctcctgggttcacgccattcttctgcctcagcctcctgagtagctgggactacaggtgcccgccaccacacccggctaattttttgtgtttttggtagagacggggtttcactgtgttagccaggatggtcttgatgtcccgacctcgtgatccacccgcctcggcctcccaaagtgctgggattacaggcgtgagccaccgtacccggcccgatctcacatacttttttttaatggttttattagccataaaaaccataagaggtttctagtcttaattggataggtgaatgagataagtttttggattccgtcccaaggcaaggagagaagattaaggttttcatatatgttcatccatatgaaccctacaaaatagatgctgggtgtacttaagaagctcgattaaataaagtctggggcttcctttttttttttttttttttttttttttggagacagtcttgctctgtcccccaggctggagtgcaatggcactccaatggagtgcagtgatcttggctcactgcaacctccgcctcctggattcaaacaattctgcctcagcctcccgagtagctgggattacaggcatgcgccaccatgcccggctaattttttgtatttttagtaaagatggggttttgccatgttggccaggctggtctcgaactcctgacctcaggtgatccacccgccttggccccccagagtgctaagattacaagtgtgagccaccgccctcggctgtgagagggcttctctccggcctgtggtaaagctagagaatcatcctttacacactagagatgtggatttgcgataaactgcagacctagataagacactgctgcctaatcagcgtgtgatagttcatatcctctctcgggctgtctttgaggaggatcctsttttacatcactctccaacctaggaggttgatgatctttgatttcaattgttagctcccctggttttataaattgacagatatctaacaattcagctggccacaaagttctggtaaaaaaaaaaaagagtcacctgttcttccctgagatgcttcctgtkgccacagtgagaaatcctcagcttcttgtaaaattctccttttactctccttaggtgttttagctcacttggaaaggctagagacccaagtgagcagatcccgtaaacrgtctgaagagctgcagagcgtgcaggcccaggaaggtgctcttggaaccaagattcataaactaaggcgtctgcgagatgagctgagggctgtggtgcggcaccggcgagccagcgtgagtagaagggtggtatcagcagttcctttagagtataatgaacaaacgtgatttgggaattggtgaattggccattttttataatgtgttttacttgtgatcttactggattgattgcagtccttgatccctcaaatgatcaaacctgtagagtttggccaggcacggtggctcatgcctgtaatcccagcactttgaaaggcgaggcaggcctatcgcctgtggtcaggcgtttgagaccagcctggccaacatggtgaaaccccatctctaccagaaatacaaaaattagccaggcatggaggcaggcgcctgtaatcccagctactcaggaggctgaggcacgaattgcacctgggaggcggaggttgcagtgagctgagatcgagccactgcactccagcctgggaaacagagtgagactccgtctcaaaaaaacaaaaatccggtagagttacagtgaatatcacctaacattttttaatttttttattatactttaagttttagggtacatgcgcacaacgtgtaggtttgttacatatgtatacatgtgccatgttggtgtgctgcgcccattaactcttcatttaacattaggtgtatctcctaatgctatccctcccccctccccccaccccacaacaggccccggtgtgtgatgttccccttcctgtgtccatgtgttctcagtgttcaattcccacctatgagtgagaacatgcggtgtttggttttttgtccttgcgatagtttgctgagaatgatggtttccagcttcatccatgtccccacaaaggatgtgaactcatccttttttatggctgcgtaatattccatggtgtatatgtgccacattttcttaatccagtctatcattgtaggacatttgggttggttccaagtctttgctattgtgaatagtgccgcagtaaacatacatgtgcatgtgtctttatagcagcatgttttataatcctttggatatatacccagtaatgggatggctgggtcaaatggtatttctagttctagatccctgaggaaycgccacactgwcttccacaatggtggaactagtttacagtcccaccaacagtgtaaaagtgttcctatttctccacakcctctccagcayctgttgtttcctgactttttaatgatcrccattctaactggtrtgagayggtatctcattgtggctttgatttgcatgtctctgatggccagtgatgatgagcatttwttcatgtgtctkttggctgcakaaatgtcttcytttgagwagtgtctgttcatgtcctttgcccactttttgatggggttgtttgtttttttcttgtacatttgtttgagttcattgtagattctggatattagccctttgtcagatgagtagattggaaaaattttctcccattctgtaggttgcctgttcactctgatggtagtttcttttgctgtgcagaagctctttagtttaattagatcccgtttgtcaattttggcttttgttgccattgcttttggtgttttagacatgaagtccttgcccatgcctatgtcctgaatggtattgcctaggttttcttctaggatttttatggttttaggtctaacttttaagtctttaatccatcttgaattaatttttgtataaggtgtaaggaagggatccagtttcagctttctacatatggctagccagttttcccagcaccatttattaaatagggaatccttccccatttcttgtttttgtcaggtttgtcaaagatcagatagttgtagatatgtggcattatttctgaggcttctgttctgttccattggtctatatctctgttttggtaccagtaccatgctgttttggttactgtagccttgtagtatagtttgaagtcaggtagggtgatgcctccagctttgttcttttggcatgggattgtcttggcaatgggggctcttttttggttccatatgaattttaaagtagttttttccaattctgtgaagaaagtcattggtagcttgatggggatggcattgaatccataaattagcttgggcagtatggccattttcacaatattgattcttcctatccatgagcatggaatgttctcccatttgtttgtgtcctcttttatttcgttgattagtggtttgtagttctccttgaagaggtccttcacatcccttgtaagttggattcctgggtattttattctctttgtagcaattgtgagtgggagttcactcatgatttggctctctgtttgtctgttattggtgtataagaatgcttgtgatttttgcacattgattttgtatcctgagactttgctgaagttgcctatcagcttaaggagattttgggctgagacaatggggttttctagatatacaatcatgtcatctgcaaacagggacaatttgacttcctcttttcctaattgaataccctttatttccttctcctgcctcattgccctggccagaacttccaacactatgttgaataggagtggtgagagagggcatccctgtcttgtgccagttttcaaagggaatgcttccagtttttgcccattcagtgtgatattggctgtgggtttgtcatagatagctcttattattttgagatacgtcccatcaataactaatttattgagagtttttagcatgaagcgttgttgaattttgtcaaaggccttttctgcatctatcgagataatcatgtggtttttgtctttggttctgtttatatgctggattacgtttattgatttgcatatgttgaaccagccttgcatcccagggatgaagcccacttgatcatggtggataagctttttgatgtgctgctggatttgggttgccagtattttattgaggatttttgcatcgacgttcatcagggatattagtctaaaattctcttttttggttgtgtctctgccaggctttggtatcaggatgatgctggcctcataaaatgagttagggaggattccctctttttctattgattggaatagtttcagaaggaatggtaccagctcctccttgtacctctggtagaattcggctgtgaatctatctggtcttggactttttttggttggtaggctattaattattgcctcaatttcagagcctgttattggtctattcagaggttcaacttcttcctggtttagtcttgggagaatgtatgtgtccaggaatttatccatttcttctagattttctagtttatttgcgtagaggtgtttatagtattctctgatggtagtttgtatttctgtgggatcggtggtgatatcccctttatcattttttattgcgtctatttgattcttctctcttttcttctttattagtcttgctagcggtctatcaattttgttgatcttttcaaaaaaccagctcctggattcattgattttttgaagggttttttgtgtctctatttccttcagttctgctctgatcttagttatttcttgccttctgctagcttttgaatgtgtttgcttttgcttctctagttcttttaattgtgatgttagggtgtcagttttagatctttcctgctttctcttgtaggcatttagtgctataaatttccgtctacacactgctttgaatgtgtcccaaagattctggtatgttgtgtctttgttctcgttggtttcaaagaacatctttatttctgccttcatttcgttatgtacccagtagtcattcaggaacaggttgttcagtttccatgtagttgagtggttttgaatgaatttcttaatcctgagttgtagtttgattgcactgtcgtctgagagacagtttgttataatttctgttcttttacatttgctgaggagtgttttacttccaactatgtggtcaattttggaataggtgtggtgtggtgctgaaaaaaatgtatattctgttgatttggggtggagagttctgtagatgtctattaggtccgcttggtgcagagctgagttcagttcctggatatccttgttaactttctgtctcgttgatctgtctaatgttgatggtggggtgttaaagtctcccattattactgtgtgggagtctaagtctctttgtaggtctctaaggacttgctttatgagtctgggtgctcctgtattgggtgcatatatatttaggayagttagctcttcgtgttgaattgatccctttaccattatgtaatggtcttctttgtctcttttgatctttgttggttgaaagtctgttttatcagagactaggattgcaacccctgctttttttttgttttccatttgcttggtagatcttcctccatccctttattttgagcctaagtgtgtctctgcacgtgagatgggtctcctgaatacagcacactgatgggtcttgactatccartttgccagtctgtgtcttttaattggagcatttagtctatttacatttaaggttaatattgttatgtgtgaatttgatcctgtcattatgatgttagctggttattttgcccattaattcatgcagtttcttcatagcattgctggtctttacartttggcatgtttttgcagtggctggtaccggttgttcctttccaygtttagtgcttccttcaggagctcttttagggcaggcctggtggtgacaaaatctctcagcatttgcttgtctgtaaaggattttatttctccttcacttatgaagcttagtttggctggatatgaaattctgggatgagaattcttttctttaagaatgttgaacattggcccccactctcttctgacttgtagagtttgtgccgagagatcagctgttagtctgatgggcttccctttgtgggtagcccgacctttctctctggctgcccttacattttttccttcatttcaactttggtgaatctgacaattatgtgtcttggggttgctcttctcaaggagtatctttgtggcgttctctgtagttcctgaatatgaatattggcctgccttgctagtttggggaagttctcctggataatatcctgcagagtgttttccaacttggttccattctccccatcactttcaggtacacctatcagacgtagatttggtcttttcgcatagtcccatatttcttggaggctttgttcgtttctttttattcttttttctctaaacttctcttcttgcttcatttcattcatttcatcttccatcactgataccctttcttccagttgatcgaatcggctactgaggcttgtgcattcgtcacgtgggtctcacgccatggttttcagctccatcaggtcctttaaggacttctctgcattggttattctagttagccattcgtgtaatttttttcaaggtttttaacttctttgccatgggttcgaacttcctcctgtagctcggagtagtttgatcgtctgaagctgtcttctctcaactcgtcaaagtcattctccgtccagctttgttccattgctggtgaggagctgcgttcctttggaggaggagaggcgctctgatttttagagtttccagtttttctgctctgttttttccccatctttgtggttttatctacctttggtctttgatgatagtgacgtacagatggggttttggtgtggatgtcctttctgtttgttagttttccttctaacagtcgggaccctcagctgcaggtctgttggattttgctggaggtccactccagacgctgtttgcctgggtatcaacagcggaggttgcagagcagcgaatgttggtgaacagcaaatgctgctgcctgatcgttcctctggaagttttgtctcagaggagtacccagctgtgtgaggtgtcagtctrcctctactgggggatgcctcccagttaggctactcgggggtcagggacccacttgaggaggcagtctgtctgttctcagacctccagctgcgtgctgggagaaccactactctcttcaaactatcagacagggacatttaagtctgcagagttttctgctgccttttgttttgctatgccctgcccccagaggtggagtctacagaggcaggcaggcctccttgagctgcagtgggctccacccagttcgagcttccaggctgctttgtttacctatccaagcctcggcaagggcgggcgcccctcccccagccttgctgctgccttgcagtttgatctcagcctgttgtgctagcaatgagcaggctctgtgggcgtaggaccctctgagccaggcacgggatataatctcctggtgtgccgtttgctaagaccgttggaaaagcgcagtattggggtgggagtgacccgattttccaggtgccgtctgtcacccctttctttgactaggaaagggaactccctgaccccttgcgcttcctgggtgaggcgatgcctcgccctgctttggctcacactcggtgtgctgcaaccactgtcctgcacccacggtccgacacttcccagagagatgaacctggtacctcagttggaaatgcggaaatcacccgtcttctgcgttgctcacgctgggagctgtagactggggctgttcctattcggccatcttggctccaccccctcacctaacatttgtcaggcactactggtaagccaggcaagttcttcctgacaggttcttaacctgccctaataaacacctaagtttgttacctcaatcatatacatattgggtatatgcctggtagaattgctgagtcataggatatgcatattcggtttagtaaatactgccagtttttgaaagtgattgtactagttttacattcccagcaatagttgtataagatttcccttgttttgcatttttaccaatacttaaartggcctgccttgagttgttgatacttgtgtcatttttgacatctgtcatccagactcaacctcctagggagcttgacccttcccttttttcagttttctctctagcctaggttcagtcagcaagacctatcagatttttcttttatattgcctttgtccttcctccattgccacagctcaaatattagtcatatatggagtaaatatcaggtgatttggatatcaggattatgacagyagtctgccagttggtgcatcttctagtatttctgcttttccaataaatcctgcacagccaagaaaatgcttcatgaaacaccgcaccattgctctgctcaaaagccgtcaacaacccttcattgcccattggatatcagccttcctccccctcttccttttccacctgtacctctcttccttcctcccttcttccgttctttttttttaattaaagtgtaatatatatgaagtgcactatgacagagattaaagtatagagcattaccaacacccagaagcctccagtttgcctcttcctagtcttctcttaaggtacccactattctgatttctgtcaccatacataggttttacctgattttgaactttatataaatgttaaaaagctaatttatagcttaaaaagtacaaactcttatgtctggcttcttttgctgaatgttctgactgtgagattcacctacactctgcttatagtgctcattttttttattgctgaatagcaattctattttatgagtatactacatttatttacccattctactgtgatgacatttgggttattggggttatttcactttgggacaattatgaatgctgctgctgttaacattttgggtgtttctgtcctttgatataaaaatatacacttatatattgggtatatgcctagtagaattgttggttcataggatatgcatgttaggtttagtaaattctggcagtttttgaaagtgattgtaccagttttacattcccagcaatagtgttaaattccattgtcctgcatttttaccaatacttgctattgtcagttttaaaaatttgtcattctggtgggagtgtaataatatgtcattttggattgaatttgcatttgcttcataaccagtgatggtgaatccctgtattgaacatttgaaaatcttctgttgcaaagtgtgctttattcaaggcctttgtgaaatttttattaggttgtccatctattaaattgtagaaatctttacatattttgagtgagttcttttttgggtatctgtattagagtcttccttagactgtggcttgtattttcactctctaatggtgtcttgtgatgaaaatctttgttttaatgaagtttgatttagtaattaaactttattcttattgcccttgtttcttgtttaataaatctttgtctaacttaagatcatgctgatcttttccaggtattttattttttttattttttttgtttttgaracagagtctcactttgttgcccaggcaggagtgcagtggcacgatccggcaccctccacctcctgggttcaagagattcttctgcctcagcctcccgagtagctgggattacaggcatgcgcccagctaatttttgtatttttagtagagacggggtttctctattgttggccaggctagtctcgaactcctgacctcaggttatccacccgcctcagcctcccaaagtgctgggattacaggcgtgagccgccgtgcctggccaggtaataaaagagccacctggctcttttatttatagtttgtgaagagttttaatcatgatattatgatattaaattttctcaaatatttttactgcatatattaagggaatcatatgttttctcycttattttattaatttgtggtatatattgattgctgtttaaatgataaattgccctcacattctcatagtaaacctaatttggtttgatgtatcatctttttaatataatgctaaatctgacttgctgatattagttattagaacttttgcatctaaattcatgagagagactgccctattatttttttgtggtaactttgtcaggttttggcatcaagttttatgttgctctcagaaagcaggttgagacattttccttttttttttttctattctttgaaagactttagataaaattggtgttattttttcttacattttgatgaggaattccccggtgaagctctttgggccttctctgtgggaaggttttaatttccgatccaatttctttgatcagcataagctgttcagatttcctgttttttcttgggtcacttttggtatgttgcattttgcagtttgttcattttatgtaaactctcacatttaaagtttgaaatttttttaaaacaacctactgtcttgtgactaggatggatcagtgatgatgtctcattttttattctgatattggtcatttgtgcttgctttcactccatttctgtctcctcgatcagtcttggtgtgttttatcacttttgtgcctttttkcaaagaaccaacttttggctttgctgattttctctcgttcatttgttttgtattttcattgatttctgctcattattattttcttccattactctctgaattttagttgttcctttagcttcttgagatgaatactttattgatattttttagtcttcttttctcttaaatacatttaaagttaaaaattttccctctaaccacaggtttaaatgtgtcccacaagtttttctttttctttttctttttttgtttgtattttttcttttttgttttttgtattgttttttccttttataccccacaagttttgatatattttcattatcatttcaattcaaatattgttaatttccattgtgttatcttctttggcccgtgggtttgttttataagtgtaccaattaatttccaaaaatttgagtatttggttttttttttaagttactaatttatagcttaattccatatggtcagtgaatgactcagcatgtggtcagtttttgtaaatattccatgtgcattaaatgtggactttgcatttgttggctcttatattctacatatatcaaataggcctagtgtgttcatcatgttgtttaaatatcttacatccttagctgagtgtggtggcacatacctgtaatcccagctagttgggaggctgaggcaggagaatcacttgaacctgggaggcgggggttacagtgagccgagatcatgtcactctactccagcctgggcaacagagtgaaactatgtctcaaaaaaaaaaaaaaacttacattcttattgatttacttgtctacttgttttattactgaaatagattttttaaaatctcccactgtgattgtagatgaatttttccccttttattctatgtttctatatatattgggtggcaacaaatttaggactactgtatcttcctgatttagttgacttttttttattatgaaatattccttttaattttaattaaacttcttgccttaaaatctattttgatattggccgggtgtggtggctcacgcctgtaatcccagccgtttgtgagactagggtgagaggatctcttgagcctaggagtttgagatcagcctgggcagcatagtgagagcccctcatctttaaaacaaaattaaaaattaaaaaaaagtttactttgatgaatcctagtacaatagtaacttttttggttaacgtttgcaggttaaggttttttttttttttttttttgagatggagttttgctcttgtcgcccaggctggagtgcaatggtgccatcttggctcactggaacctctgcctcccgggttcaagcaattctcgtgcctcagcctcccaagtagctgggactagaggtgctcgccaccatgctcagctaatttttgtatttttagtagaggtggggtttcaccacgttggccaggctggtctcgaactcctgacctcaggtgatctgcccacctcggcctcccacagtgctgggattacaggtgtgaaccaccgcacccggcctgcagggtaagttttttctgtctttctgcttccaatctttaaatgaccttacgtttaaggtattcttcttgtaaatagcatagagctagatatttttaatccatcttgacaattgttgtctattgttattatttattattgttattttttttttgagacagagtctcactctgtcgcccaggctggagtgcagtggcgagatctcagctcactgcaatttctgcctcctggcttcaagtgattctcatgcctcagcgtcccaagtaggtgggattacagacgtgcaccaccacgcctggctaatttttgtatttttagtagagacaagggtttcaccatgttggccaggctggtcttgaactcctggcctcaagtgatctgccggtcctggcctgccaaagtgctgggattataggtgtgagccactatgcctggccaatgtttgtcttttaattggagtatttagtccatgaactttttttttttttttttgagacggagcctcgctctgtcacccaggctggagtgcagtggcactatctcagctcactgcaacctccgcctcctgattcaagcgattctcctgcctcagcctcctgagtagctgggattacagatgcccgccaccacacccagctaattttttgtttttygttttttgtttttttttttgagacggagtctcgctctgtcgcccaggctggagtgcagtggtgcggtctcggctcactgcaagttccacctcctgggttcatgccattctcctgcctcagcctcccgagtagctgggactacaggcgcccgccaccacgcccagctagttttttgtatttttagtagagacggggttttaccacgttagccaggatggtcttgatctcctgacctcgtgatccacctgcctcggcctcctaaaatgctgggattacaggcgtgagccactgcgcccggccaatttttttgtatttttagtagagacggggtttcaccatgttggccagtctggtcttgaactcctgacctcatgatctgcccgctttggcctcccaaagtgctggaattacaggtgtgagccaccgcgcctggcaagtccatgaacttttaatgtgattactgatctatttggatctcaatctaccatagtattttattgtcttatttgtcacgtatagtcaacattcctttagtgttagacacatatttacccttttcagtgctcttcattttcacatttccatctgcgattattttctttcagttaagtagctccttttggtacttcttttggtatcgctggcagtaaaatctccatatttgtttgactgaagacatctttatttcactatgttttttattttttaagagtatatttggtgagtatataattagatattagaatttattttctttcaaactttatatcattctgttgtcttctagggccatagtatcttgtcaggtgtgaagttttggccttattagtcaggtgttaatcttatgtttgtgaatataatatgtctttttcttcgggcttaagattttctttgtctttggtttttagcaattttagatcaatgtggctaagcatgatttttttttttatcctgtttggtgcttgtaaagcttctttaattgatgtttttcatctgttttacaacattggccaatatctctttaaatagtgcatcttctcagtttttctctatttctggggctcccatgtatgggtgtttttgtttttgttttctgtgacctatgtcttagtaattttctaatcttatttttttctctgtactttaatctggatatggaaaatatgcctactttccactccacgtaagatcttatttgtctagttggcttttaaatctattaaaattctaatttgagttactgtatttttttggttctaagatttccgtctcattcttttctgtatagattccagctctttggtctgggtttccatcttttagcctgttttaatggccatgccccattattgaaatagctgaatcccttggcatctgttctgttgtcttctttttcctcttggctttcagtcatctgtttctctttcctggtatgcctgtagttttttttttttttttttttttaattcaatgatgagtattgtgtatgaaaaaatatacggaggtcaggtgctgtggctcacgcctgtaatcccagcactttgggaggccaaggcgggtggatcatstaacgtcaggagttcaagaccagcctggccaacatggtgaaaccctgtctctactaaaaatacaaaaattagcgaggcgtggtggcgcacacctgtaatcccagctactcgggaggctgagggaggagaatggcttgaacccgggaggcggaggttgcagtgagccgagattgtgccattgcactccagcctgggtaacagcaaaactctgtctggaaaaaagaaagaaagaaggaaaaatatatgggttctgagtatgttatcttcctccagaggaaattttagtgtttttctggcaagtagatcgtgtatgggcacatcacctttattcagttgaggtggtctatttccggtttcccttactcctagggcttagctttttttaggaccttcagttgaaagtttgggagtgtgttggagatgggtctattaaggctcctgttccctggcaggccctgaaatccacattttgttctagcaaaatctctgcttggctttttcccctttagcagcttctttccgtttggtttctcagtccccagtcacacctgtgcagcttaggaattagcaaatgccgggagggaagattgcaagcagaacgttgagttcctgtttctatggaatcttggcccgtagaaagtctgctttgataccattaatgtccagtgtttgttccggatgagactgctgcggagtctagtttatgcctttctatgtggcccagtgtgccttgcatatgaataaggaaatgctctgaggccagaggctgcagggaagccagctcagagcatttgtcagtactctccaatcctggctatttggatccttctggaatgccttcaaaccatttgctctctttgcttgcttgtttctttttggtattttatccagcttgcatagttgttctcagagggcgggtcagcctggtaccttctgctgggccatagctagcagcgtaagmcttggagccctggcacttgaaaccccacactgtccaagcacaacttacccagccttgcctcttcacagccacctgttgtgtccaccctgtgsttagcctagactttccacacaaccttttcttgctgctctctcagtcctgtccattcccatcaaaaatcgaattgttcttcagacctgtacartctccacttctgattcctggcattgtgacccatgagattcttcctctgcagtgaattcatagcaataactgaccggccactgtagcatttcttgatgtattatatcatgtgccttgtatttagctttcatccagttgggggagggyggggatgttgtagtgtacctctttgtaccaagattgatttgctgcatatcttgcaggtgaaagcatgtattgccaatgtagaacccaaccaaacagtggagatcartgagcaagaagcattggaagagaaattggaaaatgtgaaagccattctgcaggcatatcattttacaggttttgtttgtttttttaacctaatttagtctgggtctgcctctagtgagttagtttgctagatgtgttatcagtcctggaattatttcataatttatagtattttacaccctctgccctcatcactcwcacacacacacacacasacacacacacagctgacgtgctatttgtaggcctatcttcacctacaagattgactggcccctttgtacagcagctcagttggtggctggcttattccactcatcttaacagttcktcatgtgccagaccttgtactagaactgtctttactgctggcttgttttctgccactagtgaaatagtttgaactttccaagtctccgtttcaccgtaaatagggatttattctcccatctatgccacaagatagttgtgggaagaactggggactctgacaaattacttcacactcagaaataaagaatagctataaattaaatttttggccttgcttatgcctgtaatcccatcactttgggaggctgaggcaggattacttgagtccaggagttcgagaccagcctgggcaacatagcaagacctcatctctactaaaaatttaaaaatgagccaggtgaggtggcatgcgcttgtggtcccagctgtttgggaggctgagatgggaggatcatttaagcccaggaagttgaggttgcagtgagctgagatcgtgccaccgcactccagcctgggtgacagagtgaaaccctatctcaaaaaaaaaaaaaaaaaaatttctcaatagtttgacatttaggttgttttttcatttttaccattcttccatggttttaacaactcagtctcaaagtgagccggagccaaggggaagaatgagcctatgatactcattgaacaaacatttgtgtacaaagtrtacatattctaggcactgtggaagctactggaggcacagatgagtaagacatcaccttggcctgctgtctattgaggtgtcttcttgtttgcctcaggcctcagtggtaaactgaccagccgaggagtttgtgtctgcatcagtactgcttttgaggggaacctattggattcctattttgtggaccttgtcatacagaaaccactccggatwcatcaccattcagtcccagtcttcattcccctggaagagatagctgcaaaatatttacagaccaacatccagcacttcctgttcagtctctgcgagtacctgaatgcttactctgggaggaagtaccaggcagaccggcttcaggtatctctctgggatgttatatgcctcatccgtgggcccaagatcaacttaaaagggggatgttttttgtattttcagtgtttcctaactgtgagttagaagtttgaccgttacctttccgatgcttgtttcttatttatataaaagcactatcccaccctcttttcttttgaaactctggatggcgttgaagcctgggtactggttaaaggattatgcacccctgaatggtggtcttcaagcttttatcstaagattgtacagagtgcagttgctatacttttgatccatcagggatttatggcgtgcctactatgtaccataccgagtgccttgctgaaccttgggtatagatctcattagagaagaaaggtttctgcagtgccatggaacaatgctgtccatcttcccctaaactctagcctacctttttgggttgcagttgagctaaggttgggtgaaaaaagtagataggaaattaatgcaaataggctgtaagtgcctcctacaagcttagcatttccccctctatggatttggagtaactctgaagctctcagctgtagatttaacttaaattgaaatgtggatgcagtcatgaagcatcttagccgtgtaacgtcagtgaagtttctgcagaaacagtctcttgcgaagctgtacccctggccatttaggcctataggcctttccaggctgccagtgactcttagttatcttaggcatctttttcattagtccttttttcagacctttttctgtccctcatttatttctctgaaatgtaatcgatgggcctctttttggttgacgtaattgaagggtcagtaaacaccacctttggaactgcagtcatcctctacttcgttttgttcctcacccctcttagagtgactttgcagccctcctgactgggcccttgcagagaaacccactgtgtaacttgctgtcatttacttacaaactggatccagggggtcagtccttcccrttctgtgctagattgctgtataaggacctcacagcaactcttcccactgacgtcaccgtgacatgtcaaggtaagaagggtgcctcagtgcagaaattctcatatcccagtttatttgagtgaaacagggaaaataggtagaatccatgaagtagacctcttgagacactttctctgtttatatactntacattactcagaccggtaagatagaacattcttgtttctaccagtcttttccttcctctttgtaaatggtaaacatgattgtccccattttcccttctcctttgcccacccacctcagcagtgttctcgcagcctatgatttgttttcactgggggccctgcttcaggaaagacacctaatgataaggctgagtcatgggtcagttatggtggatggagccagaagactcatttcactgtgaagacaaatggacatgacacgtcagcacacacttaytcctccctacggagcagtctctaaatggaaatccttccagactggctgagagagagattttttggtgaacctgtttcagttaaatgtgacatgggcaataatgaaaaattgggtgaaatgtttttaggaggcagaaattttgaagctgccccagatttcacaccatcggtctttgatttctctgcgcagttagattccaktccccagtctctagattgcattggtccagtaaggggcagccttagtccagaccaaaaaaaaaaaaaaaaaactgtatgggtccagtgggtccagaatatcagtgatccaggttccgattcccccagctgcactgagtgagattgaatrtcagtgatccaggctccgattcccccagctgcactgaatgagattgaatatcagtgatccaggctccgattcccccagctgcactgaatgagattgatggaatctttctttttaggagtggaagtattatccacttcatgggaggagcaacgagcatctcatgaaactctgttctgtacgaagcccttgcatcaagtgtttgcctcatttacaagaaaaggagaaaagttggwtatgagtctggtctcctaatagattgttttcactgcactgggagcacatcagaggtaagtaaccagtactgaagacagtaccaggtgggtagtactgtctgatgaagggtacatcacccttctgatgaaaacagacacctacctgttcatctggatggaagagcaggtttgagtatagacactggcatttttgaacaattcccatgatcacctggtcccttcttaaaatgctcaagatgttttttaaaggtattagttgatcatacattttagttgaaaatcatttgtggggcaataaaagccattttttgaaaaaggtgtatcactcaagaagtacttatggaaaaatatcaaattattgagggcattaacttctgggaaagaccaggcaattaagttgtcacagtaactgctactaatttaatgccaggaatagagatgccaaaaatcctaaaattttcagaaagggctctcacagaaatgtagcactccactcaaactgcaatagcttgattctgttgagaaacactgatctaaataaatggaaaaataacccacattcactaatgaagataataaggaagacccaatatttttttttttwwaaaaggaaagtatttttagcttttatgaaagctttaagtaatttttcctcattttcctgtttgaaacttttgaaaaggaagttcttcagtgtttggttaggcgcagtgtattctaggccactgctttataaatatggtgtgagaaagcagtaggataaaataatcagagttcagtgtgtctcatattttgtttcctaaaagtttagtagagctgtgaatgtactaggaagtcccctctgaaaaagcacagttagttagaaatctgcccatwaactcagggggactcaggcgccccccgggtcttccctctcctgcaggctctccggttagtgtcctgatttgccgtaaccaygggcctctgacctgctggcacctctggttccttggcgtgtgggtcactcacagatatgaaaacctgtgtctggctgaccaggttctcctgtagccctcccttgcccaggcacagataggagtcatgactggcccaaggccacgttcagacttaaccctgcaatggccacgaagtaacctccgtgtgggagagctccaggaacagtgcaggggattaaagccagcttggagtaccctttagaagaaagtttaagaataaaagagacagggccaggcagcaggcgttccggggtacagtgagctatgatgagaccttcaagctcttgccttccaggcctgtggtggggaccagtggcatgagtcagcaaagtaccagcactcctcagataagtgatattaacagaatttccacaatcactttcaagttgaataaagcttttaataaaacagtcttgttctttatcaatacctgtaaattctcttaaagcagtagcaaaggcgactgtagcaagagctcaaaaggcaaggcaatatcggaaagtgtatttaacagaagattaaaaatataaatgtagaagatctgtttatatatttttctttcagaaataaatcccccctcccctgccaggtgaaaggaaatattgcactttctgttctcatgactaaggggacaggagttccagaagaacctttcaagatgatcaggaacaccaggacgagggccgtctcacctcactcggaccacatggagacctcccttcaaaatgggagccatgtcctgccccaccaagcsctgtctgaagtggagcttccccgcctgtgctccctccacagtcccggaaagcccagcggcaaaggcagctttgtcccagctctgccaccctcctgctcacagtggtcagggcccctcaggggcaaggacggcagggattggaacgagggctctggaaggactgttcagccctatgcctaagacccctatgctggggacactacaggcacrcasaggaatagcagggccaccctcagagctcacacatccacgaacaaatgaaggctgaggaggtttctaaacctaaagtccatgagtgtgcacttcaatccaggaaggtcgggacttccttcagtttcaaaaaataaattctcccttccggtttggactgttgcaggctcgaggccattcaggagttgtccaccacctggtggggcagtgtgacagaggggccattggggaaggtggctagcttatcccgccccttcaagaagaaggtcagcagctcccccttccccttcacaaagatggggcctcgcctcacaaagcggaagccgtactctcggaggatgacttgggtttcttctaccacctggagagggagggggagcaagaacgtggcgttacggggggagcctagactgagggcgggtgggggctttgggtggttggagccgagcactgatccatgggtcccaagcagtacgggacactccccaaacctcccagggccaagcccttccacccgtggcgagcagcgggtgggaaggagaaccctggagtgactggctgggggcctcctctcatccagagacttctctcctaggatggccatggtcacctgggtggcagcactgttacctggaaactgccactgcctgctcttctgtccctttgcccctttcgtggagcttttctgccagacgccactgagacagatcacaaggtattagaaggttcatacccaaaggtaggccatatgcatctagaacttcagcccagattttgtggatgggtggaagtgtttcttcctgtgctgaggctagctattgcagagattcttttccacttgccccacgtctctgcctctggacttactgttcagggccagggtgggaggcaggggcacgtgggaaagcactgttccggttttgttctcatgccgagtctgagcacgtgccagctgtgccactggacatacctgaatgttgcccatgacccccgtggactccatcctgctggctacattgactgtattgccccagatgtcgtagtgtggtttccgggctccgatgaccccagccagaaccccgcctttgttcatgcctagggtagaggcataaagttcagcacagccacaggccacaccttgttatgggcctcagaagccatctcctctccagacctgtaccacaaagctcctaatgtaacacatcattgtcctcattcaacttggctgtatgctattggagggtggaaatcacatctcctgtttatccgtgtgcttgttaggtgtcagccgccaccccccccccatatgcagatttactcggcatggtagtggccagcttctaacacagctggtatttcaagtctcctgggacctcactcaggaatgataccccctcagtagaagcagcaggtgatcttaactcctttcaaagagcaggcctgtctgggaagccatgtcctcagcaggcacagcaacccctctggaaatggatcacaaactcacttctcagccaggcaggccaagcttctattgtaacagtaggcacagtatagtcggatcatcacatcagctgggtttttggtttagtcatctagagtcgtctggactaaaggtctttcaggtctccttgccctgtgagtgcgtgaacctccccacccgaattgcctcagttgtcctgagcctcatgtctctcctggtggtgggccaggcccctgcatgggaagggagcctgctgcggggcaggccagctgggggtgctcacctatgcgcagcatgaagttattgaaggactggttgttgatgttggtgagcgtatccttcatggccagcgcgaagtcggccaggtcagccaggtgctgccagcgctctctctcggacttgtcttcctgtgccaggggaccgtggagaaagtgtcaggggccgctcactgcagcagcctgctctgctgccttccctggcagtgttctgggggtggattccctacacctagatgttcaaggccttacttttcctcccacaaaggagtcgcagccacgctagctctgacttgccactgtgacaaagttcacgtagcaggtctaggcaaagactgggcaattgagcagaggagacggacctgtgagtctgaccacgaggcggaccccttcaccttggctgggcctggtcctggtccttaggttttgtcaggttgtccttgtttggatccctcaactaggtgataagcactggagggggatgacccgccttggacgtgtttctttaacctcatccatataatagggccgtgggatggttgtagaggtaaagcaggatgatggtgttttaagaccagagcttgggaccagggctcctacacctaattttctctcctggtagctgaacaaaggtctaaattagcttaacaaaagaacaggctgccgtcagccagagttctgaaggccatgctttcagtttcccttgttgacaattgctctccagttcctatgaaagcacagagccttagggggcctggccacagaacacaaccatcttaggcctgagctgtgaacagcagggggttgtgtgtctgttytgtttctctgcttgccgaactttctcaataaaccctatttcttatttatatttacgtggtgctggtggtgtgtgtctgggaccactttgcacagcagttcttatttcccccatgctaggtctgggctgccaatctcttgccttgggggcagagcctcatctctctggctactggggttagctaccttgttggagctggcaaagccattggtgttgacatcgggggtgactcctgaagccgccatatacgtgctgccaatggttttgatcttggtgatcacccggaacttgggattgtccaggagctgaggccaggattcaggaaagaattgtcagcagtcaagggagaggaatgacccaacccagtgacagatgtacctgtttacaaggaccccactaaacccaagagacactttcctatcaaagttgttacttagtctaccgcttatctgccacatgatcctgggagaacttcctaactttctgggcctgtttccacaacctcaacactgacataaaatcggcagtctcctaggggggctccgcgcgtgtgtaaaagcattctccctggtatacaggtcacccagtcaatgctgaccggctctgaatttgaggagacagtcccaggacagagaggtctcgagatgttgcttggccagtccttatccttatcctgtgaccctgtgggtgatttcccgggctcccacctcacctccccttccccagcccagcagttccaggtggctgcagaagtccatgtattgcggaaggggcttatctgggaaaatgaagccagtttctctggcctctgcagcctattgtaggatgtgatgtggaatgggccggcttcatggccagagtgcagggtgggatgggcactcacagagtcaaaatcygagatgatttcattgaggaaacgcagacactcaataccaccattgttgatgctctcctctgtgtagaagtcagcaaagttgggcagggaggcaaacatgactccaatctcatcatacgtctggctatacagctcctaaaaagaggtgcggacaacgtgctcaaagcatgtccgactgactggatgatgtgttggagaaatgcatctatcttccatgcatgacatgtgcactcagctttttggactcacacatcagtcagattattccagcatttttttttttttttttaagagtgggtcttgctgtgtttcccaggctggagtgcagtggcagtaaacaagcacaattaggtatgatcgaagcacactgcggccttgaacaccaggtatctgggaccacagacacatgtcaccatgcccggctgtagattattccaactctgaataatttaaaaatagctcatcgctacttttttttttttttttttgagagatggagtcttgctgtgtcacccaggctggagttgagtggcacaatctcagctcactgcaacctccacctcctgggttcaagtgagtctcctgtctcagtttcccgagtagctgggacgacaggtgtgcaccaccgcgtccagttaatttttgtattttttagtagagacagggtttcactatttgttgcccaggctggtctcaaactcctgacctcagatgatccacccgcctcggcctcccaaagtgccgggattacaggcgtgagccactgtgcccagccactactttgaataaattttaaaacagcttctctagttcctctaacagccccagctgtgaagacgagggtaccgtagagctgggaaccactctgtttggagaagttcacaggcaacagaaaggtgggctctagccaaagtcttgtcttctgacacatggcctcagagctgtacggcccacatcacgatgcctacagcagtgcactttataagaggccggagaaattcctcttttgcttatttgtgtttgctgtttaggttcagccctacctaggccccagtcccctgtccctgagaaggcctgggcccagcgggggctgcctgaaagaaagaacagatggagacaaatggcctcatggttccgggctgagaccacacccctcacctcatctctcttcttggaccccaggaaatggcgtgccacgtgctcaggcaacatgttggtgaccaaggcctcgttccagcgtcgcatctcatagacacgttccttctggtcgtggacctcaatcttccacaagaaaagtgtccgtgccagtttttctacctrcagacacagacaaggcgaggcatgtgctctaagctggccactggatagaaggatgaaaaacaggaatggccaggcrtggcggttcatgcctgtaatcccagcactttgggaggccgaggcaggcggatcacctgaggtcaggagttcgagaccagcctgaccaacatggtgaaaccctgtctctactaaaaatacaaaaattagccgggcatggtggcgggcacctgtaatcccagctactcgggaggctgaggcaggagaatcaacttgaacccaggaggcagaggttgcagtgagccgagatcgcaccactgcactccagcctgggcaaaagagtgagactcagtctcaaaaaaagaagaaaaacaggaacgtgaatggaggaactccccttggaaaggctggaaggaagatggctaaatggcaagggaagtaagaccctgcaaagattgcacctcatcaaaaggccacccaatagtggtgcggttcccagcctccgtagttacagcagagatccaggaggccttccgtgtgtagggggcctcttgggacctaatttcagctgcaggtctgtctcgtggaggtggcagcagtggggatctcccaactcagggtggagtccccctttctagcaggcgccatttgggtaagaagtggcttgggaaggctgtacttccctggaaagccagtagggggcacttgaactaacattgggccctaagtacagaggatctttctcttccctctcttccttctcttttccttttttgtccggttgagtgcggtggttgtggcggggtggggggggtgtctcactttgtcacccaggctggagtgcagtggtgtgatctcagcttactacagcctcaacctcctagattcaagcaatcctcctgcctcagcctctcaagtagctgggattacaggtgcgggccaccatgcctggctaatttttgtattttttagtagagacagggtttcaccatattgcccaggctggtctcagactcctggactcaagtgatcctccaccctcagcctcccaaaatgagccactgcaccggccttctcttttccttttaacccaacagaaagtccatcagctcccttctctttctcttctggctctgtggtcagttgtgttaatgtccctcagcgccacggggagtgcgggggccatgagcccctggcctaggggatattgatttgattcaagatgtttgtgccttcactctatcccctcccaccttcactcccatgcttccttcaccatcctggagggggtcggacggaagaggtgaggaactgtcttcctgtgtgactgaggaaggagcctgaatagagaaggcggtggcctgaccaggctcacgtgtggggctgggtgaagggaagcccc

SEQ ID NO: 93931 - DNA, 15534 bp, Homo sapiens
  misc_feature (1)...(15534): n = A,T,C or G
agctgtgagtgtggcatgagatacaccctattttcctggcccaaagacttccctgaacattttccactgggaacattttccactaaatgatcccttcaaatgcacagtggctcctcctctccctgtctgcccagaggttgccctgagcaactcagtccctcctctgccctatttctatttttttttttttttgagacagagtctcactgtgtcacccaggctggagtgcagtggcgtgatctcggctcactgcaacctccgtctcctgggttcaagcgagtcgcctgcttcagcctcccatgtagctgggactacaggcgcgtgccaccacgcccggctaattttttatttttatagagatggggcttcacttcattggccaggctggtcttgaactcctgacctcgtgatctgcccgcctcggcttcccaaagtgctgggattacaggcgtgagccactgtgcctgccccctttctagctcaatctggccccctcctctgccccctttctagctcaatctggcacctgggaggtttgcagagatggaaacggagattacctggttggctgtgcgtacaaagaagggcaggggcacgggggtatccgctgagctagggcacagctcttctgacatatctgccaggctgtcccggaaaccaccccctgaaatgacagatgccctcagctgggcactcaagagcccagctcccataatggggtaatgaataggtcccccatcatcattagctggtgaaaagcctctaccactttgatagggcagcaagcaggacccttgagatcctccctcagggcctcaccttggtcaatgatgccttctgcaataaatttacactcccaccactggtcatagcgcatgggccacctgcaaaaaacgtgggcagatttgtcattatgtggggccaggtgcagcacaattcatcagctcagagaccacctgggaaaagcagtcatggcgaggggtgcctcgagcagttgtgtgtgtgtgtgtgtgtgtgtgtgtttgtgtgtgtttgtgtgcacaaacaggtgtcccgagtaagtccctcactctcatgccatacctgtagtccaggggcttttcatatttgtcagagggcttgaggccttcatatacctggaggcaaggaggaaaggagtcataggaaagcaagacctggccctatacttgccccaagaacttgttcaggtccctcttggcctagcccccttggcccttgactgatcctatctcagtcggaccctaggtggtgcagacctgggtgaagactgcattcttgcaggcagggtctcgagaggggcaggcacggtgttccatggcaagacggcggttgatgtataggcgtggcatgaagctgggcttgctgctctcagagtcacgcaggcactgagccaccaggcctggccgctggcgggacagcagtaggaactgcttcacttgctagtgaggagaggtggccagagcaggaatgagtgggcagtcagcctcygtccaggccctggaactttcccctctgcctgtatccaattccaccgtttcagttcaagtctagtccatccctgtccttgtctccagtcccctccttagttcagccaccagggagagctttctaaaacaaaaaaatctaatactgtcattaccttccttacctttccaacagctccactaccctgggacaaagtccttgcttcacagcctggcccacagggccctctgcaaccaggacctgtctcctgcccacatcctccaccctcatccctctgtcatactcacacctactggcacacttttctcaagacatcttgagctgctggtaactccctgtatgtacctttcacgcaaactgccctgcctgtgctgtcaatagcccttgggtattccacacactctggaataccaaggaggctggggaacagcctcccaaacactaaatttggaccatttgttctggctttcttcctatgttcccagacccagcaaaggtcttgccctagagtagattttaggaactctgctaaggaatgaacaactacgtgagcaggaaggggaaatgccaagaccagcactggctgggtcggctcaccttaatctcactgaaggtgcccagtgtgtggtcccaggcaggtaccaggtggtgcaggacactatcgaggatcttgatgaatctggcatgggtagayagactgcagctaaagagtttagcatacctgtaacacccccaactccccaacataaagggacaggaaaaggcaggacctgggggcttctctgacccttgaacagcttatactatgagaccttgggaacctcctccatgcagacacacaaggctcaatgttgggggaagggaagggcccataggtccaggaccacagccacctctgcaggaggacagctctgcggtacagtacttcagggtcggtgccttctaggcgtggatatcgcaccagactagttggctggaacaggtctgcattcaaccctagttcccgctgtctagatgacttgatcttgacccctcggagacgaacatcaatcccatcatctgggggaaggggtcagagtaaggtcatttacagcacctgctgcctccttggccctcagacctgggaccggctccttgaacgctcagccttgtgtcaccgttagcccctagaaactcgggaccttcgggatcaccttctatcacctgattctgattgatctattcctgctgattcctctgtcttccactagaatgctgggatgcctgagggtcccaactcagttcctcttccaggtgagcccaaccacctgtatggctttaaggcaggcctatacctggcatgtcccagctggctcaggccccaaagctccaaatcctggagttagttcagcatcgccttcaccccaactccaagcccatcctcttctctccacactcactgtctgtttgcccccatctccacgccgggctctctttccctccttatagccttaaacctcacctcggcactccacgatgcggatctcgatgatcgggaggtggacggtcatgtcctccaggacacagacatccccgatgagggtcctgaggagatgagtgtgaagcacttcagatacctcctgcctcaggccttcagagactgctggagtctcactcaaacttaggctttcaagctgggctaggcttggaacatgccctacttccctccccaggccagcgtgctcactcgtcaatgctcacgtcactcagcttcttcaggttgtccccttcacccccatagaccaccacccgctttggcataaagttgtcatctgtggtatccactgtgagtagcagcttcctgaagggtcagagtgtgaatatgagtctttgtgaacccacagggacatagcccacccaccctgtcctgcccagagcctacttacttgacaatggtgcccttcttcatagtaagccgtacccartgttggcactgggacccatcgctctcccagtaggtatcggcattgctgtctgtcaggcaggacacgttgaactcctcctggggaggggcagagacgtgaagtcagcagttaccctccctccctgcactgggcttgtgctctgggccaggagcaccagagagaaagcatagtgaagttgggctaacaggcaactggtatgggatagggggccgctgggtatgtaaggggtcctatagacgtccaagatggggagctgaactgagtgtggcctgtggggaccctgttttggtcctggcctgcaggtgggggttctttctggatctagccttgaggggtgtgactatatcttgcctggggtgggaggagccccagcacccaccgtgtaggaggaaacgtctatgctctccacatactgcttcacgctacccaggttctcatcctccttgcccaggtggtcatacaagaagtggatcaggtcctcgtcgcactcgtaggtccatgtcgggggtacatagctaagcaaccccaagcccctaattagactgggcccaracgcagagctccttcctccccaccccattccagctcactcacagtagcctttgtacagcttctgcgtatgcctctgccggctgaggtctcgatcccaggcgatgtgagtatgtcaggtccaccacctgttcccacctgtgggcacagagtagggagtgggatggggagacatcagcggtcagcaagacactacctccatgccgtgtagccttcttcagggctctatctcccagtctccatccgagcccccttcacgtcccgcccctttctgctcttaaccctgcctccgctccagtatcccacccaccccaggctgtggctgaagtgttcccaagccctcctggcccggccttctgacagccagccccgctccttcaagtgcagtacctgagcaccggccgataatccacgccaaagagctgctgctgccgctggaggtggttgggagtgtcgatgggtaccaggcgggctccgccctccgccgggcggcacaccagcagccagccttcctgcagcccgcagtcgcccaggtgctctgccagctgctcctgccgggacgcgtaggatggggacagccgtcagggaactgcccagccgcctgtcgtgcccagcccagggcaaagggcgccgaacgcaatgccaactcaatacaggggagraaaggcaaacagccagaggtttctctggccccaggggtcttttaccgggtcctgggcagggaagagcgcacctttgtcagcttcacccagagcccgtggccattgcacagctcctcgcccgtggtgcgcacgcaggcgccgcgccggagctcaatgctgtcgcgggcggcgcgraggggcccggagccggtaccgggggctgggcctgcggcgcccacacgcagccccaggccctctgcctcccacaccggcagaagcacgcgcgacggtcccgctgggtccttgtaaagcttgtagagcacctctcgcggcacgaaagccagcgctgctggcagcggccgcccggcgcggaggctccgcgctgcctctgccaagaagcgcacgcggcccagcagctgccgggggractccagcaccgcgcccgggccaggacccgccatggcgaagtggcggaggtgagcacctagaggcgaccctgcccggggaacagctggcgcgaccgcggacagagcttcccaccacgcccttccccgcctttggccagcctttgccgtatgttctggactaagcgcaccccagctctcactgtattggactgtgtactcccacactcaaccatattacttatctctgtgccaccctaacccagccgaccaaacccaagattggtgattgctacctgatcaatctccctctctccatttccttgtgactaccattttatctctactgctactaccctcattcaagtcaccattctagctagcctgggtcattgccaacagtcatttttctggttcttcggcctgctgtttttcctcccactcccagcgaatctgctggactccctatcctatgggtggtgtgattaaagtgtttgagacaatggccccttcccctgccactgacaggagtcttgagtcattagggttgattctgtttgtcactcctaatcccaaggacactggagatcattattcattttaatgtgattgctgatttctgtttccccagtcttgtagctccttaaaggctggggctgtcttgagcagagctaacctctgcacctactataggtccaggctatagtatggacctggctggataagactgttggtatcatgagtgggacttgmgccaagcctccggatacccagactgtcagatgagaacaaattcctcatgacaccgtaagatacatttacagcggagttttcttttgggcctttgttgttkcgtcgctacagcaaactttacggtgaaaaaaggtaggggtcctacgggcagcagccagggcagccctggagctgtcgckggagtccgatcatgtgatcttcaacatggcgacgctcttggttccctacagaaaggggcggagcctggactggggggcaggctcagattcaggttaaattgtggattgagctcgcagttacagacagctgaccatggaagcgaatgggttggggtgagttctccagagcacgcggtgtggctagccgggcttctaatttgagtcttccaactcaggactctatccctctactcccctttccccaccctggagacctcccaacctgaactccgttagctgggatcctgaatcctaaaaccatggatttttgagatgttcatcccagggccttaattcaagggatgcctcaggatttccaaccaggatctctattctgggaccatcaactctgatccctctttatcccccagcctgggtatttctcagcccctgaaccagcccagtgacattcccgtttctgaggctcactagttcgaagacccccaaactatccttagtgggccttcattccctccccccagtccctctggttgcttcgagcttggaagagtagagactaagtggagggaagaggccccagggcgggcccttctggagtttgtgcaccacctgataggcagagaggaggyggaacgggcggaaagccagggtttgggagctggcctggaggaggtagatagcggtcctggactgaatcggccttatgaacccgcgctttccccagcctccagcgtagcatactgacacctacccccacccccacctgatcgccagacctcagggttttccggagctgaagaatgacacattcctgcgagcagcytgggragaggaaacagactacactcccgtttggtgcatgcgccrggcaggccgttacttaccaggtaagagtcagggtctggaaatctagataaaactccggagggagaaaagttttcgaggggcaggggagggctctggagggcctcaaggctgagccctgtcttccctctgtatgcagagtttagggaaacccgggctgcccaggactttttcagcacgtgtcgctctcctgaggcctgctgtgaactgactctgcaggtgaggggtccacaaaagagggaaagatttatgccttcagtctgccacctagcaacctgtctcctgtttcctacagccactgcgtcgcttccctctggatgctgccatcattttctccgacatccttgttgtaccccaggtacccactcaaacctgatcctagaatataatccaaggacgccttgaaaatccttctatcagtccagtcaaggtttacaataagcacttatcctaactggatcgagggaaaaactaaggttgaaagaaatggagtttggcagagttttattctccttttccttcctcctggaatgagctgaacagaacctttcctcctggattccattttgggaacccagatgttttctccccctccaggcactgggcatggaggtgaccatggtacctggcaaaggacccagcttcccagagccattaagagaagagcaggacctagaacgcctacgggatccagaagtggtagcctctgagctaggctatgtgttccaagccatcacccttaccyracaacsactggctggacgtgtgccrctgattggctttgctgrtgccccagtaatgtgggacagggcagggactcggggcgcgggsagatcactctggaaggtctggggtagacaaaaggaagggtcagtctggcttctgtgacaccatctttctatccttctctagtrgacccwgatgacatacakggttgagggtggtggctcaagcaccatggctcaggccaagcgctggctctatcagagacctcaggctagtcaccagctgcttcscatcytcactgatgctctggtcccrtatctggtaggayaagtggtggctggtgcccaggtgagtcctgagagagagagaaataggctkggatttggtctgtaaggaccagaagcaagagtgtcctaaacctgagagggcaggggtcttaatgccagggatgaaagaaccttggcctccagtgatctagckgagcagccaagcccatcctgacactgacagtggggcttaatgctctaagtattcagacaccaaagttagtgctgggatctgaggaaagtaaatttttttttttttaattactgggtttttagggtcaggcagtatcagggattgaagtcatttggggaaaattgaggtggattttgtatgtgggggaaacttcctctttgtgtgttacatatttttcttcaccataccctaactaggcattgcagcwgtttragtyccatgcagggcatcttggcccacagctcttmaacaagyttgcactgycttacatccgtgatgtggccaagcaagtgaaggccaggttgcgggaggcaggccwggcaccagtgcccatggtgaggattgggatgggttgagtgaaggtggtcctgtggagctttcaggctaagtcctgcatggactggagtgaccactggagggcagcagaagtacagtcaagaaagattagtggttgtagcaaggccctctgtagnctgagatctgcttttttctagatcayctttgctaaggatgggcatttwgccctggaggagctggcccaagctggctatgaggtggttgggcttgactggacagtggccccaaagaaagccsggtaagccatggaagggtgaggccttgaggttgaggtgggggtgttggctgggggagctgccatgtatgcagttaccagaacgtggcgctggctttgcttccagggagtgtgtggggaagacggtgacattgcagggcaacctggacccctgtgccttgtrtgcatctgaggtaacagccagggcccctctgtgtgtctgttactgtgcactcctgtggctgtggttgtattattctgtgtgcacttgtttttaatgtctgtctgtccttttcttctactctgtacaacataagccctagaaagaccggactttttgttgcngttgttcatttgtgtttatgcttcatgcctgggtccatactagggatctgataaattttattgaatgactgaataacactgagtagaagcatgcctacatatgcgtttgtcactagtatatatagggaggacaaaggcttgctggtcctcctgtagccagtgccctgttggtcccccaggaggagatcrggcagttggtgaagcagatgctggatgactttggaccacatcrctacaytgccaacytgggccatgggctttatcctgacatggacccagaacatgtgggsgcctttgtggatgctgtgcataaacactcacgtctgcttcgacagaactgasygtatmcctttaccctcaagtaccactaacacagatgattgatcktttccaggacaataaaagtttcgragttgaactattgtgtagttttgtttgtgaaagattgtgcccatatcctcagttcttcttagcctctgctccttccctgggaaccctctctatatcctcttcacaagtcatgggggttaggtatcagtgaatatgtactatagcacttaaggattctcattcccatcttactctcagatacctaagtcccagaactacatggggtagggtagagctttcctagcagttcaggttgtgacatttgcagaaaaacgggtggggtcctcacaacatacaaaggccaaattgatagggctttatgtctggggaggaagggaagtatacatcaaaaaggggcacagaaggggttagaacacttcagagaggcatggggaagaagatggagtctaggcaagcagggagaagctgagggaccctcagctttgacaccaaaatatatagaggacatgaaagctcagagctaggttgcttaggattggagctttagacaagtcgatcatcaccaaagcaagaagtcctctgaaaccaaaagaccctctggcaactcaaggttgctttatattcttttctgagcatcccctttaattttctcaagatcttggttattccacccttcctggtggtacctgcttcccaggacaaggctctgaggtgtctgtaagccctggggaagggtctggtatggcaagaaattctttatctgtcagtcattctgcatctccttagaccactaggcacccactgtgctgtaggctgaaccagctccctggcccagccagggcaatgcagaaaggagagatgggtttcatttagtgagagaacacaatttctgcttttagaaaaatgatcttttatgtgatccatgatttattcatagaaaagcactgtgaattcacacacttgctaaaaaagggcaactgtgatacagaaatgagagtggcttctctcttttttttaaccaacccattgggctgagacgtaggggcccttggctggacagtaagacttgagtagccacaaatggcaaatacaacttcttggtcagtttggagtaaaaaaggtgacagtttgtcgaagaaagaaaaagtaaagcagatggagaagttcttagttcacattctagctataccaccccttccctatcaaaccccacccccaactcaggaactaagacatgaaacagtaaacaccaagacactggttccaactgacttttctgagtgcccttgctacctcctataacaattccaggctgagcacaggggtcaggaaggtagcaggaacatgatacactatggaggtcagccagggctaagacaggactgcccactagggctagaaattaggaagggagaggctaagtgcagaccagccctagcctccaagtcagcgagcaatgagactgtgacaaaagccggcgaggaagcttgaggtagaaaggcaggggaagaaagcaagtatgaggcgagaagagaactatggagctaaagcagccaatctgatggcagagggagattggtgcttagaagcttgtttggtgagagaatgaatagaggaggcacagagatggggaacaaacgtttagctggcgagagagatttaagaggaatgggaaagagaaatctggcaaaaaggacacattgatgcagatcctcaaacatgaatacacagacatccctacatgtagaaatacgctcagttacacatataaagacacagatgcatggataacaagcatacacatggatacaaacatgtttatacacatgcactcgtgtacgcagatacacatactaaacatgcacaaacatgagtgcatttgcacaaagatgtgcatcctcacatgtacacaaaatgtgtatatcctcacgtagaaactcacagtccagtgtgcacatattcaaacaggtacacagccatagaactgacacatacacataaatatatatgtgcacaaacaggcatgcacagatgtatctatgtacatacacacatgtacttagccataaagatacacacacacaattatagatgaaaccacacacttgctaacacaaaggtgaccacagtagatgaatattatgaactcagcggcttcccagaccttcatcttctccctgcacttgtttctcaggtgttcagcaggctcctgaagaggctgtgtgaggcaggagcttcaatgtcctcacagttttgtgaggcaaaagtctaagtccagtcctggcctctgtccctcactcaccactggactataaatgccctgtctgtaggtgggggattctgcatagactagacttgggttgatcctaactggccatttttctccttggcacccccactcttccactgctaccagcaaacactctgcaagggaaacctgagaaatggttgtgagtctcctcagaaaataagcatatcctcctacccacagctacttcaagtgcccatcaaatcagaagcagaattataaatagttacaagtttacaataattagcaacacatatagtatttacagtcccacaaatgtgtctgtttctctggttaagcaatccctgagatggaacagtgttctgtgtttgccaagggagacagggccaatgctcaggacacgcaggatataggggcatgaggtggcatgttgtggggtttctggtcgatctgcagggcccagctcctccatgaacagtaggctgtagtcagaagcttgccaaggtaggcattatcgactagagctggactttccccatccttagccctgtggtcctttggcctcatccacaggtgctcagagttctctcagggtggacaaatgtttcagtgcccttggcctgacctgatactacctgggaacccaggctgctctggcagtgagctatctgctctctcagccaaagcgctctcgcaccagcagcatcaactttttcttgcctttgtagatctgtttgaggttgtcgatgaactgggcaaactgcaggtggccatcctggggcagcaggaaggtctcccgagccttgcttagaaactcaatgaactctccatagtggcgagggctgatgtgtgttaggcgtgagtgtgtagtgttgatataggcattgatggtggcatccagcaactggcgcaatggagctttgtcagtggacatgagctttccagagcttcggcggcctgggatgccggccaggccaggtgcagtcactgtgcagcgtcgtaagatgtctgaaagcactgtggcacagtgcacactcttcaccaccagggggatgagagctgccagctcattcttgcccagagagtggctgagagcacaagcccagagcacatcattgatggctgggtgagtatcctggttgtaggccaggttaagatggctcatggccaatgaggccagcttgaaggcacgtagcgggtagccayggagctccatgtagcgggcgatggtgaacagctgtgaatgggtcataccaccagcagcagcatcaatggcaatctggtaggctgcctcaaaggcaatgtggtctttctcacagagtgtaagggctgacagggcacagctctgtggatccttcatagcacactgtagagccagtgtgcgagcacagctrgccagttcctcccgctgtggatagtcaagactgaggcgcaggatagtggtgtgggatacggctgtggcagctacaatrctagtagcctcagtaggggtgaagagtgtgtaccagctctgcaagatgctcaccagggcccgcacacctgtcagggggagcctgagctcagccgtggccatctgggtcctgattcaggtcracccagattaccatttggggtttgaacttggcctgcagagatgaattcttcctcctcagcaaccttgagaygatatgaggcaaaccagggcaaggggagcatcccagatggccagaccctgtttggggtctcttcctatcccttctttccccaggtcagagagttgaaggtttctgcaggtgctcttagcccctcacaaggatgggacagtagagcctggggtttgcttgccctgaggcatgggttacagatctgccaggggttctagctgaagtggggcctctcagggtagagtcttgtgctggggctttgggctttagaaagggtcctgagcctctaagttgtctggagttttttacaagcatgcacagggatggggaccaaaccactgggcccactacctcccaagggagcacttgagtagcaactgaaaattcattctcttagacatgtctctgttgagaggatcaagggctgctgacatcaggatatggttcaagcagtgaagacagggcttgggctggctgaacagaggccaccttctcctaccagcagccccatcctttcttaggccatctcctgatggacctaagatctcataggaatatgagagctctaaggattgattgtcctgtcccaagagtagggcctagaaactcctttcccctgggggtagagggaggtgggagactcacccacttctgtagcacaggtcaccaaccatcgtaccatctccctgcgtctccagttaagggttgataaggtcatccgcatcacctgggcacaaaagaggcctttccagtgggctatgcctaactgttgtgacctctccctccccttgcattcatttatgcgacaaatattttctggtgctttaaacagtggtctctccgctgataaacataaaatacagttaatttctttcccagccctcccaccaatcagataggaagcttctctgatgatctgcagcaaagtccttattatcataccttgcttgacttgtagaaatggggaggtagagagaagatagggaccccagggagcctaaagctttatcttgcttctggccttaacttaaaagtggagcccaatttatgaaatccttgccttttccctagcctagaacttgtgttctgggcccaaaggaagagccagacttggcctatgcccagtctcccagagatcttatcttctgccaactgtcactaggtcagcggtctaaactgtggatggcctactcttcctccatacctgtaacccaagttccagggcaacgttgagcagggtgctgtcagtactactgtcggtgggagtagcaatcttgaatgcatcttgggccagtttgaagatgagggaggaagaatgaatgtgcttctgtattgcttccagaattgttcggagtctcaaagtgtctcctataggtgtcaagagaaggggcagggtctattttaaagttttactaaacagtcagctgactgcaatagatactcattgaaatggctgctatcaattcattgaatgcttctgaatgctaccgccccttctgggttatcgagctgtctccactaatcacatttgaggctccttccttccccagacccccatgtgaatcctattctctccaccttttcatctgtctctacctaataccctctaccctcaggatcctttttttttttggagacggagtcttgctctgttgcccaggcaggagtgcagtggcttgatctcggctcactgcaagctctgcctcccgggttcacaccattctcctgcctcagcctcctgagtagctgggactacgggcgcccgccaccacgcccggttaattttttgtatttttagtagagatggggtttcaccgtgttagccaggatggtctcgatctctgaccctatgatctactgcgccgggcaaccctcaggatctttaggtaccagaaataattttcttgaacacctgaatttccagagctacttatacagtagacagaaagtcacattactgccaaaaaagaacggcagtcccactgtctgcttctcactacagcaccctggggcaaaaaggagcggggccaccacttcttattcaataggcagggattctatacaaaaaacaaagagttaaggaatataacatcatatgaggtgaaggttgctggatgaaggcagtagtgtatgaaagactgttatatcttataaaggagaaatacattaagtaaagataaaacaaaaagtaggccttatgttttgctttgtaactgctgataaagtcaaagagaaggaatggtatgacta

SEQ ID NO: 93932 - DNA, 18470 bp, Homo sapiens
agtaccagcacgtggttacaaggtcaagctcccaaggacataaaacaagatgagaggaaaacttcatccagttttttttgttgttgtttcagggacctgtagcaaagtttgttactgaccagcttgctgggccatcttgaacagagggcttataggatcctaggcctgtattctatcctaaggtaccgttctcccttatagaacaacacagaaatacaattcatagcacgaagtacatcagattttctacagcctcagactagtctcatgaatcctttttcccactaatcaaaacccacaaaacataggcattagccactctgcttagcacccattgtcaacctggcaaggctcaaacttgcctccagttggaccctgtcatctctgatccactcaaagtggattgaaggagttccaatatgtggtctctgggcaaggtagtcgccctaagtaacagaaaggataagtaagggaaaggaggccaggcgcagtggctcacgcctgtaataccagcactttgggaggccaaggcaggcagctcacttgaaatcaggagttcataccagcctggccaacatggtgaaaccccatcttactaaaaatacaaaaattagccggatgtggtggcacacacatgtaatccagctacctgggaggttgaggctggagaattgcttgaacctgggaggcggaggttgcagtgagcagaaatcacagcactgcactccagcctgggtgacagaggaagactctgtcgaaagataaagaaagagagaaagacagaaagagagagagagagagaaaggcaggaaggcaggaaagagggagggagggaaggaaggagagagaaagggagaaaagcattgcctacagcagggaagggaaggtgaggagctcagggaggccagagaaagacctatccattgcagagaccctgaatcaaaagctcaggcggttgctggtcggtagtgaggggatctttccagcagtcctatcagcattcaggtttccccttttagggataaaaaaaaaaaggttcccgtgtccagtgatcctgtacatgcctaatcctgtcacccatagcagtcaacaaagagtacaagacagattaatcaaaaaagaatagtggttaatatcccataatgccaaatccatttttaaccaagagggactttactgagaggggcctctaaccccctaaatcttaggaaggactctaaccctcctaagttgggcttcgaacccaagtttggccaagcgcccttgccttttattaagaggggtcttttacccactctgtcttaggagagaatttgtcctaaatcgagcctgtaacccaatcccatcctttacccaggtaccccaccacttacccaaagtcatccaatcagtgctgcagtctatttcctttgggtgaggtgtctccacagtatcatcccttcatggttgccaggaagatgttaccagaaaggggtcctgatccagaccccaagagagggttcttggatctctcacaagaagtaattcagggtgagttcatggagtaaagtgaaaacaagtttattaagaaagtaaagagataaagaatggctactttatagacagagcaaaaaaatatatatactgattatcaaatacatttctgttacattcgaattagagacaagttctgtttagaaataaccccatctgcctcaacctcccgagtagctgccactaggcacgtgccaccacgcccagctaatttttttatttttagtagagacagagtttcaccatgttggccaggctggtctcaaattcctgacctcaaatgatccacctgcctcagcctcccaaagtgctgggattacaggcattagccaccatgcctggcccctgaggtggaacagtttcatcccaaaaccatccccatctgccagccccctccccacctcccacctctcactcccatcagtggagtgccaaagcacaagttactgtgaattacttttggaggtcttcccaactcttcaatcacatttttaatctgtaagaaaattattgggtttgtgccgtttctatagaagatgaattttatacattacattttgatttttctgaatttcatttataaaagaaaacttgcacttgaatgttggggcttcccatataaccacacttgattatagtgaatgttttcataatagcatttatagccttgtattttattcaagataaagtttttgagattacccaaataagtcatgcttctttaaaaatgttttaaaattccaaaatatatcaaacatgaaaatcccttccatacttcctctccactctctagagataatcattgctaatacttgagtgtacacattttcaagtatttacctatccttattgttgacagagatcatgctcactgttgaaaaagtttttaatgtttgaggatatttttgtctatggagagaacaccccacaaatattcatgttttgtttaatgctcaatttattaaacatatactgtatacaacattttgaaacttttttaatattcaaagattgattacaaacttcattaaattcctttccatttaaactgtaattacaaatttaatatgattcttttgaatgtactttttttttttgtttttgagacggagtcttgctcagtcgcccaggctggagtgcagtggtgcgatctcggcttactgcaagctccaccttccgggttcatgccattctcctgcctcagcctcccaagtagtcgggactacaggtgtctgccaccatgcctggctaattttttgtattttcagtagagacggggtttcaccgtgttagccaggatggtctccatctcctgacctcgtgatccgcccgccttattctcccaaagtgctgggattacaggcgtgagccaccgcgcccagcctgaatatactttttaaagtacacaaaataaacacaaatgcaatgattacaggacttactataattatccttatatctatcttaaaacaccaacatgatggatttattacttcattggtttttatttgtgtttttccctaggtataagatactttcttatttgctaaactatttcttttgatgtttccttgtgttactaaaatcttatcagaccctacccccacccaaatcacctaatatcctcaatcctcagatcaaccaaggctatagacttgggcttctcagcagattacttcggggttggggctctgatgcttgtagtttctctcaaagagctatctttttttataagattgtgctacctcagcacccttactttttagcaacatcggtatgttccgggcttatcttgtgttttacctgcccccaaacacagaatcagccaccctccaagagcccaggtttttttttttagtggagaattatattatagaccaaaatctaggctctaaggaattgacgatgataaaaaggaccttgttgctattgggcacctcttagtagtgatagagctgtaagagggctaatgttcctactatataaatagttcctacaaataaataagaagatgaccaaggccggatgtggtggcccatacctgtaattccagtgctttgggaggctgaggcaggaggattgtttaaggtcagggattcaagaccatcctgctcaacagagcaagaccctgtctctactaaaaaaaaattttgtaattagctaggtatggtggcatatacatctgtagtccttgctacttgggaggctgaaggaggaggatcacttgaacccaggagtttgagctataattgtacccctgcactccagtgacacggcaagatcttgtctcaaaaaaaaagaagaaaaagaaaaagaaaatgcccaaagcccaatggataaatggaatagccagttcacacagaaggaaatacaaatttcctacaatataaaaagatgctcaatcttacttataataagggcagtgcaaattaaaattaaaaccagggtaccacttttcacctatttgattggctaaggtaataatggttattaacacaccattggcaagagtgagaaagaacaggcattctcatacacagtccactactgaagtataaactggtacaacttcctgtggagggcaatttctgccaaaattagatatgcttttggtccagaaattccatctctaggattttgttctacagatatgctttcatatgagaaatgctgtatacactggtttatttctttcagcattttttcatagttacaaaagattgctaagaacctaagtgtccacttacaacagattagtagaatttattacgctacagcaaaacgatggcagccttaacgaagaacaaggaagctctttatgtgcgggtatggaatgacctgacttatgttgcaatatggaaaaagtaaggtgcagaagaatgtgtaaggaatatgctaaaatgtgcaggaaaaggaccaaaaataggcagtgtttgctcagtaatagtagtgcacagagaagactggtaacagtgattgctaggggtggagaaactgggtggcttggggccaagaggagggagaaactagtgaataccacgttgtatcttctgaattttgaatcatgtgatgtacttcctactaaaaaaattatgcaaaccagaaaaagtgcatcagacacatattttcataaactttatttgtcttaccaggctgactgcagtccatgccttggagtttattttactattcccctattgtttacattgccggagagttatttgtttagctgtgtctctcccaagggaaggatttatttatcatgaagttttcagctcaatgtgttttggcaaacactgattgacacccacaagccctgatactgtgctaaatccaggggaaacaaaagtgagagtcctgctgggtgtgtagtccctgcctaggacaaactcgcattagtgggggatacagacatacaaacaaaagatcacagcgcaggattaagtgtgcaacaatagaagtgtgcacaaagagaaaagtggtagaaaggaaagctgaccagctctggtgaggtgacaggggtggaataaccaggaaagacttagctgaaaaactggaatcagggtttagaaggatgaataggcttacccaggagcaggttctttgagggaaagacgcgtgggttccagggaacacatggctccagcccaaagtgaagcagcagaagatgccctggtgcagtgggatgaggggcaaggaggtctggtcgggttagcaagggcattgaatgcccccaaatttggatttttattccgcaggcaatagggaggcagaggcgtttacattcaaaaggaatgaatcccagagcctggcacagggaaggcaagtaagcaaagttggtccaatgaattcagtggccttaatgtgtcttcctcaaatgtcactgaagactgggtctcctctcccacttcaccccctcctgtagcccaacttgtgagacrcgcgcgcacacgcgcacgtttagatggagggggatttcctagccatccaggcttgcctgaaactccatcttacactggtgcataactcctgcccccacctcacctgcctcctgtacgaggcgttgattccttcttcctgcgtattttctgtccaaatccttttctgcttctcccaccaatcaaagtaatggtttccactccctgcttccgccgggactcctttttggcatggggctgagttctgctccttggagctccagcgggtagctcctggaagccccagcgggtagccaggcggagttggttggagacctgccacccactttctgaccccaagcgaattctgagagggcagggtctcaggctcagcgagttagctcgtccacccttcttccccaccagaaggagcgaaacgtctttgagcaagattggtctctactgcgtccgggtgtccaccggggcctcaccctgtgccagctccaacaactaggtgcagctgtggccccacggtggctgagcctcctctgtctcccgcgggaagtagaattcaaggttcaagtaccggagcacctggggccgctgctgtttgggaaactgcgcaaacggcatctccttctggacgcctcctggttctgcaactggatctccgtgcagggccccggatccggtgaggaagtgaagttcccttgttacctctgggtggagggcaacggcgtcctgagcgtaccggaaggcactggtgagagcggggctgaaagcgtgaaagtgtgaagaggcgtctggagtgcaagagaagctggggtgcatgcggatgtggaggatgggggtgctggaacctggagcgcaggggtctttggaggttgttgaagaagcggttgcgggagctggcacagagtggcgtggaggctgggggtggggcgtggtgccgaaggggcaggggccacacagaaggacagggtgatgaagctctcttggcagggacgagaagaggctctcagaaaaagccattgcccaatccctcctctctactgcactctactctaggctgcactgtggccgaggactctcaaggcctgttcaagaaacacagggaaggccgggcgcggtggctcacaactgtaatcccagcactttgggaggcccagacgagcggatcaaaaggtcaggagatcgagaccatcttggctaacacagtgaaaccccgtctctactaaaaatacaaaaaaattagccgggtgcggtggcgggcacctgtagtcccagctacttgggaggctgaggcaggagaatggtgtgaacccaggaggcagagcttgcagtgagccgagatcgtgccactgcaccctagcctgggcgactgagcaagactccatctcaaaaaaaaaaaaagaaaagaaaagaaaataaagaaagaaacacagggaagaggagctggaagagagaaggaagctgtaccggtgaccccctactccccagaccccatgtgaactgctgcttccagcacccgtgtctgatttcattcttccccactggtggggaaactggaaggatgggttaattctgaatgtggctggggccaaactatgtgatctcctgtgcatgagcgatttctggaagacaagagagttgactttgaggctttgctggccaatgggtgacagcaaggggaggctgggtgggaggggggtgctctggtctagtggaagccaaggggcttataggctgcactgtgctggatcagcccaagataggtgcctgtggttgtaatgttggagtctcaaaatatgctcaaaccctttgccccaaccttccttgaagcctggccgacctcgctatcaaagactctaaatgttctgacttgttggaacaatctggatgacttcaaccggattttctagtgtggccagggcaagctagctgatcagaccccctaccccaatactcctcccaggactcttactccagctcccacccaatccaggggaattgaaagaaccagggtggggagaccagagacttgggtccctctggtgggctagagtcaagtgggcatggttggtgggggttggaaggaccaagaactcagatcccacaacttgctcaacaactgccttccccagagaatgtgtgggacttctgaaaggaggatgccttatttgggtaccagtttcttaatggtgccaaccccatggggctgaggctctccattcaccttcctacccacctcgtgttccctccagggatggaggaactgcaggcccagctggagaaggagctggaggtatggacatcagagccccagggaggcccaacagtgaaatgagttgggctagcctcaccggtactgctgcgggacccactgtgggcctggcttgctgccagtcaacaaggagggattctgcagaagtcctgggggatcctggagaagctcagctgcacagcctcctccccacatgctgtggagggagggtgtgcaaggtggaatggttgataggacagggtcaaatgaagaaacatgactgggccttgatgctagggattcagggagtgtgcagagtaagggaatcaaggtcagagtgctgtggctgttaatcaggagtcaatatagaacaacagacaggaagtgcatgggattacagggcagataggcttggatgtgaaccctggttctgctatttgtaagctctgtgacctcaggcaaaatacccaacctctccgattatctgtttcctcctctgtgaaactgaggctcattcaactatgtataagaattataagcccaggcacagtggctcatgcctgtaatcccagcactttgggaggctgaggtgagatgatcgcctgaggccaggagttcaagaccagcctggtcaacacggtggaaccctatttccataaaaaatgcaaaaattagtgtctgtaagttttggtgtggtggcatacacctatagtcccagctaggctgaggtgcgaagatcatctgggcccaaggaagtcaaggctgcagtgagccatggtgatcctgctgctgcactccagcctgggcaatagagtaagatatatatatatatacatatctcagtatatagagtaagatatagatatatatatatatatctcagtatatagagtaagatatatatatatgtatatatatatctcaataatcacatgattccctacttggtacaaagtcggtgatggagacaagttagttcccttctctctcttctcccctggaagaatcagagtaagaaagaagatgccttatgctgatagcagccctttacctcttctcccatccaggggagcacactgtttgaagctgacttctccttgctagatgggatcaaggccaacatcattctgtgtagccagcagcatctggctgcccctctagtcatgctgaagctgcagtctgttgggaaactcttgcccatggtcatccaggtgagaggacttgagatttctgctcccagtatccagccttctcagctcagcccttatcgaaattcactgggcacccactatctgcatcttaaaggaggaaatgggcaaagtctgtgattcgaacaccttgaagtatagctggagagacagactgggccagtctgaagaagctctggtactgaggaagtccctgaggacaggacagcccaggagggatcaggggaggtggggtatcatgagccttgaaggagggccagggctcagacaagcaggagggaaggaaaggacctgtcctcaggggcaagacggtctgggcagagaggctgaggcagaggagtcaggagattcctaggggacagttggactgggggccagactacgccaggctaaggagtgtgatgtgggaagctggagaaggctgtgatgaaatgtgctgtggactttgggaggccgaggcggatggatcacctgaggtcaggagttcaagtccagcctggtcaacatggtgaaaccccgtctctaccaaaaatacaaaattagccaggygtggtggcacatgcctgtaattccagctactcggaaggctgaggcaggagaacctgggaggtggaggttgcagtgagccaagattgtgctactgcactccagcctgggcaacagaacaaaaactacatctcagaaaaaaaaaaaaagacagaaatatgctgtgggcacactgtataggcggttgtgtttaggatgggttggagaggggagatgctagaaacaggtattagggtgacatgctccagcacttgccccaggaggaggtgggctcagatgtgggtagtgaccatcaggatgaagaggacagatggatgtgaggttagaaggagatcaaggaggaaggaaagggaagccaggccaggtgcctgcagaaatagcrtgaataaagaggacagggtgctcacataggcttccgcctggccaatgttgagattaccggaagacatttaaattgtctggcaggcaactgagaactrgagatttagtcatttgggtaaagatggggctgaaagatgagattttgaaaaaggagtgtgggatgaaggaagcaggcagtttgaatcttgtccacactgcagggactgaaaggggaagtggaggctggagaaggcactagaagagcagtttctacagaatgttggaggcagagcagcttgcagggtgctaatgcaccaagtggataggaaagggaggggtagctgtagggagtggcagcagtgacatggagcaagtgaaacacatttggaggaygaagggagaggttaaacatgcaagggaggggggttgstgagcacctggcactcaccccttctctccctacaccttgttcctgctccagctccaacgtaggatcccagccacttccscttttcttgcccatggatcctgcaatggtctggcttctggccaaatgctgggtccatagctctgacttccagctccgtgagctgcagcctcatcctctgaggggacacttgatggctgaggtcacttttgtggccaccatgaggtgctttcaatacatcctgtcttcaaggtaacaccttattcccttccctcctgcaggcctctatctctgccccaggccacattcccacctctggaggctccctctctgtggagtttcagagtttggagagaatcaaggaatagaagatgtgagagcaaaagagtgcaagcatggctggccgtgcatagcacctttcttgaggggaggggtaaaatcattcttggggaaagtagggaaaaaaatcttactctttttatgtgcaaagcacagatattggtacagtacataaayagtacatgcaaatgaccaaggattccatccaataagaagaaactatgcaaataatatacaaagacttttttccagccagtcatttatcagttctaaaatagtgatactggccagttagaggggctcagaaaacaacagtcacctggtttattacagaccattagagcgaagtatttacttattaaaaatatgtattgggagcctcctgtgtgacaagaaccattctagacgctagcagtaagcaagatagtcaaagtcctgatcttttgagactttcatttccagcaagggcaaacagrcaacacagactgtattgtaacatatcagctgtggtaggtacgatgcagagaatcaaagcagagtgacgtgatggcaagtttagattgggtggtcagaaaaggctcccttgaaggagatgacatcgagaatgcgactgtcagaagctaaccttgaaatgatcaaaggggcacagtgttccaagcagaggcaacagcttgtgcaggatcgaggtgggaatgaactcggcttcttttggttctttgaaggatgggtaaggtcaggcaaatcaacctgccctgcctccacagtcagaaagaagagtgacgcagaatctcccttactctccccatacctcatcgaaaacttctgtgttggagaccagcggctgaagaaggtgaggataacttgaaaccaggaggtggaagttgcagtgagctgagatcgtacctttgcactccagcctgggcaacaacagcgagactccatctaaaaaaaaaaaaaaaaagactacttacagaatgataatgaaaaaaaagttgagaaactttggtctagacctgtggaaaaaaatatgaaaagcaaaggagaatgatttctttcaattatcataaagcactaagtcagtggtttgtggaacatgttagtcagtgcaaatcaactgaaaacttggtcgtttatttttatttatatttatgtacttatttttaacttttaggttcggggtacatgtgcagtttgttatatcagtaaattatgtgtcacaggagtttggtgtacagattattttgttacgcaggtartaagcatggtacccgataggtagttttgggatccttccctcctcccaccctccaccttcagatagatgctagtgtctgttgttcccttctttatgtccatgtgtattcaatgtttagctcccacttataagtgagaacatgccatatttggctttctgttcctgtgtcrrtccatttaggatgatggcctccacctccatccatattgcttgttcttttctatggctgcatagtgttccatggtgtatacgcaccacattttctttacscagtctattgtagataggcatttagatttgattccatgtctttgctgttgtgaatagtgctgtgatgaacatacacatgcatgtgtctttatggtagaacaatttctattcatttgggtatatatccagtagtgggattgctgggtcaaatggtacttctgaaaactcactgttgagaggtcactgaactttaagtctgtgatttttctgaagacctggtatctttcctgtttgtcagcccctatttcctgcagggacctgtgcagctgtcttctgactttgcccttccctgcttttttttgcctctagcttataattccccacctgcaatacaccatggaaattaacatctgggccagaactgggctggtctccaacaggaagttttcaaccaggtatggggagagaaagggagattctgggtcactcttctttctgactctggactcagggctggtcaattcgcctgaccctgcccatccttgcttctcaggtggtgagcactggtggggaagccatgtggagctgctcaagcgagctggagcctttctaacctatagctccttctgttcccctgatgacttggctgtccagggcctcctgggagtcaagtcttccttctttgccaagatgcactgcagctctgggaaatcatctctcggtgaggcaagcgggaaggccagtgggggtggagaagaaatctaggagagcaggaggtctgtgtctggttgtgggcctggggccctgacatggccatgtgaacaggggcagagctggcttcaacaccctggccctgccccattggctggccagtatgtggaaggaatcgtgagtctccactgtaagacagacgtggctgtgaacagtgacccagagctgcagacctggtgtcgagagatcattgaaatccggctgcccaggaccgaggtaagaggagctcctgccctgaaatctcagacacaaaactgcaagagacctccccagaatcctctgtgcttctatgaaatcttccagaagcatttccaatacctatgaaaactccaaaggccttctcagattctattccctcccagctggagacaggtccccatcctatgcattgagaaccccttagatgccagatgcagcggaaccagtggttgctcataaatgtttaataactgactctcagggaaaaaaaaggtcccaatttgtaacatttgcacatttccatggcacaaatattcctactgtggctaccaaggtgatgttggccagctcactaaaaaccttaacatcattgactgactcttgtgagccagtatgagtcagcaccagtgccccactgagtgggaccctcccagtcagctccccactcccccacccaagcctgctgtcatggtaattcccacaagagttactgagcattccttctgctctttctcacccttcttgttctcctctcttggccttggcctctgagctctgctctactcctggcctcacagcttctaactctcctcaccccttgaagggtttcctgtctctttacagtctcaggaccagatttgccactttgtcaccacatgtatgtttgcctgcactggccgacactccttcgtccacctggaccaggtagttaccagaaatgggcagctgggaatttggggcctgggtgacggaggagtctgtatgcaggtgggtcacagggttttcatgcttagcagacagtgactatagattcctgactttccttagctggattggtacatttgggtccctaatgcaccctgcacgatgtggctgccaaccaccaaggatgcaacgctggagacagtgatggcaacactgcccaactttccagatgtcctctccagatgtccatcagttggcagctgagcagacaccagcccattatggtgacagcaaagtgcccagggccctaaggaaggaggcagctgtggggacatgtggcaccccaaactgggggtcataaggctctcagctgttttttcctctccatcccaggtggctgtgagccagcataagaaggagtatttttcgggccctcggcctaaggctgtgctgaagaagttcagggaggagctggctgccctggatgaggaactgagatctggaatgctacacgggacatgccctatgaatacctgcggcccagcctggtggaaaacagtgtggctatctgagtgtcaccagcctttggttatttcagtcgccctccacccaagccacagttctacccccaggtggtttcagtcctaccctcccaagccccacacttttctcatgtcccaccctccctaaagggacaccttttcatggtctctgcacccagtgaacacattttactctagaggcagcacctggggccttattcctccctcctccctccctcctttcctatatattccttcctccctgtcttcctccttcttcagatctatagggcaaataacagccacaattatataaaccatttcaaggatcgaatagggagataatacatattattccacaccttttatgaatcatatgtgattttttttgagacagggtgtcactctgttgtccaggctggagtgcagtggtgccatcaccttagctcactacagcctcaacctcctgggctcaagtgatcctcccacctcagcctcagcctcctgagtagctgggactacaggctcatgccaccatgcccagctaatatttttttttgtagagacaggtctcactatgttgcctgggctggaaatatgattttgaacccaaattcagtttaacaataacaaaaagatattttagactaatgatagaaaagaactagaactgaattattttagataaaatattggcaaaagaatatagagcatcaaaaacatttatctgggttcacatgcttgatgtggtaaagaatacaaaagtttttaaaaattaaaaaaaaattggctgggtgcggtggctcacgcctgtaatcccagcactttgggaggccaaggcgggtggatcacgagatcaggagatcgagaccatcttggctaacatggtggaaccccgtctctactaaaaataccaaaagttagctgggcgtggtggcaggcacctgtagtctcagctactcgggaggctgaggcaggagaatggcatgaacccaggaggcggagcttgcagtaaaccaagatcacaccactgcactccagcctgggtgacagagtgagactctgtctcaaataaataaatacataaataaataaatacaaataaaaaaattctctttctaactatataggatctaacttgtgtcctgaagccagacacactacaaagcaaaccattaagacagtgagtcccaagaatttttgactcaagattttcatgtaatggctcacttagaaaatactgaaggaaagtcagctggttgaactgaagaagctgctcctggctggagatactcggcatcagaacttcagcctcatgcatccataccttaacccctctgcagttcaccagctgggaagctcccaattaataacattaagtggaaaaagactaaaaatttcattattaccaaaatgagtacaacaaggcattcaatgaactctaacttctgtatttcattaagattttgggaaaataaacttggaagttttatttcttaatatgataatctgtgggtattttaaaacagaaactaagagtacacacaaaccaaaagtgttccctttataatacaataaagatgcttcttgcctctgattctatttaattccacagaagacatactggtgatgcttggtctgctttttttttttttctaaaaagaaacagtctcacttagtcaccccggctggagtgctgtggcccaatcatagttcacggcagcctggaactcctgggctcaagcaatcctcctgccttggccttccaaagtgctgggattgcaggaatgttggtcttattattttgtttgtttgtttgtttgagacaaggtcttgctctgttgcccaggctggggtacaggcatgaccatggctcgctgcagccttaacctcccaggctcaggcgatcctctcacctcagcctcccaagtagctagaaccacaggcacatgccatcatacctggctaattttttttaattaaatgtttgtagagatggggtctccccaggctggtctcaaactcctgggctcaagcgatcctcctgtcttggcatcccaaagtgctggcactgtaggcatgagccactgtgcctgtctggtctgattcttgaaggaggaattggaaatgaatagtagagaggtgggggcagagtttaacactggaatctaggagaatctgcagagaggcaagagagtgtggtaggatctccacaccagaaacgaaacagtaatccagcctggggagtgatgcggtggggcgcagggcctacgagaggtcttgtggcaaagcggggaagagtttgtttcatgatgtcaggtgattagacttgacctttgggaaacagccatggaaaggttttaagtaagagcatgtttagggtcctggaagacaaactcgcagaggcacctccttcttcttggagcccacaccctttttacaggccacgcacctctcttcggggtcacaccctcttttccttgggggccacaacctctttcctggttccttgttcagtacattcattgcaacagactttctcctcagtccctgacagagaaaatttcaactctcattgttttctggaaacaaatcttttagagcctcaggtttattacagacagacttgcacggggaaaactaagacacatgctcttcaggttctctaacacatgaagccatggcccttcccttccagtgaagttccagaataaaaagtcaggtgacagatagtgagctacatgatttttgatgagtacattcaatttcttttttttttttctctttgagatagagtcccactctgtcacctacgctggagtgcagtggtgcgacattggctcactgcaacctccacctcccaggttcaaacaattctccctgccccagcctcctgaatagctgggattacaggcacccaccactacgcctggctaatttttgtatttttagtagagacggcgtttcaccatgttggccaggctggtcttgaattcctgacctcaggtgatccacccgcctcggcctcccaaagtgctgggattacaggcataagccaccgtgcccggcctcaatttcttacaatagacttattctaacaaatatattttcttatgacaaataggtagccaataaatggaaattatagtaagttattgaaaaccataggaagcatagcctcaaggtgatgggtggtagaacatggaagataacaataaacttttgtcagaatcgcttaagggaaattcttgcaaacaagcctccagtacacaatttcaagaaggagccttcatcccagcctggttagtgtttatattctcagtgttttcaaggtaaaagtttgcaaatattctttagattttacttttatctagcaaagcataattgctggtcggtgcatagttctctcaaagtccttttgttaagcccttgcattctttccaaggttcctctttatctgcctattgggaatgggcacctctgtctttggttacaatttccagccaaggctgaatgacagagtgtaggatttttaccttcctgttcccatgcatcagaactgctggatcactgcctgctcttttgccatggacagaggaatggggtgcaggcctgagtgagcccagctgcctggattctgctctgtgacctatttctcagccatacttaccctgtcctttaaagatgagtttgggccaggtgcggtggctcacgcctgtaatcccagcactttgggaggcctaggccggcagatcacaagttcaggagttcgagaccagcctggccaatatggcgaaaccccatctctactaaaaatacaaaaattagctgggcatggtggcacgcacctatagtcccagctactcaaaatacaaaaattagctgggcatggtggcatgttcctgtaatcccagctactcaggaggctgaggcaggagaatcacttgaacccaggaggcagaggttgcagtgagccaagaccctgccactgtactccagtctggacgacagagtgaggtttcatctaaaaaaaaaaaaagaaaaaaaagatgagtttggtgtaaatacgtggagggtattcttggcggggaacccaaagtgagcagcgaggcttggaggtgggaatgggaacagggatgggaatagctgaagccagatactggtaaatgctgtttaagtcatactgtaggttgttc

SEQ ID NO: 93933 - DNA, 35381 bp, Homo sapiens
ctgctccagagtcaaggagcctcccctcttccttcaacgccattcctggtaactgtttataatcagtcctggagaagaacaatgccctcccttctcccacaaccccagactcagccccaaagagaggggtaaagagtgatgagtggtaggaggcagggaagtgtgagggatctactgggtgtctttttttttttttaactgggtgtcttttaacattttttaaattttaattttttgggggtatattgagttttcctatcttccaagaccagggaggatagtatggaggtggtggaggctggtacctatgcatgtagatgttatgtgagttgcccaggttgtaataggctctggcagctgcttctcggccttggctgcaggaatggagggaattttggggcttctgatgggaggttccaggggcccaggatagggcagtgccatggggctgcacctgtttcatggccctatccatgatgggaggtcccagatagaactcaggcggaggtagtggataggagtacagaagggcaggagtgcattccattgcagctggtgatgagaggcacaggccccaccgggcatgtaagagcatctataggctccactgggggtttacctctggaggcttaaaatgccacccgtagcacccattgtccaaactcaatgatgctccctgctgtaaaggtatgaagcagagccttcccagtcacctcctgcttcactgttgcctcgatgtagtttggactacacacaagttacttgattctcatagtactccttttgataaaatggcatcatgaaagaccgcatggcatcctttcccgtggaccaaaagatgacctggtaagggataaggtaaattgtatgtttctgggtccttctaaaggcctctggcatcttcttcatgtcactgaatgtaagttccacatggttataggacataaggatgctcttgcttttgctgaccatcactctgccaccctctgagcgattcttgttgaatgctttagtctctcctgtatactctcattttgatgcccttttgcatagctgcttttccatatcaggttatttgaacaatatcttatcttgcctttcagggattatatggaataaaagaagaactctttctcagtatcccttgtgtcttggggcggaatggtgtctcagatgttgtgaaaattaacttgaattctgaggaggaggcccttttcaagaagagtgcagaaacactttggaatattcaaaaggatctaatattttaaattaaagccttctaatgttccactgtttggagaacagaagatagcaggctgtgtattttaaattttgaaagtattttcatttgatctttaaaaaataaaaacaaattggagacctgtgacataactctagtctctcaagattagaacgagcaaatggtaaagagattttcctctttaagaatcatttatagctctattctaatgatacccaatctgtacaggtgtaagttatacttctgaggtatgtcacatatgttagagtgccttcagatgtagtagaatatgtataatcactataatacagagctttgattcttttcacaaaccaagccctttttctagtattacaattttatcttgtactttcatccgttagagtaccagcatattcacttcattacattagcgtcatatgtttatgtataatcattataaatgtggccgggcactgcagcctgggtgacagagtgaggctctgtctcaaaaaaaatcattataaatgcttatttttaagaccatatatatcaaaaagaaataaaaagctgagtgctgtggctcatggctgtaatcccagtgctttgggagggtgaggcaagaggatcacatgagtccaggagtttgagaccagccttggcaacatagcaacaccccatctctacaaaaataaagaaattagatgtggtggcctgcatctgtagtccagctacttgggagactgagaccagtagataacttgagcccaggagttcaaggctatgattgtgccactgcactccagcctgggccacagaggaagactcagactcaaaagaagaagaagaacacagaagaaaagcagaaacaagaagaagatacagatgtaactttacgatgtaaaaaatctaaataagattgtattcaactctgcaagtattatactagtcatataaactcaaatagttgatttggtgtctcaattgaaatatcacctggggagcttatgccatcctcagttatttgtgcagcagactattactatgcttgctatggtatagttatgaaatcagtatgacattatctctgccctcaagtatccacagtgagtatttagggtacctcaacgaattgatttttgactaatttttttttcctttttgagatggagtctcactctgtcacctaggctagagtgcagtgacacgatctgtgctcactacaacctccacctcctgggttcaagtgattcttctgcctcagcctcccaagtagctgggattacaggcacccaccaccacgcctggctaatttttttatttttagtagagacagggtttcaccatgttggccaggctggtcttgaactcctgacctcaagtgagctgcccacctcagcctcctaaagtactgggattacaggtgtgagcaactgcgcccggctgattattgactaatgtttgataatagtcattaatagctccctgttggtgtctaaaggtgaaaatgcttctactgatttatatagtatatagatacatatgaagtatttccttgattccacaagaaatttaaggcagctataggaactatacaataaaacaaaaactaagaaatcagtatcaaggtaatttacaattttttttctttttttagacaaggtcttgttctgtcacccaggctggagctggagtgcagcgggtaattgtggctcgctgcagcctcgaactccagggctcatcagatcctcccacctcagcctcctgagtagctgagactacaggcacatgccaccacgccctgcagattttcgtattttttggagacagggtttcaccatgttgcccaggctggtcctcaactcctgggctcaagcagtcctcctgcctcggccccccaaagtgctgggattataggcatgagccaccactcctggtcaatttacaaattaagactagaactggaccaatgggaaagatcagaaggtagatatgcagcccctgaggactcgcatgactagtgaaggctgactcatttggtcagagagtcatggcttaccctctgagtctgttattcttgctctcttgatagctttcattctggtcatctactcctgatcatgattagtgtcccattattttattatttcccctttttcttcagcatcttcccttgaatatatacaattattatcagttgagttaggatgagggcaaggggagtcttctgtgggttttggcttttttaaaagctcgtttgtacatcaaaacttcattttaggaaattcttgcagagattaaaaggctgaaaaattgatacagtttctacagggaacattctagtaagtaaaactgctctacatgtccccaagtggctgaaaattggttctgggtatgggggagggaggaaaaggtaaaaaaaaacttagatattacaagagtttggctctccagagctcaaccttgcctgacaaataaacgtatatgtatatgtgtatgtgtatatatatatatatatatatatatatatatatatatatatatattttttttttttttttttttttttaagagatggagtcttgctctgtcacccaggctgcagtgcggtggcgcaagctccactcactgcaacctccacctcccaggttcaagcaattctcctgcctcagcctcctgagtagctgggactacaggtgcctgctaccacgcccggctaattcctttccttttttttttttttttttgagacggagtctcgctctgtggcccaggctggagtgcagtggcacgatcttggctcactgcaagctccgcctccccggttcgcgccattctcctgcctcagcctcccgagtagctgacgcctggctaatttcttttatattagtagagacgggctttcaccgttttgcccaggctggtctcgaactcctaagatcaggcaatccgcccgcctcggcctcccaaagtgctagggttacagccgtgagccaccgcgcccggccaactccttaatatttaatttcatgatgggggtgcaaaacaattagggggaacatatctacaaagactcttgagggagtgataatgaaaaaagattgagaaacactgctctacattttataaaaatttgtcaatatgtattactgtattagggttctctagagggacagaacgaataggatagctatatatataaaggggagtttattgaggagtattgactcacacaatcacaaggtgaggtcccacaacaataggccgtctgcaagctgagaagcaagaaagtcagtcggagttccaaagctgaagaactaggagtccaatgtttgagggcaggaagcatccagcacaggagaaagatgaaggctggaagacttagccagtctagtccctccacgttcctctgcctgcttttatcctagacgtgctggcagctgactagatggtgctcacccggatagagggtgggtttgcgtcttctagcctactgactcaaatgttaatttcctgtggcaacaccctcacagacacacccaggttcaacactttgcatccttcaatccaatcaagttgacactcagtattaaccatcaaaattacgtattatgattcacaaatgagaaaacaattaggtaaaatgtggtgggagaagtagaaaccttggtttattccagactgattttcaattctacatttttgttttttatttttgagacggagtctcactctgtcacccaggctggagggcagtggcatgatctcggctcaccaaaacctccgcctcccgggttcaaacgattctcctgccccagcctcctgagtagctgggattacaggtgcgtgccaccacacccggctaatttttgtatttttagtagagacggggtttcgccatgttggccaggctggtctcgaactcctgacctcagctaatccacccgcctcggcctcccaaagtgtggattctacatttaaccacttaataatgaattgagctttcccttcatcttgtaaaaatggttatcaattggcactgcattcatcaaattcttcaggtttcatatcttatttccaaattccttttgcatacagagttttgttgttgttttgagacagggtctcactccgtcacccaggctggagtgcagtggcacaatttcggcttactgcaacctccgcctcccaggttcacaaacaattcttgtgcttcagcctcccaggtagctgggattacaggggtgcaccaccacgtccagctaatttttgtatttttagtagaaacgtggtttcacgatgttggccaggctgatttcgaacccctgacctcaggtgatccgcccgccttggccttccagagtgctgggattacaggcgtgagccaccacgctcggcccagagttttaaaattttactttttctactttagctcacatttgaggtggtaaaagttaatcttgaggtccctttctcctacagggctgggggaaaattttcacgtgagagtcaaacagtccttttcagatacatccagacaaggtttggttagaaataaaattacttgggctctctggtggatgggttctaggcaaacaactccgcccaacagcagaggccctgcactgcgttgtgcctgcagcacctcgtgcgccttctgcagccggccaaccacctacaccgcagcccgcccacccgcacgcgggggcggggcgggcaggcagaggcgcaggcgcggtgcttcgcagcccgcttccggcctcacacctgccaagcatcacacctgccaagcatcacacctgccaagcatcacacctgcgatgcctgcacgagctgggtgcggtccgcgcagctgcagtaagggggcgacccggcgtctgttagtcggcggttcatctccttcgtgcctcgatgagctttaacgccattttcctccattctctttcttcacctcttgagtgagtggccatgagctgggctgcaagagtcctggggagcagccagagagcgggcgccgcgggagcgaattgtttttgcccaaggatggttctgtgtctccgccaggcggcatgtgacctgctcgggcgcgggtggcccttcacccctgtgagtgtggccagaagtacctctcacctggacctgcggaccccgggcgcagtcctggagctgagaactggaggttgggggaamagcagggtaaaggggagagaaaagggggtcagctgcgggacggagtgccgtcccagctgtagtttcatgtttggtggagcaacccctgttcctttcctctctctctctcttaattcctcttaactgtactcacgcttccttctccttcccctggtccgcttcatggatgctgagctgcctggccagaacctacccagcttctttgctggtcagatttgtcggtcttttgtgtgtctgcagcacctccttccacacgggcccaggagttctctatacgcgctctcaccgcaggtcttggaattccaagccatttccaattccaggtcttggraatggctgtgcaatttgtcttcactgttaggtttccaagatggcaactatcaagagtgaacttattaagaatttcgcggaagaggaggccattcatcacaataagatctccattgtaggaactggatcggttggtgtggcttgtgctatcagcatcttattaaaagtaagttgtgtgctctgcaccacagggttcacctcagttggaggcgaggccacagcgtatggttgtggaggttgtgtccagttcaaggtggtgagtggggagccagtgtgaggggcatcagaggaaaaggtgccctttttttagttgttcacccagagggcgctcctttttaaaaattgtatgatgatatcatgtgggttagaagcatctctgtgaaagtatgttgacatttcactttcacgtaatgacaatatgaggtacccctttgcttgatttggaaactcagctcacaaaacaaactggagagaaataggtggcagaaaagagtatacaagcgtgtcagtgatggtaggcagcctacgagtaccaaatacaataatcttttttcatttaaatatctctctcccatttcctagtctgtatatctttatttcccttcgttccttattcatgttaggttagttttagtgtttagctgttcttagtattgatacagctgataaagttttatggctatagacagaggccaaaaaaagattctgacccctttctaagaatattaccctgatatgaactttattaccataaagttttaataaatcataagacactctgagctatacttttattaatgaaatatctgtaaaatgttttaagccatcttttatataacctttaatcctggcatgagtcattggatttaaaggattgcctctgggtttcatatctagatgacatagtgaccttatggcactaaggacagcagccacagccaactgctgctcctgccagccatacaaattccccatgattcattttgtcctacctattgtaatgcctttatcagcagtgtcctcaytgctaatgaagaatacacacacgtgaaaaccaacacatctgtgactcattgattgtttgatggggcctccacgtattgcccaggctgctctcaaactcctggcctcaagcaggaggtctcggcttcctaaagtgctgagataacagatgtgagccaccttgctttgcccaacacattttttttaacatcagtaataatgataacagtatgtttgtatgcattatccaatattacaaccctggaaagtaaatattagacctactttttagaggagaaaaaaggaatagactatctctaattgcatgaatagataagtatacaggtaatatatatagaaaagcttgaaataaaagatttatttatcacctctgctttgaagggccattcagggagggactgagccatatccctggaactcctacctctgccagctgctgcttggctttggttgcaggagtggagggaattttggggcttctgatgggaggttccagggcccaggatagggcagtgccatggggctgcacytgtttcatggccctatccatgawgggaggtcctagatagatctcaggtggaggtggtggataggagtacagaagggcaggagtgcattccattgcaactggtgatgggaggcacaggccccaccgggcatgtaagagcatctrtaggctccactggtggcttacctctggaggcttaaaatgccaccyrtagcacccattgttcaaactcagtggtgctccctgctgtaaaggtatgaagcagagccttcccagtcacctcctgcttctagaacttgaattctagtatgttgctaactatggcatttgtatatcttaggaaatagggtacacaatccccctataaagcctcaggttaaggctcactttaatctttccctgtcctggccctagacactgcaacttctgtcattcaaggaggtggtgatagcctaaaaactccttgctgataaggaattctcaatatgaattgttcaggaatttattgtcaggaatttgtggtatgaaccttgtagagaaacagtaatgtctttaaaaattactgagttttaccataatacataaactttaattagtataatgcgagatccactttttcttttagtgttgtatctggaatctagaagagtgcctcctgtaattgatatttagtagttggatgaaagaattgctaaaagatgcccattaaaatggaatgcactggattgtgaatataaagatgggatattctgtttactttcatttttataaataaggaaagrgagtccagagagattgttaggatatatttttatagactttattttttagaatagttttagatttacagaaaaattgaaaggataacagtttataccccacattacaccttagtatggtgtggtggttaatattgtcaacttgattggattgaaggatgcagggtattgttcctgggtgtgtctgtgagggtgttgccaaaggagattaacatttgagtccgaggactgagaggcaaacccaccctcaatctgggtgagcaccatctaatcagctgccagcacgtctaggataaaagcaggcagaggaacgtggaaggactagactggctaagtcttccagccttcatctttctttcgtgctggatgcttcctgccctcaaacatcagactccaagttcttcagcttttgaactctgagacctacaccagtggtttgccagggrctctcggscctttggctacagactgaaggctgcactgttggcttccctacttttgaggttttgggacttggactggcttccttgctcctcggcttgcaaatggcctgttgtgggacttcacattgttatcatgtgggtcagtactccttagtaaactccctttcatatcgacatctatcctattagtcctgtccctctagagaactctaatacatattgtataccttagtgtggtacatttgtcacgatgaaagaatggatattgacatatcacctttaactaaagtccacactttactcagatttctttagtttttacctgtcctttttctgttccatgatcccatccaggatgataccacatgacgtttagtcactgtatctccttgggctcctctaggctatgacagtttctttagatttttcttgtttttgatgactgagcattctgaggagtactagtcaagtattttgtagaacacctttctcttggaatttggtggggtttttttgatggtgagaccgaggttttgggttttggggaggaagacataggaataaagtgccacttttcatcacatcatatcccggctacatactgtcatgatttatcagtgttgatgttgacctcagttacctggctgcttgtaatgcagcttagacttctaggttgatcagttgtacagtctagtttaaaatgtaaagcgcttggctttgaatttccagtaattcgaatagagtaaaaagatccaggctggatccaggcagtggctcatgcctgtaatcctgcactttgggagaccaaggcagtagtatcacttgagcctaggagtttgagaccagcctaggcaacaaagcaagaccctgtctctaaaatataaataaatgaataaaaattaaaaattggctaggtggccgggcacggtggctcacacctgtaatcccagcactttgggaggccaaggcgggtggatcacctgaggtcaggagtttgagaccagcctggctaacatggtgaaaccccatctctactaaaaatataaaaaactagctgggcacggtggcatgcatctgtaatcccagctacttgggaggctaaggcaggagaatcgcttgaacccgggaggcagaggttgcagtcagccaagatcgcaccattgcactccaccctgggcaacaagagcagaaactccgtctcaaaaaaaaaaaaaaaaaatgccaggtgcggtggtacatgctagtagtactagctacttgggaggctgaggcaggaagcttgcctgagaccaagagattaatgctgcagtgagccatgaatgtgccactgtactccagcttgggtgacaaagtgagaccctgtctcaaaaaagaaaaaaggtaaaaagcactaacaatgtgaattggatatgtgcttaaattatggatgcttggttatttctttccttttcttttttttctgagagggagtctcactctgttgcacaggctgcagtgcaatggtcaatctgatagctcacagcaacctccgcctcccgggttcaagtgattctcctgcctcagcctcccaagtagctgggattacaggcatgtgcccccatgcccagctaatttttgtatttttagtagagacaggatttcacgatgttggccaggctggtctggaactcctgaccccaggtgatccgcccgccttggcctcccaaagtgctgggattacatgcgtgagccaccgcgcccggccttggtcatttacttgttttttttttgagacagaatctcgctctgttgcccaggcwggagtgcagtggcgcgatcatggctcacttcaacctctgcctcctgggttcaagcgattcatctgcctcagcttcccgagtagctgggactacaggtgcatgccawcacgcccggctaatttttgtatttttagtagagacagggtttcaccatattggccaggttggtctcgaactcctgagctcatgatctgcccaccttggcctcccaaagtgctgggattataggcgtgagccaccatgtcccaccttgatcatttacttctaagcactaacacaaaggcgttatttttcctccaaggaaaaatttattatgtaataaagataaaaagaatatgtagttaaaaggtaatacatttacaagatttgaaagtaaggctgggtgcggtggctcaagcctgtaatcccagtactttgggaggccatggcaggcaaatcatgaggttaggagtttgagaccagcctggccaacatggtgaaaccccgtctctactaaaaacacacaaaaaattagccgggcatggtggcaggcgcctgtaatcccagctactcaggaggctgaggcaggaaaatcgcttgaacccgggaaggtgtgggttgcagtgagccgagatagtgccactgcactccagcctgggcaacgagcaagattccgtctcaaaaaaaagaaaaaaaaaaaaaaactaggctgggcatgggctcacgcttgtaactttggtaggctgaggcaggcggatcacttgagtcctggactttgagaccagcctgggcaacatggtgaaaccccatgtctacaaaaaatacaaaaattagccagatgtggtggcaggctcctgtgatgtggtggtaggcgcctgttgtcccagctacccaraaggctgaggtgggaggatcatctgagcctgaraaagttgaggctgcaatgagtcatgatcatgctactgtactcctacctgggggacagagcaagcccctgtctcagaaacaaaaagtaaaagtaaaattcagaaagatacatacaaggccgggcgcggattaaggcttgtgcctgtaatcccatcactttgagagaccggggcaggtggatcacttgaagtcaggagtttgagaccagcctggccaacatggtgaaaccctgtctctactaaaaatacaaaaaaattggccgggtgcggtgtctcatgcctgtaatcccagcactttgggaggcagaggcgggcggatcackaggtcaggagatcaagaccatcctggctaacacggtgaaaccccgtctctactaaaaatacaaaaaattagccaggtgtggtggcgggcgcctgtagtcccagctactcgggaggctgaggcaggagaatggcgtgaacctgggaggcggagcttgcagtgagccgagatcacgccactgcactccagcctgggcaacagagcaagactctgtctcaaaaaacaaacaaacaaacaaaaaaaaaaacaaaaaaaacccaaaaattagctgggcatggtggtgcatgcctgtaatcccagctactcaggaagctgaggcaggagaatcactagaacccaggaagcggaggtggcagtgagccgagattgcaccactgcactccagcctggggaacagagcaagagactccatctcaaaaaaaaacaaaaacaaaaacaaaaaaacatacatggagaagtcatactggtttccatccaatctttccttagcatccactttaggcaattatttgaatcagtttcttgtatttctagtgtttttttttttcaaatagaagtatattttctctcctttcttacatataaagtagcatcatagaaattatagtatgaattgatttctgtaggtaataactgtctgattatagaactaaaatatttttgagttggaaggagccctatattttaatccatttgctgtggtttgaatgtttgtcccctctggaactcgtttaaatttaatcctcaatgtggcagtattgagaggtggggcctttaagagttgactgggtcatgagggctctgccatggattaatctatggatgaatgggttatcaggggagtgggaatggtagctttataagaagaggaagacagacctgaatttagcaatcgcagcctccttgccatgtgatgccctgtgctgccttgggactctgcagagtctcctccagcaagaaagccctcaccatatggcggccccctgaccttggacttctcagcctccataactgtaagaaataaattccttttctttataaggtactcagtttcatgtattctgttataaggaacagaaaatggactaagataccatttattcaaaaaacttttactgagctcctctgtgccaggtggatgataagtaagcaccagatggctggggatgaatgacttcctagtctcaagaagctcaaggtctggtgagaaattccttcagcagaagcactactttatcactgtgcagcctcagctgaaattgaaaatcggggtgttcactactttcagagattgttctatttactaagcagtttctgtttttgttttcctcatgatgagctgaaatgctcctctttgtaatttgtattttttctggtttagacttttatatcatgacaaaatgatgagatcatttattatgtttcctttgattttgataattcacaagctagacatagatcaccaatataagaattttctttcattctccagttaatcaagagatacactcacacccattggactaacaatgtttttcagggtttgagtgatgaacttgtccttgtggatgttgatgaaggcaaactgaagggtgagacaatggatcttcaacatggcagcccttttatgaaaatgccaaatattgtctccagcaaaggttaatgtcatagttaaatactataaatattctaatatacatgaacaagtatctaagaaaatcatctttatttcttttgacctccccagtttttatagataaggctggttgctccctactctgtactctcataacgtgttcagattccttgggttgtactttgcaaggtttcccacggcaccagactgagttccttgtgagcagcagtaacagcagttatcatgacagctacaatgaactgactgcctattgtgtgtgagacattgacccaagcactttatataatttaatcctgagcacaactctattttagagatgatgtacctctgaactaaggttaattaaaagtgataggaccaggcatggtggctcatgcctgtaatcccagaactttgggaggccaaggcaggtggatcacctgaggttgggagttcgagaccagcctgactaacatacagaaaccctgtctctattaaaaacataaaaattagccgggcgtggtggtgcatgcctgtaaccccagctactcaggaggctgaggcaggagaatcgcttgaacctgggaggtggaggttgtggtgagccaagatcgtgccattgcattctagcctgggcaacaagagtgaaactctgtctcaaaaaaaaaaaaaaaagtgatggagtagggatttgaactcagttctgtttgattccaaagcctaagctcttcactactgtactttattcacttggcacctgggagataattatttgaacaaacgaatgaaccaacaatttgctattcaaaggtctgttcacaccacatctatctctaaatattcttgccagagtaatccatattttgacctcttcatctaaataatacaaaaggtattttaggaggtgaggtgttttttttgtttttttttgttttgttttgttttggtttgtttttgagacagtgtcttgctatgttggtgcaggctggacttggacttctgggctcgtgtgtgatcctcttggtctcagcctccaagtaactgggactataggagtgcactactgtacccaatttaggaggtttttgtttttggaaacggagtctcgctctgtcacccaggttggagtgtcgtggtgtgatcttggctcactgcctccatgttcaagtgattctcctgcctcagtctcccttgtagctgggactacaggcatccgccactgtgcctggctaatttttgtatttttagtagagatggggttttgccatgttggccagtctggtcctgaactcctaacctcatttgatggacccacctygacctcccaaagtgctgggattacaggggtgagccactgcacatgacttacgttttttttttwttttttattattaaaaaaaatgtacaagggaaacttagtgctaatttcctgaaattaaaaagtagtctaggcatactagaagatttaagggaacccactctttggtaaacatagtgtggtgattgaagtgaacaggaagtatacttaaatgccagatgttttctttcataatcgattgtttattctaatctttcctcagattacctggtcactgcaaactccaatctagtgattatcacagcaggtgcacgccagaaaaaaggagaaacacgccttgatttagtccagcgaaatgtatccatctttaaattaatgattccsaatattacccagtacagtcctcactgcaaactgcttattgttactaatccaggtcagctttgttgttttaaattttcaacttttagattcgggggtacactgtgtaggttcattacatgrgtatactgtgtgatgctgaggtttggggtaggattgatcctgccacccaggtactgagcaaagtacctaatagtttttcagcccttgctgctctcactccctccctctctagtagtctccagtgtcatttgttcccatctttatgtccatgtgcacccacatgtttagctcccacttatagtgagaacatgtatttggttttctgttcctgcattaattagcttggaataatgatctccagctgcatccatgttgctgcaaaggacatgattttgttttttatggctgcataggacagctttattttcactgttcagtgaaggagtttttgggggtgggtttagtaactttgaggagaaaaagmatttaatgaatattaaatcgtaaaccaccagtataattccagaatctctttctgttttgttagtgtaatatgtactttgcacagtggtaatcagtgtatatactataatgactttaaaaaatactagtgtgaggccagatgcagtggctgaagcctgtaatcccagcactttgggagcccaaggtgggtgaagtgcttgaatccaggagtttgagaayggcctgggcaacatgacagaactccatctctacaaaaaaatacaaaaattatcagggcatggtggagcattcctgtagtcccagctactcaggaggctgaggcgggaggattgcttcagccagggaggtcaaggctgcagtgagccatgattgcgccactgcactccagcctgggtcacagtgagaccctgtctcaaaaaaaaaaaaaaaaaaaagtagtgtgtatgggaagataatatgcttaatcatatgagttcaaggtttatattctaaaggctgaggtttgttttccaaattactgtttgagaagtgaaagtagggctatagtttactgcctgactctccaaaattgtactagactcctcactggtgcatttacaaggtggacaaactgaaaatagacttcggagataaaatgtgcaggactgctgatagattatgtctagtgagagaaagggaggaataaaaaataacttcgagagtttttcctttgagtaactgaagggatggtagttccatttaactgggttggtaaatttactgatcgggtgggagtcagtgagggaaggaggcagggatgttacatatagaggggaaaaatcaagatacctgaaatgatactcaagaggaaatgtcaaacagctagagattatgagtctggagcttagtagtttagggatattcaaattactgtattctaaaattatttggagtagtttttctctgtgcagaccaacagtgagtgcatgattaagtttattcattttaatttcgatgctgaagaactatttaacttttgtttcacagttttataaaatattcacatggctccaacatcaattctagagaacaggaattattcaaagtggtccagcttctgtccctgtgccctttcccctatagcctccatccttttataggtaaccatttacactttttatggtttacagctttttgttactacatacgtttttctccatcttctttcatttttaacttaatatatcatgaagctcaactccatagtagtatttataaatatgttgattaytgtagctttgtggtaagttttgaaatcaggatgtattaagtcttctgactattctttaagattattttgggtcaggcgtggtggctcacacctggaatcccagcactttgggagctgagccaggtggatcacctgaggtgaggagttcaagaccagcctggccaacatggcaaaatcccatctttactaaaaatacaaaaattagctgggcatggtggtgcacatctgtaatcctagctacttgggaggctgaggcaagagaatcgcttgaacccaggaggcagaggctgcagtgagctgagatcgcaccactgcactccagcctgggcaacagggcaagactgtctcaaaaaaaatatatatatatacacacatatatatatatatatatatatatatatatatatacacacacacacatatatatatacacacacatatatatatacgtatatatatacatatatatatacgtatatatatacatatatatacgtatatatatacatatatatacgtatatatatatacatatatatacgtatatatatatacatatatatatatatatatattttgcttgtctggatctttagcatttccatatgaatttatgtatcagcttgtcaatttctgaagtaaaaccagcaaggattttgatagggattactgctgattcattttggttcttttgtatttaataagttgtttttctcttgctgtttccagtattttctctttggcttgtaacagtttgactatgatgtgttgaagtgtgaatgtctttcagtttataccacttggcattcattgagcagcttggatgtataggtttttttttttttctttttttgagatggagtcttgccctgtrgcccaractggagtgcagtggcatgatctcggctcattgcaacctccgcctcctggattcaagtgattcttgtgcctcagcctcctgagtagctgggattatgggcacccaccaccactcctggctaactttttgtatttttagtagagacggggtttctccatgttggccaggctggtcttgaactcctgacccgaactgatctgcccacctcagcctcccaaagtgctgggactacaggcatgagccactgcacccggcttggatgtataatgtttttctatttgggaagtttcagctgttacttctttgaataattttctgctcctctcccttccttctggtcctaccatacatgcatatatatgttggtgtgtttaacggtatcccataagtttgaggctgttttttcttttttaaaatagttcatagattatcaaaagttctttttgtatggcattgagatttatttatatatttaactgcatgcatatctttagctttcacataaattttgcttcatacaggctattggtataagcatttcctcttttaagagtttgattctttaaaaaaaataccaaatccaaaattcagaaatggtagtccggcgctacaaggaagcacactgaaaataacaagctgatgatacattatcacattgtacaatagtattttatattttcttacacactttccagtaagttttttcacatcctgaaatgtcacggtgtcatttttgaaaggagagctgtggagagattctgatatgactcagagttgtgaaggcacctggtggagctccttcattaatttctctaaccgttcagggcactgaagtctgtggggacagtaagttcacatttactgtttgtgttaagtgaatccccaacctactttgatttgcactaaaacgcctctaccctcaaagtaccgcgtcattaaggttatatgataacaaattaggaaaaacaaattaagcatcacttgcttggcaacattaactggcccaccacactcccaccacagattttagaagtgtacattagcaaaagatgcttctctatgcattatggcagaagtctattaaagaatatttaatttattgactaatatttctaataagcacattcagaggatactctttctacrttttatatactggctgtctgccattaacagcagtaaaaataaggaaaaataaaaaaatctcaatctcaaatgatttaacagcttagttctgtatttgcttgacagtgtatgcagttatagtacacactatcaaatatatcttccatatctatttagaaaacttattctgatattagaaccatgtgaagaaagtcttctccattattttagtgagtctgttaaaatggtccactaagaaccatcttcaaaatttcaggtgcttcaaaagttaagagaaacaattaacttcattactctaatacaaaacaaaaacaaaaacaaaaactgacaactttaaattagtattaagctaccaaaaattgataccactcaggaaagattttttcccccccgaatgataattttatttatttttttgagacagagtctctgtctgtcacccaggctggagtgcagtgatgcaatatcggctcactgcaatctccgcctcccaggttcaagcaattctcatgcctcagcttcccaagtagctgggattacaggcatgtgccaccatgcccagctaatttttgtatttttagtacagatggggttttaccatgttaggctggtcttgaactcctggcatcaaatgatctgcctgccttggcctcccaaggtgctgggattataggcgtgagccaccgcgtggcactgaatgataatatttagctaaaattttagtgaaagaaaaggcaattctgagagcaatctgggtagagaggggtttctcaggcgtaggtactaattcccatgcaggactgccttcagatgcagctcccgtgtctccacagtcctcaaggcctggttttggtggttctgtagtaaaggcttcacacatgtgtaatatgtataggtagcatcactacaaaatggagtgcaagttcaaatcagagttttaaggtcaggaaaagtaagtatcatttaaatgaatcaccagagacacttttagaagttcttaagttcctttagaaatctccctttcaaggatgtgccaatttttattttggcaaatcatggataaaaactaaatgtattaatagttatgatgattgtggtgctattttttaaacattactaactttatagcaatactcacatttacctatttacctagcacacttttttttttttttgagatggagtcttggtctgttgcccaggctggagtgcagtggcgtgatctcggctcactgccacctccacctcccgggttcaagcaattctcctgcctcagcctcccaagtagctggaattacaggcgtgcactaccacgcccagctaatttttgtatttttagtagagacggggtttcaccatgatggccagtctggtctcaaactcctaaccccaagagatccgctcacttcagcctcccaaagtgctgggattacaggcgtgagccacagcgcctggccacatttcaacagtgttttattttcagtaactgacctactgcagtctattttcagacttttagtttatatatgatattttattatgctgatatgaatgtgaaattttaaaaattaaaacaagcaattagtaagggtttcttatttatgttaaatattaatttatcttacctaagtgcataattttgtccatgtagtggtagaattgtaaaactaaactttagaagtttttttttttttttttgagagagggttttgctctgttgctcaggctggagtgcagtggcgcaaacttggctcactgcaacctccgcctcctgggttcaagtgattctcgtgcctcagcttcccaagtagctgggattgcaggcgcacaccatcatgcccagttaattcttgtattttcagtagagctggagttttgccatgttgcccaggctggtcttgaactcctggcctcaagtgatctacccaccttgacctcccgaagtgctgggattacagacgtgaaccgccacgcctgcatacagatcttatttcagttacaaaaacacactgttgacattattttaatatagcattttagtttattactgtggaaatgtggagcacaagacatgacaaatactaggtattaatttcaaaactgttcagaatgaggctgggcgtggtggttcacacctgtaatcccagaactttgggaggctgaggcgggaggattgcttgagcccaggagttcaagaccagcctgggcaaaatggtgaaaccctgtctctattaaaaaaaaaaaaaaaaaaaattttttccaaaagaacaaaaatctacccagaatggcttatgaaggtttgtaattgttgatttaagagtatttaggattttttttttttttttacaaattaaaaagttccagtaactatttacatgaactaaatgaccaaatggaagtggaaaatggaaaatttagagggcagtacggtaagggaggggatgtaaaataatacaggaagataacctaaacaattgaagatcaaagatttaggaaaagtttaaccttttcttcaaatctatagtcatttacctagaaaatgcggttgggtaccctgggacacagctgagttacttgctctgttttcagtttaccaattaaaacaggtcacattctctgttccagacccagggcctggcagaggtcccccaatccccttgagtttcagtggcagttgacgaacctcttaaggcccaggatgactaaccgaggttcttcacttgacagctttatgtatgaggaaacttaaagacatttctaccatacttctctccatctcaggtattagaatgaatgcttaccatttaaaatagtggtatgatcagactgtttcagtatcactttttaccatcaatggatattaaacagggaacagaagctctaacttttacattaatggaaatattacctgtttagaaaacactgtttcagaggacaaaagatgtcatcttcatatctttttaaagtgtctaatttctactatttgagtacttaaatctgccataaaaaatatggatttacaaaaaagacaaattagaaattatgtccttyacagagatccactacaggattctgaatcttaaattgtcttcatatgtttaggatagaatttgatgcatttattatttttaaagtatgagttattacataaagctaagttaaaagttcaaccaaatggaaaaggtaccaacaaatgcctaaaatactattctaatcatctaaaacaagaacaaatagatttttcaaataagagttgaatcaatatttattttagacacttcatttacttgaaagctgctactttattacttaaagactgagcctgtaagaaaataaaagaggtttaattcaaataatatgaaagtgaactctttaccttacctgtttttccccaaataattttgacttcattaatggaaatttatgtgaatggctctaaaaaccacctattttgaaactgcagaaatagcaggacaatcactttgtagaatgatttgtgaaatattgtcctactacacttaaaaaaaaaacccaacacatttcctcacttacgagtattttcttatttttgatattgcaaattctatacatagaacacctcttcattgtcctgctgaaaccctcagaatgtagaggtggttcaaaagtaatttataccatttttacccaggctttgtaaacatgtatcaaagagatagcaaggtattcagttttagtaaacaaaataattgctcctatagtagctcctcaaagtcccaggcaagtaggcattagcagttttctattagataattctaccatctccaaataaggactttggtctgtttataaaaactaattgatagatgaaggtaggtaggtagacagacagacagacagacagacagatagatacaggcttttgctttgttacctatgctgaagtgcagtggcacaaccatagctcattgtaaccttgaacccctgggctcaagtgatcctgtctcagcctcccaagtatctgggactaaaggtgcatgccaccacacttgactactttttacattttgtagagacgcggtcttgttatgttgcccaggctggtctcaaactccaagtctcaagtgatcctcccacctcagcctccctgtaagaattgggattacaggtgtgagccaccgtgtctggccttggtttattcttggtagtttttttctcccttgtcctattgcataacctagaagactctccagtataatgttaaacagaaacagtgatagtgggtatccttgtcttgtttctgactttaatgaaaaggcttctaagttttcttcataatgtatgtttgctttggattttgatagatacctttttaagataaaaagcagtttccttctgttcctagatttagttttattttttaatccctgaatgagttttcctacagttaaaatgatcatatctatctttttctttaaatctcatctgatgtaatatgttgacagattttttgatattgaaccacctttgcatttctggggtgaagcttcttcttaaagtatttttctttctcattttcttttctttttgagacggagtcttgctctgtcgcccaggctggagtgcaatggtgtgatctcggctcactgcaaccttcacctcccgggttcaagcaattttctgcctcagcctcccaagtagctgggattacaggtgtccaccaccacgcctggctaatttttttatttttagtagagatggggtttcaccatgttgaccaggctggtcttaaactcctgacctcgtgatccacccgcctcggcctcccaaaatgctgggattacaggcgtgagtcaccacgcctggtgatgacgtatgtttcttttcttttctttttttgagacggagtcttgctgttgctaggctggagtgcagtggcacgatctcggctcactgcaacctccacctcccgggttcaagcaattctcctgcctcagtctcccaaatagctgggactacaggcgcgcaccaccatgcctggctaatttttttatttttaatagagacggggtttcagcatgttggccaggatggtgtcaatctcttgacctcaggtaatccactggcttcggcctcccaaagtaatgggattacaggcgtgagccactgcacctggcctctgatgctgttttaaaaaaatatattttttaggctgggcatggtcactcatctgtaatcccagcactttgagaggctggggcaggaggattgcttgaggccaggagttagatcagcctgggcagcacagcaagaccctgtctctattaaaaaaataatttttycctactattcaatgctctttgcttccttctattttatggttaaaataacacttgtcattgattttttaaaaatctttgttttaaaaatgcattaaagaatataaactaggccaggcacggtggctcacgcctgtagtccgaacactttgggaggccaaggtaggtgaatcacctgaggtcaggagtttgagaccagcctggccaacatagtgaaaccccacctctactaaagattacagatgtgagccactgcgctcatccctctcttcccctcttaactatgctttttgttgaaaatgggttattctctaagcaaaattatttgaaagacttgataagagagtatttgtttattcatatttctcagaattttctgtggagtgaacattctgtgtttctgcataccaagctgtgcaaagtatcaacgaaaaggtttttcattacttctatttggtagatattcttaagagttggcgtatagctggggttggatagagaaccatgtttcttgcctcctccacaaaacatcagatttactagttttaagttaggtaaatctaaaaaacatatccttgtagatgaggacatttcttgatatgaactttttcttcttagtggatatcttaacttatgtagcctggaagttgagtggatttcccaaaaaccgtgttattggaagtggttgtaatctggactctgctcgttttcgttactttattgggcaaaggcttggcatccactctgaaagctgtcatgggctgatccttggagagcatggcgactcaagtggtaagcctgaggcacgattgagcctctgaaatatctatttcctatcaatcatacagacatttaatgtaaagtagctcctgggaggggagaaaagactttattccactttaggcccttttagtagcgtttaatttttaccacacttatttttaaaataaccaacaaaaaatacagatttgaaaaatgtgagattgatactataatcctacatatggatggctaggattataacgcttttcttaaatagagaactaagtaacatgatatagtttgtatttaatttgggacactctagttcagaaaggtcagcagtgtacttcatgtagtaggcagtcttcagattaagggatgggtataactgaagaatataagaaggaagagaaagagtgctgtggtaatagcagtctttttgtccccccttagtgtcttctggctaaaaacctttgaaatctatttaatgtaaaccttggctatggaaaaagacttaaagggagaaaaactagaacttcctagtggaaagtttaaaactgcaattttcttatttggagaatctttgccaagataatagaattgtggatccccatctgtggagatctagatttagaatatctggagtggggctcagatatcggaacattcctagttggaaatcactcagggcaattataacagttttgctgaggtcaaaaaccaaaaccctgctaataccatgtaagaagtgggattttgggtgtctctttcttagttcctgtgtggagtggtgtgaacattgctggcgtccctctgaaggatctgaacccagatataggaactgataaagatcctgagcagtgggaaaatgtccacaaaaaagtgatttccaggtaatatgctagtttcacattttcagtaccttagaagttgtgagcctgaactctgttagaaggttgagattagtcccttaaatatatgttgttgtatttcccatatttttatttgcayttctgcttttctgtgtgatcatattcaccagattataaattcttcaacagtcaggaactgattctgtgttgcttattcctgagcctaacccagtattgagcacatggtaggggctcacttgttgactgacaatgtattttttcaaacacttgctatatagtgtttattgtagtggtggaattgattccatattaatttctgcatctctgtacttgtaactcaaatgtttaaccactgtggcagggcatggtggctcatgcctataatcccagcactttgggaagctgaggtggtaggatcacttgagcccaggagtatgasaccagcctgggcaacatagggagaccccatctctgctgaggtgtgggaggatcacttgagcccaggagtatgagaccagcctgggcaacatagggagaccctatctctacaaaaaaaataaaaaattagctgagcatatggtggcttgcttgagcccaggaggtcgaggtgagctctgatgatgccaatgcactccagctgagaccctctctcaaaaatgcatatatatggccgggcgtggtggctcatgcctcatgcctctaatctcagcactttgggagaccagggtaggtggatcacttgagatcaggagtatgagaccagcctggccaacgtggtgaaaacccgtctctactaaaaatacaaaaattagccacgcatggtggcgcatgcttgtaatcccagctactcaggaggctgaggagggaagattgcttaaacctgggaggtggaggttgtagtgagccgagatcacactactgccctccagcctgggtgacagagcaagacttaaaaaaaaaaaagaagaaagaaaaaatgcatacatactacaagtaatttctagaagttgttgatggagtcactgcagttttgtggcattgttagatacattgctacaaagtggaagttcaatgacaagtgcatcttaacttatgtttatggtttcttctatctacagtggctatgagatggtcaaaatgaaaggttatacttcttggggcattagcctatctgtagctgatttaacagaaagtattttgaagaatcttaggagagtgcatccagtttctaccctaagtaaggtaggacattcatgttcgaaaaatcattaactcaacataaaataggggggtaaagaacatttttgaggcactctggttttgggtttgatctcgtgggaagcacctctcttcctgaagtctgttctytgctgctgaagagtggggagattggggaaagagcctatctttgtagacctttgtcctggtctagtgtgacatttctttttattagataaaagtaagtgttttggcatctttattatttaactaagtgaactgattctaccagtatctagaaacattgggaaccactatgggcagaccttggtacctttggagttgttctcttacagtttcagttatgtccaatgatgagatctaagaaagcagcactagacacaaaataattagcagttagtctcctggggaaaggggagttggggcatgggtgagatccctctgctagtctaaatgggagaggttatacaacaagacagatctagatcactgcaaacaaagtcataggaattttgaagtggtctcctgataggaagtggtatggagtaaggagatgaggaaagaagggtgagccccagcaaacatggcaggaggctggggcctatatggagagatggtgggttgaaactgaacaataaatatgtctaatcatgttttaaattgttttctgtcggccgggcgtggtggtgtgtgcctgtagtcccagctacttgggaggctgaggtgggagaatggcgtgaacccgggaggcggagcttgcagtgagccgagatcgtgccactgcactccagcctggacgacagagcaagagtccgtctcaaaaaaaaaagaaaaaagttctctgccttggtactctgccatagttcgtactataccaatctgttattcattcacctcccaactgttgtttctcatattgcagaactttgttaaaaaaggaataatttttaagtctttactttcagggcctctatggaataaatgaagacatattccttagtgtcccatgtatcctgggagagaatggtatcacagacctcataaaagtaaaactgactcttgaagaggaggcctgcttgcaaaagagtgcagaaacactttgggaaattcagaaggagctcaagctttaaagttgcttaaagctaattctgtagattgaagatgaaatagtagttatggaattgtatatgtcaaacttttgaataaatttgaatttctaaaagttggaaaaatagaggaaagagtgacctatttagtatagccttccagcttttttttttttcttttttgggagggtctcattctgtcacccaggctggagtgcagtggcacaatcatggctcactgcaaccttgacctcccgagctcaggtgagcctcccacttcagcctccagagtaggtgggaccacatgcgtgtgcctccatgcctgcctaatttttgtatctttttgtagagatggggttttgccatgtcatccaagctggttttgaactcccaaagtgctgagattacaggggtgagccactgtgcctggccttagctttgatttagtatccagatgatagatgacacttttttttttttttttttaaagtgacggcatcaaagatgtttttggtacttctcagtacttgccttgtatgtatacgtaattgccatctggtccacaagaatgtgtttactgtgttacacaaatcctgattcttttcatcaggtgcatagtaattcttctctatggcttaatacctatgttcatttacatgctatctctacaatgtaaaaataaaagtgtatatatatacacacacacacagagagtaatctaaatgttcctaacactagataaaaccttgatttgaccttgctgttttttattctttgagtgcattttaatttttacagaaaaggccttaagctgtaaaccgcttggtgacaacagattaaattggtcattcttctcttgggagtagagtgggctgcctaattatcttaataacatcccaaattggaatatacttttctttgtagccttgtagcctcatgagctttctagcactctcattttgatcaagaacattctattctggatgagctctgcaggacatacagcagctatatagttcattgggtggtcacaaacttggctacagaatcactcaccatgaagacgaaactttaaatgacaataaaagcagggaggcaatggtacactatctttccctttaatcctaaagttatcaggtatatagtttggacctgccactctgctcctttttgatgaaaacacttatggttcagtgaggcctagaaaggaaacaaatttagtagggttggtaggagagcatctccttggacctttcacagataagttactcaaatgcttcaatttcaaatatttcaaaatttagatttctatttggtatatccccatgttaattcactttatatgctgtagaataatactaaatttcaacttaagatggattttatgccttttttgctaaatgagaagttgggcttactaaggtttcatggatctttcctaaagtccaataaaggagagaaaaattatgcaacaaattttatttagcagtcccaacattcagcacaaaaagtttacagaggatagaaagtgcattaataaaagccagtctttaccaaaagaaaacagaaaatatattattgattcaaaatattttacacttgaatgataaactgcaataacttattctgggcacctactgataaaaggaagagaagaatactttaagaagagctcaacctccagctggtatcagagaagtcagtagaggtcactgagaccggcagtctttcttgctttttgcattagtgccctcagctggaactgtttacgggacagaagacgtacatgctgggaggggagaaaagtttgaatagtttagaatggctttgatttaggcccaggcataaaatagacaatttgtaacctagatgggatctaagaaccctaactcatgacctgccaacctttggaatgaatacctcattatatgtggcttttaagctgcatattataaaggcttactcaacagggaaagcattacattgcaggatctggctcaggagtttgacctacactttcttttcctaagccatgccactcaagcaagagattgtacagaaaaagagtcctctcttgggtctctggtttatatccagccattcatgtggttgtaccacttctgaggcacatggtttggccattcccccacagtgagaggagataggcaagatcagcacatgacctgaccaggctccagctacagctggatcagatatcccaagggtggctgctattatccctaaaaccatgttctccatgacccaagagacagcagtagccaaacttcgcttactagattttcctctgtacaacagcattaagcttgagacaactttcattcaagagggcttgaaagggcagcctgatactttgatgtgggaaaactggtctaaagttatataactctaagaaaattaacagataaaaaatggaggtggcacaatcagtgatctcaatttaggtggtatgacctcaaagaaccaatggaaatctgatcgtacctcctgatccacccaggcacagaagagttacactcatcttaatgctgcctgtgggcagagaactgcagccaccagcccacttctcttcccctgctcagaccaatcctcagtactctgtaggtaaaaagatggtgcaaaaccctacatctcatttagtgttttttgggaagataaagaatcttaatccatactacaaagaaactctcttggtttgtggtttgcaaggtcagtgcctctacaacccaagttaaaaaatcttggaacgtaaaatgaagaaataccttcaggaagacatccaggtctatcacgccccttctcaaggcttctcccaagtaaaagatagtgtcttcaatagcgttttcttctgcatacagattcaggatctgtttgtataagggagctgtgggaatgataacttcatcgatatcattgttttcagactgattttccattttttccagagcagaactgagttcttcatccttctttttcaaaagttctatgtttttatcaacctcggcctgaaaacagaacagtccaagcattaataactgtacataattatccacttgtcagacacctacaacacttcacaggaaaagacaggctaacaaccatgtttaaacaactcatggatgagaataatgtttcaaataacaccctggtcaaaggtagaggaaaagatgtgatctactatgctgagtgaaatagagtaatgatggagatatcctgaggtgacagcactttcagtgacagtaacaagcttgtcacctgtcagcgacaaatgatactgcaaactaagccatcagacaagatactttccagcagaaggttcctttacatagaaaatcataagaggtttttcttcccaacaaatgggcacctgccataggagagtaactttcctcagtctatgaagaggattcaatgcatagaggcccaaatgtctgcattctaatcacaaagtatcacacgcaggtgctggttgtaggctctgagttgtattggtgtcactttcctgaattctaaaaattggctacttcgaggctcattttacaatctagaaccactttgtaaggctaatgggtacatacaaatcactttccacaaagccctcaaccttctaagaattctttactattccatcaaaaacacacatttactggaataaattctccctcatggggatgaaaatggagcgtgaaattggcacttcaattatgctgatgcttccactttatcatcattaagcaaagccatagggctgacttacacacggactgtccaaggcatagctgtctgttatgagaaagcttaaagagctgaaggttgcatatgctatgtttatatgtagctctttagccaaccaagtatctctggattattgagaaagttccctgaacatacttttaaaaaatggctcacacaacctttggaaacaataaaatagtactgtccttttaagtctgctcctaagatgtgcagatctttatcatggcttagaactctctaaacttatttcctagtaactggcaacatcaagcactcaaacagtcctcctttgggttaaaacatcctttgcctaaaacatttcctagggcaaaggtgtgataaggtttggctgtgtccccacccaaatctcaacttgaattgtatctcacagaaagggacctgtgtgcgtgtgtgtgtgtgtgtagcagggggtggggagggatggcacgcaggggtggtaattgaatcatgggagccggtctttctattctcgtgatagtaagtctcacaagatctgatgggtttatcaggggttccagcttttgcttcctcctcatttcctcttgccaccaccatgtaagaagtgccttttggctgggcacagtggctcactcctgtaatcccaacactttgggaggccaaggtgggtggatcacctgagatcaggagttcgggacgagcctggccaacatggtgataccccgtctctactaaaaaatacaaaaattagccaagcatggtggcaggcacctgtaatcccagctactcaggaggctgagtcaggagaatcgcttgaacctggagggtggaggttgcagtgagccaagattgcaccacttcactccagcctgagcgcaagagtgaaactctcaaaaaaaaaaaaaaaaaaaggagtgccttttgcctcccaccatgattctgaggtctccccagccatgtggaactgtaagtccaattaaacctctttttctctcaagtctcggatatgtctttatcagcagcgtgaaaacgaactaatacaaggtgcaaacaaaatggtctaaatattatacccctcccaatctaagaccaaatgccaaacataggctccactgtaaacaaaggtataaaaaattacattcaaatgtttaaagatgcctataattttctgaactcctactatgcccacaacatccagggaacatatagaacactctgccatggctacaattcaatccaaaaattttaagtctttaatgagtcacttactacttcttgatctaaacgggtaaccatctcttccagtttctggtgaccctttttcaggtcttcttctgttcgtttcaaggcattgagctctgcctgggcacgatccatttcctccttcatccgccatctcagtttgtcactgaccgcagagatgagagaggctcggatggtgtcctcgctgattgtgccatccctactgggacctgcaggaaacagaggcaaaaaacacttgcttacttcccaagttccttctatttgtctcacaggaaccttcagaaaagggggcaatatgaaccgacactttcaaaatgtgaggaaagaaaaaaattatgttaccagtttcatgagaaataatgtaaaaatctgagttgattcagaaatacttgccctacaagagattactattaatccatgttaaacccagtttccctattcatagcccaaacaattagctacaattagttattttctcaatgagacagaggctatgtccctaccaattacaattattcctaaataaccaacaaatggcacaataatttccactaaggaaaaacatttggtgcaggccaagtccaacatcaggcttcgctgctaagctgaaggagacaagtgcccactgtagaggccagtgagaggactgagaatgggcagtttccctaaacgaatgtacaggttaataaggcttccctctgtaagacttttactacttcaccctttaccaacaggacagaacagatgaacaaaaaagaatgacatccaaaaaattcaacagctgataaactgtttattcccagattctttactattctcttccaaatgtcccttcctaatcagtatattatatcatttccatgcatatttcagatcaaataaacatcctctggatattttcttcaaaaaggtcccctttctaatataagtttgggtattctttatgactatcagtgttcttcagttattgtcccaaatcagcaaatgtgtaaatggcattttgacttttaattatgtttgattataaaatactacgtgaggacgttaagtatatttaaccttaattgccgccttttttttttttttttttttttgagatggagtctcactctgtcacccaggctggagtgcagtcgcatgatctcggctcactgcaacctctgcctcctgagttcaagcgattctcctgcctcagcctcccgagtagctgggaagcaaacttcctgaagggccttgtgaattacctgggtcttctaattacctgttagatgatcctgctttttaccaaaaccatcaacaaactctgtcaacaaactctaagccattctaaactaacaaaaaagtttaatgctctcgaacatcagatcccatcttctctctaccattaaatt
